United States Patent Application Publication US 2017/0114356 A1 - sequence listing, part 49

SEQ ID NO: 66238 - DNA, 2030 bp, Zea Mays
cgcccagagcttctgttcgatgccccctccttcaccacccgcctcgcaagtgcgcacgtgcgatgctggcgccgcgcagtcgcccacgcgcgggacggtgagtgagatggcgcgatacttccgcagcagcaacctcgcctctagggtcttcgagcgtcagctcatctccccgcgccctggcgctaccgttaacactattagacagttctatgaaaatttggtcccaagctatactatatatgacatagattgcccagattattcgtttcgcaagttcactgatgatgggaaatattttgtggcctttagccgaaaccatcaagatttgattgtataccgtccaatctggttgacatattcatgcaatgaagaatgtgatcctcatgagcttccgccaaaggcaaagaagtttgacagcttctttaagcagctttattcaattcctcttgcatctggcaatgagtatatttgcaaggactttttcctgtacatggaatgccatcgatttggtttatttgcaacatctactgcacaaagtaacgaatcaactgccactgagggtgcaatacatggggtgccattaattgagaaaataactttccatcttgtgaggctagaagatggtgtgatacttgatgaaaaggctttctgcaatgattttatcaatctggcacatagtattggtgcttacatgtatgaggaccttctttgtattgtttctttgcgataccaaacaatacatatcctacagatacgagattcaggcaaccttgttgaggtacgcagcattggtgcattctgccgggaagatgatgagctatttcttcactcacatgttcagactggttatgcgggttcctttcttcctggcataaagcaacggttgttgtcgtatattttttgcaagacgtggaatgaggttccagatcagactttgagggtccaacatctaaagaagttctattttcacttccaagattatgttgatcttatcatatggaaggtttctcggagtactgaccaaaacctagctttctttgccgtgtacaacatggagacaacggatatcgtttcacttcatcagaattcttcggaggagctctatgccttgtttgaacaattttatgaccattttcatgcaaacccacaagcttcatcacatggaaaatttatctcctctcattccaatgatattcatgctctggatcaacttcgggttataaaaaataaagcaagtagctcctcacagtttgtgaaaaagatgatgacgtcattaccttacacttgccaatcacagagtccatcaccgtactttgacctgtccctttttagctgatttcagcaattgatcggcatcgacattgcacagagcatccaataaaatttatatcagtgaggcaaaatgttgtcaaatttaagatcaagccaggttcagattctggtgcttctgacagcagaataaaaagaatctcgtctttcttgtttcacccatttttcccgcttgcactttcgattcagcagacttatatgcagccaactgttctcaacatccatttcaggagatagaaaagtaggggataagatccattgtctggcggtgagaatggctagtttgatttctcttccaaaacaaagtacaaaatgcaaatgggctcaatattcatctattgatgtggcttcatgggctcatcagtcatcattgcggcttcacagtgttgatctatgctttcatatgcctagctcggagtgtcagatgtgcttgttattggatttgaggcataaggacacgtatattggatggcatggagttggtatattggatgcttcatgcttgaggcgagggtgatctaagctgcgaatttgttttcgaggatatataggaaatatagcattacaaatagttttgagttgtcatattatgatgaagtaactactatttactgaaactgttatgcaaagataataattatttttctgtgttcaatatattacaaaaaacttcataatctacaacctttgtttgtctaaac

SEQ ID NO: 66239 - DNA, 2004 bp, Zea Mays
cgcccagagcttctgttcgatgccccctccttcaccacccgcctcgcaagtgcgcacgtgcgatgctggcgccgcgcagtcgcccacgcgcgggacggtgagtgagatggcgcgatacttccgcagcagcaacctcgcctctagggtcttcgagcgtcagctcatctccccgcgccctggcgctaccgttaacactattagacagttctatgaaaatttggtcccaagctatactatatatgacatagattgcccagattattcgtttcgcaagttcactgatgatgggaaatattttgtggcctttagccgaaaccatcaagatttgattgtataccgtccaatctggttgacatattcatgcaatgaagaatgtgatcctcatgagcttccgccaaaggcaaagaagtttgacagcttctttaagcagctttattcaattcctcttgcatctggcaatgagtatatttgcaaggactttttcctgtacatggaatgccatcgatttggtttatttgcaacatctactgcacaaagtaacgaatcaactgccactgagggtgcaatacatggggtgccattaattgagaaaataactttccatcttgtgaggctagaagatggtgtgatacttgatgaaaaggctttctgcaatgattttatcaatctggcacatagtattggtgcttacatgtatgaggaccttctttgtattgtttctttgcgataccaaacaatacatatcctacagatacgagattcaggcaaccttgttgaggtacgcagcattggtgcattctgccgggaagatgatgagctatttcttcactcacatgttcagactggttatgcgggttcctttcttcctggcataaagcaacggttgttgtcgtatattttttgcaagacgtggaatgaggttccagatcagactttgagggtccaacatctaaagaagttctattttcacttccaagattatgttgatcttatcatatggaaggtacagtttttggatcgccatcacctatttgtcaagttcggtagtgtggatggaggggtttctcggagtactgaccaaaacctagctttctttgccgtgtacaacatggagacaacggatatcgtttcacttcatcagaattcttcggaggagctctatgccttgtttgaacaattttatgaccattttcatgcaaacccacaagcttcatcacatggaaaatttatctcctctcattccaatgatattcatgctctggatcaacttcgggttataaaaaataaagcaagtagctcctcacagctgatttcagcaattgatcggcatcgacattgcacagagcatccaataaaatttatatcagtgaggcaaaatgttgtcaaatttaagatcaagccaggttcagattctggtgcttctgacagcagaataaaaagaatctcgtctttcttgtttcacccatttttcccgcttgcactttcgattcagcagacttatatgcagccaactgttctcaacatccatttcaggagatagaaaagtaggggataagatccattgtctggcggtgagaatggctagtttgatttctcttccaaaacaaagtacaaaatgcaaatgggctcaatattcatctattgatgtggcttcatgggctcatcagtcatcattgcggcttcacagtgttgatctatgctttcatatgcctagctcggagtgtcagatgtgcttgttattggatttgaggcataaggacacgtatattggatggcatggagttggtatattggatgcttcatgcttgaggcgagggtgatctaagctgcgaatttgttttcgaggatatataggaaatatagcattacaaatagttttgagttgtcatattatgatgaagtaactactatttactgaaactgttatgcaaagataataattatttttctgtgttcaatatattacaaaaaacttcataatctacaacctttgtttgtctaaac

SEQ ID NO: 66240 - DNA, 2087 bp, Zea Mays
cgcccagagcttctgttcgatgccccctccttcaccacccgcctcgcaagtgcgcacgtgcgatgctggcgccgcgcagtcgcccacgcgcgggacggtgagtgagatggcgcgatacttccgcagcagcaacctcgcctctagggtcttcgagcgtcagctcatctccccgcgccctggcgctaccgttaacactattagacagttctatgaaaatttggtcccaagctatactatatatgacatagattgcccagattattcgtttcgcaagttcactgatgatgggaaatattttgtggcctttagccgaaaccatcaagatttgattgtataccgtccaatctggttgacatattcatgcaatgaagaatgtgatcctcatgagcttccgccaaaggcaaagaagtttgacagcttctttaagcagctttattcaattcctcttgcatctggcaatgagtatatttgcaaggactttttcctgtacatggaatgccatcgatttggtttatttgcaacatctactgcacaaagtaacgaatcaactgccactgagggtgcaatacatggggtgccattaattgagaaaataactttccatcttgtgaggctagaagatggtgtgatacttgatgaaaaggctttctgcaatgattttatcaatctggcacatagtattggtgcttacatgtatgaggaccttctttgtattgtttctttgcgataccaaacaatacatatcctacagatacgagattcaggcaaccttgttgaggtacgcagcattggtgcattctgccgggaagatgatgagctatttcttcactcacatgttcagactggttatgcgggttcctttcttcctggcataaagcaacggttgttgtcgtatattttttgcaagacgtggaatgaggttccagatcagactttgagggtccaacatctaaagaagttctattttcacttccaagattatgttgatcttatcatatggaaggtacagtttttggatcgccatcacctatttgtcaagttcggtagtgtggatggaggggtttctcggagtactgaccaaaacctagctttctttgccgtgtacaacatggagacaacggatatcgtttcacttcatcagaattcttcggaggagctctatgccttgtttgaacaattttatgaccattttcatgcaaacccacaagcttcatcacatggaaaatttatctcctctcattccaatgatattcatgctctggatcaacttcgggttataaaaaataaagcaagtagctcctcacagtttgtgaaaaagatgatgacgtcattaccttacacttgccaatcacagagtccatcaccgtactttgacctgtccctttttagctgatttcagcaattgatcggcatcgacattgcacagagcatccaataaaatttatatcagtgaggcaaaatgttgtcaaatttaagatcaagccaggttcagattctggtgcttctgacagcagaataaaaagaatctcgtctttcttgtttcacccatttttcccgcttgcactttcgattcagcagacttatatgcagccaactgttctcaacatccatttcaggagatagaaaagtaggggataagatccattgtctggcggtgagaatggctagtttgatttctcttccaaaacaaagtacaaaatgcaaatgggctcaatattcatctattgatgtggcttcatgggctcatcagtcatcattgcggcttcacagtgttgatctatgctttcatatgcctagctcggagtgtcagatgtgcttgttattggatttgaggcataaggacacgtatattggatggcatggagttggtatattggatgcttcatgcttgaggcgagggtgatctaagctgcgaatttgttttcgaggatatataggaaatatagcattacaaatagttttgagttgtcatattatgatgaagtaactactatttactgaaactgttatgcaaagataataattatttttctgtgttcaatatattacaaaaaacttcataatctacaacctttgtttgtctaaac

SEQ ID NO: 66241 - DNA, 1784 bp, Zea Mays
cgcccagagcttctgttcgatgccccctccttcaccacccgcctcgcaagtgcgcacgtgcgatgctggcgccgcgcagtcgcccacgcgcgggacggtgagtgagatggcgcgatacttccgcagcagcaacctcgcctctagggtcttcgagcgtcagctcatctccccgcgccctggcgctaccgttaacactattagacagttctatgaaaatttggtcccaagctatactatatatgacatagattgcccagattattcgtttcgcaagttcactgatgatgggaaatattttgtggcctttagccgaaaccatcaagatttgattgtataccgtccaatctggttgacatattcatgcaatgaagaatgtgatcctcatgagcttccgccaaaggcaaagaagtttgacagcttctttaagcagctttattcaattcctcttgcatctggcaatgagtatatttgcaaggactttttcctgtacatggaatgccatcgatttggtttatttgcaacatctactgcacaaagtaacgaatcaactgccactgagggtgcaatacatggggtgccattaattgagaaaataactttccatcttgtgaggctagaagatggtgtgatacttgatgaaaaggctttctgcaatgattttatcaatctggcacatagtattggtgcttacatgtatgaggaccttctttgtattgtttctttgcgataccaaacaatacatatcctacagatacgagattcaggcaaccttgttgaggtacgcagcattggtgcattctgccgggaagatgatgagctatttcttcactcacatgttcagactggttatgcgggttcctttcttcctggcataaagcaacggttgttgtcgtatattttttgcaagacgtggaatgaggttccagatcagactttgagggtccaacatctaaagaagttctattttcacttccaagattatgttgatcttatcatatggaagtttgtgaaaaagatgatgacgtcattaccttacacttgccaatcacagagtccatcaccgtactttgacctgtccctttttagctgatttcagcaattgatcggcatcgacattgcacagagcatccaataaaatttatatcagtgaggcaaaatgttgtcaaatttaagatcaagccaggttcagattctggtgcttctgacagcagaataaaaagaatctcgtctttcttgtttcacccatttttcccgcttgcactttcgattcagcagacttatatgcagccaactgttctcaacatccatttcaggagatagaaaagtaggggataagatccattgtctggcggtgagaatggctagtttgatttctcttccaaaacaaagtacaaaatgcaaatgggctcaatattcatctattgatgtggcttcatgggctcatcagtcatcattgcggcttcacagtgttgatctatgctttcatatgcctagctcggagtgtcagatgtgcttgttattggatttgaggcataaggacacgtatattggatggcatggagttggtatattggatgcttcatgcttgaggcgagggtgatctaagctgcgaatttgttttcgaggatatataggaaatatagcattacaaatagttttgagttgtcatattatgatgaagtaactactatttactgaaactgttatgcaaagataataattatttttctgtgttcaatatattacaaaaaacttcataatctacaacctttgtttgtctaaac

SEQ ID NO: 66242 - DNA, 2180 bp, Zea Mays
cgcccagagcttctgttcgatgccccctccttcaccacccgcctcgcaagtgcgcacgtgcgatgctggcgccgcgcagtcgcccacgcgcgggacggtgagtgagatggcgcgatacttccgcagcagcaacctcgcctctagggtcttcgagcgtcagctcatctccccgcgccctggcgctaccgttaacactattagacagttctatgaaaatttggtcccaagctatactatatatgacatagattgcccagattattcgtttcgcaagttcactgatgatgggaaatattttgtggcctttagccgaaaccatcaagatttgattgtataccgtccaatctggttgacatattcatgcaatgaagaatgtgatcctcatgagcttccgccaaaggcaaagaagtttgacagcttctttaagcagctttattcaattcctcttgcatctggcaatgagtatatttgcaaggactttttcctgtacatggaatgccatcgatttggtttatttgcaacatctactgcacaaagtaacgaatcaactgccactgagggtgcaatacatggggtgccattaattgagaaaataactttccatcttgtgaggctagaagatggtgtgatacttgatgaaaaggctttctgcaatgattttatcaatctggcacatagtattggtgcttacatgtatgaggaccttctttgtattgtttctttgcgataccaaacaatacatatcctacagatacgagattcaggcaaccttgttgaggtacgcagcattggtgcattctgccgggaagatgatgagctatttcttcactcacatgttcagactggttatgcgggttcctttcttcctggcataaagcaacggttgttgtcgtatattttttgcaagacgtggaatgagagggtccaacatctaaagaagttctattttcacttccaagattatgttgatcttatcatatggaaggtacagtttttggatcgccatcacctatttgtcaagttcggtagtgtggatggaggggtttctcggagtactgaccaaaacctagctttctttgccgtgtacaacatggagacaacggatatcgtttcacttcatcagaattcttcggaggagctctatgccttgtttgaacaattttatgaccattttcatgcaaacccacaagcttcatcacatggaaaatttatctcctctcattccaatgatattcatgctctggatcaacttcgggttataaaaaataaagcaagtagctcctcacagtttgtgaaaaagatgatgacgtcattaccttacacttgccaatcacagagtccatcaccgtactttgacctgtccctttttagctgatttcagcaattgatcggcatcgacattgcacagagcatccaataaaatttatatcagtgaggcaaaatgttgtcaaatttaagatcaagccaggttcagattctggtgcttctgacagcagaataaaaagaatctcgtctttcttgtttcacccatttttcccgcttgcactttcgattcagcagacttatatgcagccaactgttctcaacatccatttcaggagatagaaaaggtataacggttgccctaggtgtatctatgtcattagtgaacttgcagcattgctcgcggcaaaattttggccatatgtactctctagtagataagctgacagatgttacagtaggggataagatccattgtctggcggtgagaatggctagtttgatttctcttccaaaacaaagtacaaaatgcaaatgggctcaatattcatctattgatgtggcttcatgggctcatcagtcatcattgcggcttcacagtgttgatctatgctttcatatgcctagctcggagtgtcagatgtgcttgttattggatttgaggcataaggacacgtatattggatggcatggagttggtatattggatgcttcatgcttgaggcgagggtgatctaagctgcgaatttgttttcgaggatatataggaaatatagcattacaaatagttttgagttgtcatattatgatgaagtaactactatttactgaaactgttatgcaaagataataattatttttctgtgttcaatatattacaaaaaacttcataatctacaacctttgtttgtctaaac

SEQ ID NO: 66243 - DNA, 2193 bp, Zea Mays
cgcccagagcttctgttcgatgccccctccttcaccacccgcctcgcaagtgcgcacgtgcgatgctggcgccgcgcagtcgcccacgcgcgggacggtgagtgagatggcgcgatacttccgcagcagcaacctcgcctctagggtcttcgagcgtcagctcatctccccgcgccctggcgctaccgttaacactattagacagttctatgaaaatttggtcccaagctatactatatatgacatagattgcccagattattcgtttcgcaagttcactgatgatgggaaatattttgtggcctttagccgaaaccatcaagatttgattgtataccgtccaatctggttgacatattcatgcaatgaagaatgtgatcctcatgagcttccgccaaaggcaaagaagtttgacagcttctttaagcagctttattcaattcctcttgcatctggcaatgagtatatttgcaaggactttttcctgtacatggaatgccatcgatttggtttatttgcaacatctactgcacaaagtaacgaatcaactgccactgagggtgcaatacatggggtgccattaattgagaaaataactttccatcttgtgaggctagaagatggtgtgatacttgatgaaaaggctttctgcaatgattttatcaatctggcacatagtattggtgcttacatgtatgaggaccttctttgtattgtttctttgcgataccaaacaatacatatcctacagatacgagattcaggcaaccttgttgaggtacgcagcattggtgcattctgccgggaagatgatgagctatttcttcactcacatgttcagactggttatgcgggttcctttcttcctggcataaagcaacggttgttgtcgtatattttttgcaagacgtggaatgagagggtccaacatctaaagaagttctattttcacttccaagattatgttgatcttatcatatggaaggtacagtttttggatcgccatcacctatttgtcaagttcggtagtgtggatggaggggtttctcggagtactgaccaaaacctagctttctttgccgtgtacaacatggagacaacggatatcgtttcacttcatcagaattcttcggaggagctctatgccttgtttgaacaattttatgaccattttcatgcaaacccacaagcttcatcacatggaaaatttatctcctctcattccaatgatattcatgctctggatcaacttcgggttataaaaaataaagcaagtagctcctcacagtttgtgaaaaagatgatgacgtcattaccttacacttgccaatcacagagtccatcaccgtactttgacctgtccctttttaggtatgatgagaagctgatttcagcaattgatcggcatcgacattgcacagagcatccaataaaatttatatcagtgaggcaaaatgttgtcaaatttaagatcaagccaggttcagattctggtgcttctgacagcagaataaaaagaatctcgtctttcttgtttcacccatttttcccgcttgcactttcgattcagcagacttatatgcagccaactgttctcaacatccatttcaggagatagaaaaggtataacggttgccctaggtgtatctatgtcattagtgaacttgcagcattgctcgcggcaaaattttggccatatgtactctctagtagataagctgacagatgttacagtaggggataagatccattgtctggcggtgagaatggctagtttgatttctcttccaaaacaaagtacaaaatgcaaatgggctcaatattcatctattgatgtggcttcatgggctcatcagtcatcattgcggcttcacagtgttgatctatgctttcatatgcctagctcggagtgtcagatgtgcttgttattggatttgaggcataaggacacgtatattggatggcatggagttggtatattggatgcttcatgcttgaggcgagggtgatctaagctgcgaatttgttttcgaggatatataggaaatatagcattacaaatagttttgagttgtcatattatgatgaagtaactactatttactgaaactgttatgcaaagataataattatttttctgtgttcaatatattacaaaaaacttcataatctacaacctttgtttgtctaaac

SEQ ID NO: 66244 - DNA, 1684 bp, Zea Mays
cgcccagagcttctgttcgatgccccctccttcaccacccgcctcgcaagtgcgcacgtgcgatgctggcgccgcgcagtcgcccacgcgcgggacggtgagtgagatggcgcgatacttccgcagcagcaacctcgcctctagggtcttcgagcgtcagctcatctccccgcgccctggcgctaccgttaacactattagacagttctatgaaaatttggtcccaagctatactatatatgacatagattgcccagattattcgtttcgcaagttcactgatgatgggaaatattttgtggcctttagccgaaaccatcaagatttgattgtataccgtccaatctggttgacatattcatgcaatgaagaatgtgatcctcatgagcttccgccaaaggcaaagaagtttgacagcttctttaagcagctttattcaattcctcttgcatctggcaatgagtatatttgcaaggactttttcctgtacatggaatgccatcgatttggtttatttgcaacatctactgcacaaagtaacgaatcaactgccactgagggtgcaatacatggggtgccattaattgagaaaataactttccatcttgtgaggctagaagatggtgtgatacttgatgaaaaggctttctgcaatgattttatcaatctggcacatagtattggtgcttacatgtatgaggaccttctttgtattgtttctttgcgataccaaacaatacatatcctacagatacgagattcaggcaaccttgttgaggtacgcagcattggtgcattctgccgggaagatgatgagctatttcttcactcacatgttcagactggttatgcgggttcctttcttcctggcataaagcaacggttgttgtcgtatattttttgcaagacgtggaatgaggttccagatcagactttgagggtccaacatctaaagaagttctattttcacttccaagattatgttgatcttatcatatggaaggtacagtttttggatcgccatcacctatttgtcaagttcggtagtgtggatggaggggtttctcggagtactgaccaaaacctagctttctttgccgtgtacaacatggagacaacggatatcgtttcacttcatcagaattcttcggaggagctctatgccttgtttgaacaattttatgaccattttcatgcaaacccacaagcttcatcacatggaaaatttatctcctctcattccaatgatattcatgctctggatcaacttcgggttataaaaaataaagcaagtagctcctcacagtttgtgaaaaagatgatgacgtcattaccttacacttgccaatcacagagtccatcaccgtactttgacctgtccctttttaggtatgatgagaagctgatttcagcaattgatcggcatcgacattgcacagagcatccaataaaatttatatcagtgaggcaaaatgttgtcaaatttaagatcaagccaggttcagattctggtgcttctgacagcagaataaaaagaatctcgtctttcttgtttcacccatttttcccgcttgcactttcgattcagcagacttatatgcagccaactgttctcaacatccatttcaggagatagaaaagatggttatttggttcgaaacgtttagggcaagtataataagag

SEQ ID NO: 66245 - DNA, 1678 bp, Zea Mays
cgcccagagcttctgttcgatgccccctccttcaccacccgcctcgcaagtgcgcacgtgcgatgctggcgccgcgcagtcgcccacgcgcgggacggtgagtgagatggcgcgatacttccgcagcagcaacctcgcctctagggtcttcgagcgtcagctcatctccccgcgccctggcgctaccgttaacactattagacagttctatgaaaatttggtcccaagctatactatatatgacatagattgcccagattattcgtttcgcaagttcactgatgatgggaaatattttgtggcctttagccgaaaccatcaagatttgattgtataccgtccaatctggttgacatattcatgcaatgaagaatgtgatcctcatgagcttccgccaaaggcaaagaagtttgacagcttctttaagcagctttattcaattcctcttgcatctggcaatgagtatatttgcaaggactttttcctgtacatggaatgccatcgatttggtttatttgcaacatctactgcacaaagtaacgaatcaactgccactgagggtgcaatacatggggtgccattaattgagaaaataactttccatcttgtgaggctagaagatggtgtgatacttgatgaaaaggctttctgcaatgattttatcaatctggcacatagtattggtgcttacatgtatgaggaccttctttgtattgtttctttgcgataccaaacaatacatatcctacagatacgagattcaggcaaccttgttgaggtacgcagcattggtgcattctgccgggaagatgatgagctatttcttcactcacatgttcagactggttatgcgggttcctttcttcctggcataaagcaacggttgttgtcgtatattttttgcaagacgtggaatgaggttccagatcagactttgagggtccaacatctaaagaagttctattttcacttccaagattatgttgatcttatcatatggaaggtacagtttttggatcgccatcacctatttgtcaagttcggtagtgtggatggaggggtttctcggagtactgaccaaaacctagctttctttgccgtgtacaacatggagacaacggatatcgtttcacttcatcagaattcttcggaggagctctatgccttgtttgaacaattttatgaccattttcatgcaaacccacaagcttcatcacatggaaaatttatctcctctcattccaatgatattcatgctctggatcaacttcgggttataaaaaataaagcaagtagctcctcacagtttgtgaaaaagatgatgacgtcattaccttacacttgccaatcacagagtccatcaccgtactttgacctgtccctttttaggtatgatgagaagctgatttcagcaattgatcggcatcgacattgcacagagcatccaataaaatttatatcagtgaggcaaaatgttgtcaaatttaagatcaagccagattctggtgcttctgacagcagaataaaaagaatctcgtctttcttgtttcacccatttttcccgcttgcactttcgattcagcagacttatatgcagccaactgttctcaacatccatttcaggagatagaaaagatggttatttggttcgaaacgtttagggcaagtataataagag

SEQ ID NO: 66246 - DNA, 2699 bp, Zea Mays
cgcccagagcttctgttcgatgccccctccttcaccacccgcctcgcaagtgcgcacgtgcgatgctggcgccgcgcagtcgcccacgcgcgggacggtgagtgagatggcgcgatacttccgcagcagcaacctcgcctctagggtcttcgagcgtcagctcatctccccgcgccctggcgctaccgttaacactattagacagttctatgaaaatttggtcccaagctatactatatatgacatagattgcccagattattcgtttcgcaagttcactgatgatgggaaatattttgtggcctttagccgaaaccatcaagatttgattgtataccgtccaatctggttgacatattcatgcaatgaagaatgtgatcctcatgagcttccgccaaaggcaaagaagtttgacagcttctttaagcagctttattcaattcctcttgcatctggcaatgagtatatttgcaaggactttttcctgtacatggaatgccatcgatttggtttatttgcaacatctactgcacaaagtaacgaatcaactgccactgagggtgcaatacatggggtgccattaattgagaaaataactttccatcttgtgaggctagaagatggtgtgatacttgatgaaaaggctttctgcaatgattttatcaatctggcacatagtattggtgcttacatgtatgaggaccttctttgtattgtttctttgcgataccaaacaatacatatcctacagatacgagattcaggcaaccttgttgaggtacgcagcattggtgcattctgccgggaagatgatgagctatttcttcactcacatgttcagactggttatgcgggttcctttcttcctggcataaagcaacggttgttgtcgtatattttttgcaagacgtggaatgaggttccagatcagactttgagggtccaacatctaaagaagttctattttcacttccaagattatgttgatcttatcatatggaaggtacagtttttggatcgccatcacctatttgtcaagttcggtagtgtggatggaggggtttctcggagtactgaccaaaacctagctttctttgccgtgtacaacatggagacaacggatatcgtttcacttcatcagaattcttcggaggagctctatgccttgtttgaacaattttatgaccattttcatgcaaacccacaagcttcatcacatggaaaatttatctcctctcattccaatgatattcatgctctggatcaacttcgggttataaaaaataaagcaagtagctcctcacagtttgtgaaaaagatgatgacgtcattaccttacacttgccaatcacagagtccatcaccgtactttgacctgtccctttttagctgatttcagcaattgatcggcatcgacattgcacagagcatccaataaaatttatatcagtgaggcaaaatgttgtcaaatttaagatcaagccaggttcagattctggtgcttctgacagcagaataaaaagaatctcgtctttcttgtttcacccatttttcccgcttgcactttcgattcagcagacttatatgcagccaactgttctcaacatccatttcaggagatagaaaagaaatcagtcctactgactatgagaaacagagggcagagaatgtgatgaggaataatcagatgttccaacgacttgggattaatcagttacccacaatgatgactgccacaagagcaaggagcaaatatgatggtcctcaagaatcagggtctttgtttgacggcgaggacagtgaaggctctgagcaagaggaagattcccatgttgcaaaaggtgtacatggccacaaccccactcatgttgctgacaaaactacacaaggaacacgaggatctaagagggttgtggcccctgatgttcctggacaagaaattagattcactaggcaaaggagtgctgccataaaccaacaatcctccttaagcctaactactactacacatgctagttcacgaaccaccacaaaccaagcatccacagagaacttgactaccgcaacacatttcacttcaagtgttgccactgagcaagattacaccgaaggcctgaatactgctacacaacctacttctcccatataagctaaggtcaatgaccacaatacagatgaagaattggtaccaaggcaacgaagtaggggcaaacaacttgaatccttgagcagagggttaggcactaagattccaatccaaatctctgatggaaagcgaaggccagaaccacctattcaggctgcaaagtttgcatcggagggtgggatcatactgagcaacacattccaatatttttgcactggaaggagtacaagaagcaagagaacgagggtaaaattacagagtacattgggaagcttgttgtaagtcattttccctcacttgtttagttacagttcattgtccttttcaattgagtatcatagagtcaccacttctttgctagggtcaattcatcatggatgttgacagtaattcagtaaaagatgcatgtgttgatatgctaaagggtggacaacgccaaatgaggtataggctgaaaaaagtacttcactggagttcctgcaaatcaagtgaggactacatcacctgtttcatgtatgactaatgatcaatggagagagttggtacaaatgtg

SEQ ID NO: 66247 - DNA, 1955 bp, Zea Mays
gtcacgtgcggcggatgcgtcgaggagacaggggcggccgaagtatggctggcttcctctcttggagcggggcaacagcggttcagcccctggagaagggttaacactattagacagttctatgaaaatttggtcccaagctatactatatatgacatagattgcccagattattcgtttcgcaagttcactgatgatgggaaatattttgtggcctttagccgaaaccatcaagatttgattgtataccgtccaatctggttgacatattcatgcaatgaagaatgtgatcctcatgagcttccgccaaaggcaaagaagtttgacagcttctttaagcagctttattcaattcctcttgcatctggcaatgagtatatttgcaaggactttttcctgtacatggaatgccatcgatttggtttatttgcaacatctactgcacaaagtaacgaatcaactgccactgagggtgcaatacatggggtgccattaattgagaaaataactttccatcttgtgaggctagaagatggtgtgatacttgatgaaaaggctttctgcaatgattttatcaatctggcacatagtattggtgcttacatgtatgaggaccttctttgtattgtttctttgcgataccaaacaatacatatcctacagatacgagattcaggcaaccttgttgaggtacgcagcattggtgcattctgccgggaagatgatgagctatttcttcactcacatgttcagactggttatgcgggttcctttcttcctggcataaagcaacggttgttgtcgtatattttttgcaagacgtggaatgaggttccagatcagactttgagggtccaacatctaaagaagttctattttcacttccaagattatgttgatcttatcatatggaaggtttctcggagtactgaccaaaacctagctttctttgccgtgtacaacatggagacaacggatatcgtttcacttcatcagaattcttcggaggagctctatgccttgtttgaacaattttatgaccattttcatgcaaacccacaagcttcatcacatggaaaatttatctcctctcattccaatgatattcatgctctggatcaacttcgggttataaaaaataaagcaagtagctcctcacagtttgtgaaaaagatgatgacgtcattaccttacacttgccaatcacagagtccatcaccgtactttgacctgtccctttttaggtatgatgagaagctgatttcagcaattgatcggcatcgacattgcacagagcatccaataaaatttatatcagtgaggcaaaatgttgtcaaatttaagatcaagccaggttcagattctggtgcttctgacagcagaataaaaagaatctcgtctttcttgtttcacccatttttcccgcttgcactttcgattcagcagacttatatgcagccaactgttctcaacatccatttcaggagatagaaaagtaggggataagatccattgtctggcggtgagaatggctagtttgatttctcttccaaaacaaagtacaaaatgcaaatgggctcaatattcatctattgatgtggcttcatgggctcatcagtcatcattgcggcttcacagtgttgatctatgctttcatatgcctagctcggagtgtcagatgtgcttgttattggatttgaggcataaggacacgtatattggatggcatggagttggtatattggatgcttcatgcttgaggcgagggtgatctaagctgcgaatttgttttcgaggatatataggaaatatagcattacaaatagttttgagttgtcatattatgatgaagtaactactatttactgaaactgttatgcaaagataataattatttttctgtgttcaatatattacaaaaaacttcataatctacaacctttgtttgtctaaac

SEQ ID NO: 66248 - DNA, 1954 bp, Zea Mays
ctcttggagcggggcaacagcggttcagcccctggagaagggttaacactattagacagttctatgaaaatttggtcccaagctatactatatatgacatagattgcccagattattcgtttcgcaagttcactgatgatgggaaatattttgtggcctttagccgaaaccatcaagatttgattgtataccgtccaatctggttgacatattcatgcaatgaagaatgtgatcctcatgagcttccgccaaaggcaaagaagtttgacagcttctttaagcagctttattcaattcctcttgcatctggcaatgagtatatttgcaaggactttttcctgtacatggaatgccatcgatttggtttatttgcaacatctactgcacaaagtaacgaatcaactgccactgagggtgcaatacatggggtgccattaattgagaaaataactttccatcttgtgaggctagaagatggtgtgatacttgatgaaaaggctttctgcaatgattttatcaatctggcacatagtattggtgcttacatgtatgaggaccttctttgtattgtttctttgcgataccaaacaatacatatcctacagatacgagattcaggcaaccttgttgaggtacgcagcattggtgcattctgccgggaagatgatgagctatttcttcactcacatgttcagactggttatgcgggttcctttcttcctggcataaagcaacggttgttgtcgtatattttttgcaagacgtggaatgaggttccagatcagactttgagggtccaacatctaaagaagttctattttcacttccaagattatgttgatcttatcatatggaaggtacagtttttggatcgccatcacctatttgtcaagttcggtagtgtggatggaggggtttctcggagtactgaccaaaacctagctttctttgccgtgtacaacatggagacaacggatatcgtttcacttcatcagaattcttcggaggagctctatgccttgtttgaacaattttatgaccattttcatgcaaacccacaagcttcatcacatggaaaatttatctcctctcattccaatgatattcatgctctggatcaacttcgggttataaaaaataaagcaagtagctcctcacagtttgtgaaaaagatgatgacgtcattaccttacacttgccaatcacagagtccatcaccgtactttgacctgtccctttttaggtatgatgagaagctgatttcagcaattgatcggcatcgacattgcacagagcatccaataaaatttatatcagtgaggcaaaatgttgtcaaatttaagatcaagccaggttcagattctggtgcttctgacagcagaataaaaagaatctcgtctttcttgtttcacccatttttcccgcttgcactttcgattcagcagacttatatgcagccaactgttctcaacatccatttcaggagatagaaaagtaggggataagatccattgtctggcggtgagaatggctagtttgatttctcttccaaaacaaagtacaaaatgcaaatgggctcaatattcatctattgatgtggcttcatgggctcatcagtcatcattgcggcttcacagtgttgatctatgctttcatatgcctagctcggagtgtcagatgtgcttgttattggatttgaggcataaggacacgtatattggatggcatggagttggtatattggatgcttcatgcttgaggcgagggtgatctaagctgcgaatttgttttcgaggatatataggaaatatagcattacaaatagttttgagttgtcatattatgatgaagtaactactatttactgaaactgttatgcaaagataataattatttttctgtgttcaatatattacaaaaaacttcataatctacaacctttgtttgtctaaac

SEQ ID NO: 66249 - DNA, 1521 bp, Zea Mays
tgagcatattgtagtgtcaagtaatggtttttatgatttttttatttgtttcacctgtagtgttttattatttcaatatctgacagatggacagatcttggatcaattctaggcttttcagcaacaactatctagccggggtggatgagttcatgaagtttgttgaagagcggtttcctgatgtcacagagatcttatgtccatgtcgacagtgcttgaatcaaatttctaaacataaatcacaagtagaggatgacttatatattaatgggatggcgagcacatacacaacatggatacatcatggagagctactattgacaggtagattacatgaaaatgttgtccatctgaatgaaccacctaatttgaatgaggatgctagtatgaatgagtatgaacaagataaccctgatgatagattaccagaaatggtgcatgagttattcacatctgaagaaggtatagggaagtccatgttgaaaaggatgttttcctcaaaaaaaatatctgaggaggcacaatggcataagttgaagaggaaagttatggaaaatgagctcaaccatcccgcggatggtaaggcatggaaggactttgataagcaacatggttggtttgcagaagatcctaggaatatcaggcttgggcttgcaacagatggtttcaatccatttgggaaaatgagctcctcttatagtatgtggcctatttttgttatcccatacaactttcctccaagggtatgtgtcgagcaatcaaacttcatgatgtgtctacttatccctgacaaagaatgcccaagaaaggattttgatgtatttttagatccactaattgacgagttgcaagatctttggttgggtgtcaatactattgatgcaagagctagaaaagagtttattctacatgctgcggtgctatggtgcatacatgattatctagcgctaagcacattgtctggtagagtcaccagagggtattatgcttgtttgcattgtgacaaaaatccatgctctaggagaatacggaataagatttgctatattgggcatcgacgattccttgaaaaggatcatcccatggagaaaaaagaaagactttgatgggaaagttgaaaactgtgacaagccagaagcatttagtgaggttgaattgaagcaacagttggacaatgtcaaggatgttagaccaggaaaacatactcaaaacaagaagagaaagcaggatgcaaatgatggccaatgttggaagaaaaggtcgtgtttgtgggatttgccttactggacagggttgaagctgcgacataaccttgatgtgatgcacatcgaaaaaaaatatatgtgagtcaattcttggtacattactaggtatacccgggaagtcaaaggatagtaccaatgctaggcttgatatggaagacatgggcatacaaaaatctttgcacttgaagcgtgatggagattcatatagcgctccacctgctccatacacaatggataaaaagcaaaagcttgattt

SEQ ID NO: 66250 - DNA, 851 bp, Zea Mays
gtctaccttacaattgtattttacatacagaataattgtgtgaagaacaaacttaatcgtgagaaggtgaaatttccacagtgcacaggatctcaatcatacgttgcaaaagcttatgtagtgatcaaatttatttgactacatttcagagacaagaaaaatataaagatgtcaaacctagtgcaattgatcttttcaaggagatgcattgtagcaagaaaaaaggatttagtgaagttgttcagaaagctataggtgatatggaagcaatggtggcaacaccagtagaagatggacagcttgcaaagtctgcaagagaagttgtttccaatgttctgcctggttcaagtaaatttcttcacaatgctggccttttgccctcctccaagagaagcaacacagggactgtttcagcaagaatgcaagaactttagtctcaattggacaatgagaggcgagaaaaagatggacttcgagaagatatggataccttaaaggccaagtcagaatcatctgaggcaaccattgctaatcaatcaactgagattgcagatttaaagaagtccttagcagaaaataacatcctacttcgacagatattaagtattagtcgtgatcaggtcaatccttaagcatgcttgctaagatgctagtgtcaaccatcctgaagacacatctcacaaaattgtggacctccttttatccttatgtttgctatatggaactgcaacttacaatctattatatgtgttctcttactatagagttttagtacatgtctggttaaagaattatgaacaatgttcttttgtgtgtttttgcttgaaatatatggatgttgcaaaaagttg

SEQ ID NO: 66251 - DNA, 429 bp, Zea Mays
tgtagcggcttcgggagctgctgccgctgctgtgccggtcccaggtcacgcgcggacccacgtgcagcggcttcgggagaggatttgggccgtcgcgcggcggcttccgatgcgtctcctcgctgagcccgccgaagcagtgctccacagtgagggcacgtcgcagcagtgccgcggcatgggcatcctcacagtcctcctccggacggccataagtgatttgggtgcttgcgtgcttgctgcttgggggaattttatcacaacttggagaagacccctcgccattttgcatttccaatcgtcggttagtttgtgtgcctaagcgcctgccctgttttttatgtgttgtttgttacaaaccaatttttcaccaatgttacgtgatgttcttccatgctatgcgatatatagtgctatgcctgattctcg

SEQ ID NO: 66252 - DNA, 691 bp, Zea Mays
cgggagaggatttgggccgtcgcgcggcggcttccgatgcgtctcctcgctgagcccgccgaagcagtgctccacagtgagggcacgtcgcagcagtgccgcggcatgggcatcctcacagtcctcctccggacggccataagatctgatttcttgccgacgccgctgggattgcctgttgcactgatgccgttcgtgacctagctcgggtggaggcggtcgtggtcgtaggtttgtttggctaactacgcttgcttccgcatcttagtcctctgcttagtgtgcgttcttctttgcttcctggaacacacgtggtttggtttatctctggtgtactgcagaggttagattagtggcgcacttagcagtttagtggtactttggactttggtgagattagatagttgtactttgcagtataatttgtaatccaactaagatatttctgaatacccaaaagttaatactgatctctgcaattaaagagaagaaccgaaacgaaatttattatgctatacaggaatgaaatagaaacatatctaaaatgtgctacaatccattaatttaacagaacatacacggctgcactgtttaccacgagataagtgcaataatcaacaaccctgataagatagcgattgtcaatgatacacaaggctattctgatagcattataccttgcataaaaatc

SEQ ID NO: 66253 - DNA, 440 bp, Zea Mays
agaggatttgggccgtcgcgcggcggcttccgatgcgtctcctcgctgagcccgccgaagcagtgctccacagtgagggcacgtcgcagcagtgccgcggcatgggcatcctcacagtcctcctccggacggccataagatctgatttcttgccgacgccgctgggattgcctgttgcactgatgccgttcgtgacctagctcgggtggaggcggtcgtggtcgtagtgatttgggtgcttgcgtgcttgctgcttgggggaattttatcacaacttggagaagacccctcgccattttgcatttccaatcgtcggttagtttgtgtgcctaagcgcctgccctgttttttatgtgttgtttgttacaaaccaatttttcaccaatgttacgtgatgttcttccatgctatgcgatatatagtgctatgcctgattctcg

SEQ ID NO: 66254 - DNA, 715 bp, Zea Mays
tctatcattggtcgctactaagcagcggtcgctgcattatcaatgcatatactcatttgtttgcttagttaggtttgttttttgtccataatctgttttctgcacctttaatgcttgtttgtacttcgtgcatatgcaaggtgtgtatcaatgtcgccatcaattttgttgctgctgtttctaaaacaaagcctcatctgtcagattggtactttggatagaggcaaaaatgtggcggaaccgcccgaattattccagcttaagtgcccaagtcgcacccataaggtcagcaacacacttaaacaggaataacccgctagtccctcggatctagtccgataaagccacttaccaggatcgaataccactagctcactcgaaggtgaggcacagagaaatacaataaagcataataccataaattaagaaagtatcattagtgattacattatcggagtttcagaaataataacaataagttttaatgcagcggaattaactaacggagaaaaccgagtaacatggcgaagcctggccacactactcctcctggtcctctcctgcggaagcagtaacccactcgaccgtctatcccggtggcagggatgaaggccaagtcacaccatcaacaaatcaacctaatgagtacctgcaaaaattatgccacaagcaaggctgagtatactaatactcagctagacttacccggtgtgag

SEQ ID NO: 66255 - DNA, 751 bp, Zea Mays
ctcaggtactaggcttaccgatttaccatatttctcggtatgtgtttagtacgttcaaacgcttgacacaggtatccgcacgttaatccttattccaatttcatctcgtagaccacgcgtccccatggacccgtgtccacagacatcaccattctgttatcaaagtggatacaaccaattcctgacctcgcgcgagtgctagaaaaatcactcgacttctaccgagatccctaattattaaagcagctactcgacctagcatactagtattcatctcaataggattcctgagatcatgcaactagggtttaaatcaactcctacacttaagtgcacaatacaagcctacaaacattaagtgtagtaaaatagcatatataaacggttatgcataaaaccggggcttgcctttattttaacacttagatagtgtttgctagggtggcaatcgcttggcgagcatccactggttatgtccatccttcaggtcgtccaccgcggcatcttgtggttggcaccacaccacttgcatgagcgtcatctctcggtcctaaatgagatgcaagatgcatatgtatgaatataatgacagtagcacaaaagtagcacaagatataaaaggacgcagtggcgaactaaacaataaaatggaagacaccataacaatcacatgttcgctttagttatctacacattatcgacgttccacattaacaccattaaatgacggcaaatattttatggatttatg

SEQ ID NO: 66256 - DNA, 2127 bp, Zea Mays
tacacattatcgacgttccacattaacaccattaaatgacggcaaatattttatgtatttatgcaacaccactacgacaccacaagtacgcgcattttatttatttggacacggcttttcattagttctctagtgatcacacaaaaacatcccaaacacaagtttaaccgatgacataggcatcaatgtctatggaaattccatatcacaatcaactaaagaagaaacatataaaacaatacacacatgtcatctctagcttagctatggcaagtctatattacttaagagcaaaccaaacatttttagcgagaagggtgaactaaacaatcaaaagcgcactagcagaatttttggacagcaatacagcagtcacttgtttgagtcataactcacaagatatttaaccaaaaaagtaaactaggactttctagaaagcttgaaaagtgcttcacaactttggtattgtcatcacagcatgattaaacacttagcaaggtcaaaaggtgtcaacacaacagcgctgtccagatttggacagattcagacttatgactttaaaaattcataactgaagattcaggcatccaaacaaggtgatcctagactttctggaaaggtaataaaattgtctacatatcatttataaacatcttaaggtgattcaatatttaactgaggataaaatacactagaaggctttgctgtccagaattggacagattcagtcttcagactgtaaacattcataacttaatcttcagatcaccaaaaatagtgatccaagactttttggaaagcttagaaaaagcactacataacttttataatcactaagaagtgattcaatgtttaactaaatcaaacagcacagttttcgaaatctgttctgacggtggacagaacacagcagccaagttgtaaaattcataactcttaaaccgtcaggcctatagttatgaaattttaacacaagcaagataagaaaagcatctacaactttcttataatgaccatgaacagattgcaacattaaattgaacaaacaatacagtttctgaaatctgtacagaatttggacagattcagttactgaatttgtaaacagcataactcctaaacgatcagacttatgcctgtcaaatttttacaccagcaagacaataaggttatctaccacttttctatagcacatatctacagaaaacaccatttagttcatcaaacatacaacacaactaaaacagtgcgtgcagcccaaaacaggaatcaatacatttcagcttctatacaattgaagaattagtcgtgttctagagacttgaattattctaacacttcaccgttgattagagttaaattagtcaaattaggaccatcaagttgactcataaattttatccaagtcatttcgtgctctagatttaccatactcaattaaccacgcgttctccacgataatcaacatcgaagcgcttttcacccaataatttgcattttaacttagacatcacatgaacactactactttttacccgcgactataaacatacatatttagactacaacaagcaattcactgtgattacgggcttaaccacgtcatctaacaattcgattaactagagcaacgacatcgccgctaaataacatacacgtcaacttgactattattgccgcaatccgagacgcaacatatactacaacatttttataaacacgcagattcacaagtatattcgcacaccgaccaactcatatgaatcgtaaatcacaaatctccaaatcgcagtcaccacgcatttacttcccaaatcatgaacgcatacatgtttatcctacgaaccgggtatttcaataattatcctaaaacaactaactccattacacacttgtatcacaaatctacttgatttacttgaagcgtctactcgaaatcgtgagcacaatcatacactatatgcgaagcataatttaacaaacacataatgcgcatcgactcgactcgacttataaacatagagggagtgatgactacttcagcatgtcaccacctctctatataagccaaaacaatttctagtatcgactaagacttataggtattaagcatgtcattactttcta

SEQ ID NO: 66257 - DNA, 2478 bp, Zea Mays
atgccggccaccaccggcgcgccggtcgctgcgccagctggggctcggcggccgctcctcttcggcgccgcgccgcgtccgcaggcgccgtcgccgccgctgacgacgacgcggtgtcgccgcgccgcgcatggaacgcctccgccgccgagctcgagctcgggcgccgcggcgaggagacgaggggtcaaggagtacgtggaggcggcgcgggagatggcgcggcacaaggacggcggcccgccgcggtggttctcgccgctcgagtgcgggggcggccgcgtccccggcgcgcccacgctgctctacctgcccgagcacagcgcagcactgatgaaaaagataaaagcgacttgctcgtctgcagatcaggccgccgataacgatgttcgatctgtggtgcttgcacataccagtcgaagaccgaacgcccttcgcaggtacgcccttcgcagcacagggctggtcgagtatgtggagagggcagtaaagtcggagagctcaagagcgcctgacagaccaatctaccttgttggagagtcagtaggagcgtgcgtcgctctagccgtggctgcgcgaaacccaggcatagacctggtactgatcctagtaaacccaggaacgtcgttccacaggtcgcagttgcaaactctctcggccttcttggatctggtccctgaacccttccatttgaccactccacagctgctaaattttctgacagggaacttgatgaagatgccagaagcttttgttggacgtggcctctctctacaagaagctggtccgagattatcagagaccacatccagtatgttggattcccttacgattttggttgacgttctgacaaaggagtccatcgtttgcaagctggaaatgttgaaggcgtcgtcatcgtttgtcaactcccgtttacacgcagtcaaagcccagacgttggtactagccagtggaaacgatgagctgctgccaagcacccaagaggccgagagactccgtggcgctctagagaaatgcagaacacgtgttttcagagacaatggccacaagatcttactggaggccggcttcgacctcgccacgaccatcaagggagccgggtactaccgccgcaccaggaggacagacttcgttgcagactacatacctcctaccccagacgagctgcagcaagctatcgaccacgacaggtacgcgtacgcccatgccccatggcaagctaagctagaagcgggtcctaaagcttgtcaccgaccggtgatgctgtcgacgctgggcgacgggagggtagtgaggggcctggcggggctgccgagggaggggcccgccgtgctggtggggtaccacatgctcctggggttggagctggggccgatggtgacgggcatcctgagcggcaccggggtccacgtccggggcctggcgcaccccttcatgttcgacgggggcaccgagcggctcatgcccgactcggcgcacttcgacctgcaccgcgtcatgggggcggtgccggtgacgggcgccaacttctacaggctcctcgcggacaaggagttcgtgctgctgtatccggggggtgcgcgggaagcgcttcacaggaagggagaggagtacaagttgttctggccggagcagcctgagttcgtcaggatggcgtccaggttcggggcgacgatcgtaccattcggagtggtgggagaggatgacatatgccatttgttgttagactacaacgaccttcagaaggttcccttctatggcatgctcgacgaggccttgaaccgcgatgggctgaggctaaggactgattccatgggagaggtaaaagaccaaagaatgcaccccctactgctcgctcccaaggtaccagggcggttttacttcgtctttgggaagcctatcgaaacaagaggcagagagaaagaactacgagacaaggaggcggcgcagcgcctctatttgcaagtcaaatctgaggtggagggctgcatcaactatctcaaggagaagagggaggaggacccctacaggagtatactgcccaggcttctctaccaagcacttcatggtcccaatgcagaaatacccacatttgaaccatgaaatgttcacttcgagaataccaattgtttatattgttcttatttttttttcttgcattgtcaaaaaaaaatcgattgttaccattgtcctcaaaataattatgatggctgattctatcgtgtagcccatttaaagcacatatataaagaggtcaacggaaggtcatcgctcaactgtaaatttgtaagtacagcaacacaagtatttattttggctcatctcattgcaaacaaagcatggattcaagtcgagagaagatatgaagaatgtgttagaaatatgccttagagataatcatagagatgagcatatttttttatctatatatatattgcttaattgaatatccatgtaaggcaccttgtattgatt

SEQ ID NO: 66258 - DNA, 1961 bp, Zea Mays
atgccggccaccaccggcgcgccggtcgctgcgccagctggggctcggcggccgctcctcttcggcgccgcgccgcgtccgcaggcgccgtcgccgccgctgacgacgacgcggtgtcgccgcgccgcgcatggaacgcctccgccgccgagctcgagctcgggcgccgcggcgaggagacgaggggtcaaggagtacgtggaggcggcgcgggagatggcgcggcacaaggacggcggcccgccgcggtggttctcgccgctcgagtgcgggggcggccgcgtccccggcgcgcccacgctgctctacctgcccgagcacagcgcagcactgatgaaaaagataaaagcgacttgctcgtctgcagatcaggccgccgataacgatgttcgatctgtggtgcttgcacataccagtcgaagaccgaacgcccttcgcaggtacgcccttcgcagcacagggctggtcgagtatgtggagagggcagtaaagtcggagagctcaagagcgcctgacagaccaatctaccttgttggagagtcagtaggagcgtgcgtcgctctagccgtggctgcgcgaaacccaggcatagacctggtactgatcctagtaaacccagggaacttgatgaagatgccagaagcttttgttggacgtggcctctctctacaagaagctggtccgagattatcagagaccacatccagtatgttggattcccttacgattttggttgacgttctgacaaaggagtccatcgtttgcaagctggaaatgttgaaggcgtcgtcatcgtttgtcaactcccgtttacacgcagtcaaagcccagacgttggtactagccagtggaaacgatgagctgctgccaagcacccaagaggccgagagactccgtggcgctctagagaaatgcagaacacgtgttttcagagacaatggccacaagatcttactggaggccggcttcgacctcgccacgaccatcaagggagccgggtactaccgccgcaccaggaggacagacttcgttgcagactacatacctcctaccccagacgagctgcagcaagctatcgaccacgacagggagaggagtacaagttgttctggccggagcagcctgagttcgtcaggatggcgtccaggttcggggcgacgatcgtaccattcggagtggtgggagaggatgacatatgccatttgttgttagactacaacgaccttcagaaggttcccttctatggcatgctcgacgaggccttgaaccgcgatgggctgaggctaaggactgattccatgggagaggtaaaagaccaaagaatgcaccccctactgctcgctcccaaggtaccagggcggttttacttcgtctttgggaagcctatcgaaacaagaggcagagagaaagaactacgagacaaggaggcggcgcagcgcctctatttgcaagtcaaatctgaggtggagggctgcatcaactatctcaaggagaagagggaggaggacccctacaggagtatactgcccaggcttctctaccaagcacttcatggtcccaatgcagaaatacccacatttgaaccatgaaatgttcacttcgagaataccaattgtttatattgttcttatttttttttcttgcattgtcaaaaaaaaatcgattgttaccattgtcctcaaaataattatgatggctgattctatcgtgtagcccatttaaagcacatatataaagaggtcaacggaaggtcatcgctcaactgtaaatttgtaagtacagcaacacaagtatttattttggctcatctcattgcaaacaaagcatggattcaagtcgagagaagatatgaagaatgtgttagaaatatgccttagagataatcatagagatgagcatatttttttatctatatatatattgcttaattgaatatccatgtaaggcaccttgtattgatt

SEQ ID NO: 66259 - DNA, 1783 bp, Zea Mays
cctgaacccttccatttgaccactccacagctgctaaattttctgacagggaacttgatgaagatgccagaagcttttgttggacgtggcctctctctacaagaagctggtccgagattatcagagaccacatccaattttggttgacgttctgacaaaggagtccatcgtttgcaagctggaaatgttgaaggcgtcgtcatcgtttgtcaactcccgtttacacgcagtcaaagcccagacgttggtactagccagtggaaacgatgagctgctgccaagcacccaagaggccgagagactccgtggcgctctagagaaatgcagaacacgtgttttcagagacaatggccacaagatcttactggaggccggcttcgacctcgccacgaccatcaagggagccgggtactaccgccgcaccaggaggacagacttcgttgcagactacatacctcctaccccagacgagctgcagcaagctatcgaccacgacaggtacgcgtacgcccatgccccatggcaagctaagctagaagcgggtcctaaagcttgtcaccgaccggtgatgctgtcgacgctgggcgacgggagggtagtgaggggcctggcggggctgccgagggaggggcccgccgtgctggtggggtaccacatgctcctggggttggagctggggccgatggtgacgggcatcctgagcggcaccggggtccacgtccggggcctggcgcaccccttcatgttcgacgggggcaccgagcggctcatgcccgactcggcgcacttcgacctgcaccgcgtcatgggggcggtgccggtgacgggcgccaacttctacaggctcctcgcggacaaggagttcgtgctgctgtatccggggggtgcgcgggaagcgcttcacaggaagggagaggagtacaagttgttctggccggagcagcctgagttcgtcaggatggcgtccaggttcggggcgacgatcgtaccattcggagtggtgggagaggatgacatatgccatttgttgttagactacaacgaccttcagaaggttcccttctatggcatgctcgacgaggccttgaaccgcgatgggctgaggctaaggactgattccatgggagaggtaaaagaccaaagaatgcaccccctactgctcgctcccaaggtaccagggcggttttacttcgtctttgggaagcctatcgaaacaagaggcagagagaaagaactacgagacaaggaggcggcgcagcgcctctatttgcaagtcaaatctgaggtggagggctgcatcaactatctcaaggagaagagggaggaggacccctacaggagtatactgcccaggcttctctaccaagcacttcatggtcccaatgcagaaatacccacatttgaaccatgaaatgttcacttcgagaataccaattgtttatattgttcttatttttttttcttgcattgtcaaaaaaaaatcgattgttaccattgtcctcaaaataattatgatggctgattctatcgtgtagcccatttaaagcacatatataaagaggtcaacggaaggtcatcgctcaactgtaaatttgtaagtacagcaacacaagtatttattttggctcatctcattgcaaacaaagcatggattcaagtcgagagaagatatgaagaatgtgttagaaatatgccttagagataatcatagagatgagcatatttttttatctatatatatattgcttaattgaatatccatgtaaggcaccttgtattgatt

SEQ ID NO: 66260 - DNA, 1963 bp, Zea Mays
gcagtatcacagccgcacagcgcccgctgctacgcacgccgccgtctacccccactcccccagcacgtgcgtgcacgcgcaggtgctcgaggacttctcccccgtttccgcccacatccgccgacctgcctcgccattccgccgcgccttcgcatcgtccgcgcgcccggcccttttcgttctaccccggtacgactcgacggtggtcgtgggcgccgaaggtgcggctccgaggcgccagtggaggggctgcggcaggagggagctagagatgtacggaccgccgtcccgaggcggcgggggagctggcactgccggagagcagcctagggtttaccaagtttggcgaggaagcaacgagtttttcttgcaaggccggttcatatttggacctgatgtgagatcattgtttctcaccatattcctcattcttgcgccaatggtggtcttctgtatatttgtggccagacatcttatcaatgactttcctgatcattggggagtttcagttatggtcatagtgattgtcttcactgtatacgatttaacattgctgcttcttacctctggtagagatcctggtatagtgcctcgtaacacccatcctcctgaaactgacgctattgaaatgaacaatgatgctggaaatggtcagacaccacaacaattgcggttgccacggacaaaggatgttattgtaaatggggtcattgtgaaggtcaagtactgtgacacctgcatgctgtacagaccacctcgatgctcacactgctctatctgtaataactgtgtggagcgctttgaccaccactgcccttgggttggccaatgcataggattgcgcaattatcggttcttctatatgtttgtattctctacaacattactgtgcctttatgtatttggtttctgctgggtgtacattatcaagattagagacgcagaacagtcgtcgatctggaaagcaatgttgaagactccagcatcaattgttctgatcatatactgcttcatctgtgtgtggtttgtgggtggtctgtctgttttccatttctatctcatgagcaccaaccagacaacctatgagaacttcagatatcgctatgatcggcgggccaacccgtacaacatagggatcttgaacaacttcatggagatattctgcaccgcagtccctccttccaagaacaacttccgagccagggtcccagtagagcaaggtttacagcaatcgcgtgcgccagcaaggggtttcatgagtctaaacatggataaacctgttggggacttcgaattgagtaggaagccagtatcatgggatgaacctcggtcagcagctgatatcagggacttggaggttggtctagggggtctactggacgagaaagaaggcaggatagcccatgcgtccccggatctgagcagagatgcccttcctgagcttgtggaagggagggctggtatgcattcgaggcgatcaagttggggtcacagaagcgggacctcggagtccgtggacagcattgctgtgcagatggggaccggagattctcactggggctccattagcagtgcccatggcacaaccagtggagctcactagcaagctacgccacgtctttgacgcatcttcttgtgaaacctgcctgataccaccaacgaagaagcgacctttgggcgctctctgtgcacatgtgctttcactccactccacctaggatatacgtctgcagtgctttcttactcagttgtcctgagagcgcatcagttctgatggtttgcttcccgtttggtgttttaagcaaaaataacagaagagccccttaactccccctgttgtttggattatccactgtatatatgtatctttgcaaatcggaattgcctgcagagaagatttgtcatgtttggctttcgcgattctagtttcttcacgcccttcagatttgcactgtgttggaac

SEQ ID NO: 66261 - DNA, 2461 bp, Zea Mays
cagagctcttctatataaacagtggttccctgcacaatgtgattcatcgcatacaggggcaagagtgtagtggcgtaggagcaaagttggtctctgatctttcccctgcaagggaaagagaagaacagagacacaccagtgtatagggtttcggcttgcctgtgcgtgttactgtcgcaatggcaggaggtctcttctccatggagcacccatgggcctctgtttttggcattctaggcaacatcatctcatttctggtgttcctcgcaccagtgccgacgttcctccgcgtgtaccggaagaagtcgacggaggggttcagctcggtgccgtatgtggtggctctgttcagctgcacgctgtggatcctgtacgcgctggtgaagaccaactccagcccgctgctgaccatcaacgccttcgggtgcgtggtggaggccgcctacatcctcctctacctcgtctacgcgccgcggggcgccaggctgagggcgctcgcctccttcctcctcctcgacgtggccgccttctcgctcgtcgccgtcgtcaccgtcgtgctcgtcgcggagccgcaccgcgtcagggtgctcggcagcgtctgcctcgccttctccatggccgtcttcgtcgcccccctgagcgtcatcttcgttgtgatcaggacgaagagtgccgagttcatgcccttcaccctctccttcttcctcaccctcagcgccgtcgcctggttcttgtacggcctcttcaccaaggacccctacgtcacggtacggtcaccaaatcgccatgcgacgcatgattacgatttacgaacgtgagattgtgagaagcatgcaataataagtcgatggacgtgagtgattctttgttctgcatgcatgcagctcccgaacgtgggcggcttcttcttcgggtgcatccagatggtgctctactgctgctaccggaagcgcaagccggcgtccgtggtcgtcctgccgacgacgacggccgccgcagccgtggcacagcagctggaggcggagatggagctgcccctcgccgcccaccagcaccagctggccgtggccgtactgcccacgtgcgcggccccggtgctggccgagctgcagaagctggaggaggcgatggggtcgccgcgcaagggcggcgtcaaggccatctgaccatggcctgcgatgaaccgcgcgcgatgcatgcatgtcctgctctagtgctagctggatcagttgcgtgcttatttgattattgttatgcatggcttggtagatccgaattattaactgactgcaagtagacagacatatatatgcgtgtgccttcttttctttactattatatatataatcgttcgtttgtgtgttcttaattatatatagctatatataagcttgcttgtattggagatggataaattaatctggtgggttgtgcaataaaagaagagaacatatctaatgcacatggaagattggtgtacatgatgcacatattaaatcatcaccactaattttagatctaacgtctctagttgtttggtatattttgctaaggacaccctccaacgtggtggtgtgtaatggtggaaggtgttatttgtaaattgaatgatcaactagagacattagatttaaaatgagtgatggtgatttaatatgtgcaccatgtgcaccaatcctccatgtgcaccagatatgtcctcataaaagaagggtgcacgctctttaagctactactactttgtgaattgtgacccactggcgcagcgcatatgttgtcggtggcttctggttagagatggcaacgggtacgtacccgccggatattatcttttcatactcgcacctgcgacaaaaaaatgtacccggcacaatacccatacccggttcgggtagaaatgtttacccatgcctgtacccaagtggatattgttacccgacgggtaacccatacccggcaggtgcttttgggtctccatcgccgttgttgctcttgtccttcggatccggcaggcggtgctcggtcgaagtggcagcggcatccctttgggacggcggggcgtcagcaaagggcgagacgaagatgcggtcatgcggagctacaaggttaagacgaggaagaggaacgaggttcaagaagaagcatcaccggccgtcgtcgtttgtggtgtcattggtcaccgccatggatgcaggagcagccgaggaggactgcaggagggtggaccgctggactgctggaggcaggagcaggatgcctcagccgctcagcgtctcagcgactcagcatggggagttggggactggcgcttggggttttgggagagcgagcgccgaccgagcgtccgaggtccgagcggagagccagcggcggcggcggcgcgggttggggcttggcgcttggggttttgggagagcgagctggggcttgctgtttgcagtttgcttgtcgagtgcttgac

SEQ ID NO: 66262 - DNA, 2290 bp, Zea Mays
cagagctcttctatataaacagtggttccctgcacaatgtgattcatcgcatacaggggcaagagtgtagtggcgtaggagcaaagttggtctctgatctttcccctgcaagggaaagagaagaacagagacacaccagtgtatagggtttcggcttgcctgtgcgtgttactgtcgcaatggcaggaggtctcttctccatggagcacccatgggcctctgtttttggcattctagcatgatcgatggcatgatgcgtgccaaacgattgctcgtcgtcgtcatcatcatcactcatcagtgttttttttacaccgagtgaaaatattcccacaggtttactgacagaaattcccatatgatatgtatcttcctttgttaatttcctgcaggcaacatcatctcatttctggtgttcctcgcaccagtgccgacgttcctccgcgtgtaccggaagaagtcgacggaggggttcagctcggtgccgtatgtggtggctctgttcagctgcacgctgtggatcctgtacgcgctggtgaagaccaactccagcccgctgctgaccatcaacgccttcgggtgcgtggtggaggccgcctacatcctcctctacctcgtctacgcgccgcggggcgccaggctgagggcgctcgcctccttcctcctcctcgacgtggccgccttctcgctcgtcgccgtcgtcaccgtcgtgctcgtcgcggagccgcaccgcgtcagggtgctcggcagcgtctgcctcgccttctccatggccgtcttcgtcgcccccctgagcgtcatcttcgttgtgatcaggacgaagagtgccgagttcatgcccttcaccctctccttcttcctcaccctcagcgccgtcgcctggttcttgtacggcctcttcaccaaggacccctacgtcacgctcccgaacgtgggcggcttcttcttcgggtgcatccagatggtgctctactgctgctaccggaagcgcaagccggcgtccgtggtcgtcctgccgacgacgacggccgccgcagccgtggcacagcagctggaggcggagatggagctgcccctcgccgcccaccagcaccagctggccgtggccgtactgcccacgtgcgcggccccggtgctggccgagctgcagaagctggaggaggcgatggggtcgccgcgcaagggcggcgtcaaggccatctgaccatggcctgcgatgaaccgcgcgcgatgcatgcatgtcctgctctagtgctagctggatcagttgcgtgcttatttgattattgttatgcatggcttggtagatccgaattattaactgactgcaagtagacagacatatatatgcgtgtgccttcttttctttactattatatatataatcgttcgtttgtgtgttcttaattatatatagctatatataagcttgcttgtattggagatggataaattaatctggtgggttgtgcaataaaagaagagaacatatctaatgcaccaatcctccatgtgcaccagatatgtcctcataaaagaagggtgcacgctctttaagctactactactttgtgaattgtgacccactggcgcagcgcatatgttgtcggtggcttctggttagagatggcaacgggtacgtacccgccggatattatcttttcatactcgcacctgcgacaaaaaaatgtacccggcacaatacccatacccggttcgggtagaaatgtttacccatgcctgtacccaagtggatattgttacccgacgggtaacccatacccggcaggtgcttttgggtctccatcgccgttgttgctcttgtccttcggatccggcaggcggtgctcggtcgaagtggcagcggcatccctttgggacggcggggcgtcagcaaagggcgagacgaagatgcggtcatgcggagctacaaggttaagacgaggaagaggaacgaggttcaagaagaagcatcaccggccgtcgtcgtttgtggtgtcattggtcaccgccatggatgcaggagcagccgaggaggactgcaggagggtggaccgctggactgctggaggcaggagcaggatgcctcagccgctcagcgtctcagcgactcagcatggggagttggggactggcgcttggggttttgggagagcgagcgccgaccgagcgtccgaggtccgagcggagagccagcggcggcggcggcgcgggttggggcttggcgcttggggttttgggagagcgagctggggcttgctgtttgcagtttgcttgtcgagtgcttgac

SEQ ID NO: 66263 - DNA, 1235 bp, Zea Mays
cctgcccacgaggccaccacgttttcgtcgccacagttgccagctcagagctttccctcctctgcttcctcctcatcgtggtctaccttcacgtcactctgctcgagctcgccacccgcttggaaactcttgacgatcgcagtggaactccgtggccacgggcagttcgtggaggacgatggtggcgtggcctctggggacaggaaaaggagggagcagtaggacagtcgtcgccaagtaaggcgaggccgaggaggcggggcaccgcctccatgggaaaccagcccctggtgacggggaagatggaggggtacaatgatgtgagttgtgttgattgagtagatgcatcaagggccagggtgctgatcaagtgcagcttcaaggtgaactcgacgtcgtccgaagagctgtccctggaagcggagcgcaccaccgaccagcacggcgtgtacaagctggacgtgccccccgtggacggcttcgagtgccgcgagggccacgagctccggtcggcgtgccgcgccacgctcgtccggagctcctccgccgcctgcaacgtcccgggcctcggggcctccacgcagcacatcgagctccgctcccgcgccaccagcgcctgcttcctcaacctcaacgcgctcaacttccgccccgccaaacgggacggcgcgctctgccacgcccaagggggcgacgacgcgttcggctcctcgcttttcttctggcccttcctgccgctcttctggccgccgttcagggtcccgggcggcggcgccggcgggacggtgtcgttcccgtggccgttcccggtgccggcctggctggtgccgttcctgcggccaccgttcttgccattcccgctctacgagccggcgccgtcaccaccgccgccgttctaccgtttcccgcctccccgagaagcggtttctcggccttgaaatcccatgagccaagaagcttgtcaagatacgctattttagcctttcttggcattagattgtgtgttagtgatgagaaactgatcagaggtcgtgtgatatttggcccggccccatgataggttgacctccgtgcgcatgtaaccgatgctagtactgatgctgccatgtagttcattgtgctcgtgaactgatgaacacgtgtggtctgatatttagtagtggcaaactggcaatggttacttgttacatctcctatttgaaggttcagccaagaaagcccatggtgtatatttc

SEQ ID NO: 66264 - DNA, 650 bp, Zea Mays
ccccccgcgattattccaagctccccgagcccatggccgcaatggctccagctgccgtgtcgttcctggcgatggcgctgctgttgctcagtgacgcggaggccaagttcctgcccaacaacatcaccgtcgttggctccgtctactgcgacgcctgctccaacaataccttctccaagcacagcttcttcctgaaagtatgtgttgcccaagttcattatgcactggaatttacgggtgatactgcttcgagctgaaatgggccctcacagtcgggtgttatgtcagtcgccattcagtagcatgtgcagatgaactgtcgtcaaagcatggcaagcctataaccagattaccagaagtccagcactagattaccatggctttcatctttacattaaactaagatctaagcattgtcctgaccgtcttgtaatcaaattatttactgttagactctaaatagctttatgggcagtttgtgtgtctgagtgcactttttttttaaaaaaaacaagacttctagagcaacgtacctttttcagatttttaaagatatactccaataaaaccgctgttttttttgggaaggaaaacagtacaaccagtgatgaattaattttacattctgtggccatggcgtgtacaaaaat

SEQ ID NO: 66265 - DNA, 1143 bp, Zea Mays
cctttttttgctttggatttcccgctattccaatctcttcttggcccccaagcgaggtggcagggcgccggtgccggccaagaagaagacggataaagtgacgaaccctctattcgagaagaggccgaagcagttcggcatcggcggcgcgttgccgcccaagaaggacctgcaccggttcgtcaagtggcccaaggtcgtgcgtatccagcggcagcgccgcatcctcaagcagcgcctcaaggtaccaccggcgctcaaccagttcacccgcaccctcgacaagaacctcgctacgaacctgtttaagatgcttctcaagtaccggcctgaagacaaggctgccaagaaggagaggcttctgaagagggcccaagctgagaatgaaggaaaaactgttgagtcgaagaaaccaattgttgtgaagtatggccttaaccatgtgacttacctcattgagcagaacaaggctcagcttgttgtcatcgctcacgacgtggatccgatcgaacttgttgtgtggcttccagccctgtgcaggaagatggaggtcccttactgcattgttaaaggaaaggctcgccttggatcgattgttcacaagaagaatgcatcagtcttgtgtcttaccactgtcaagaacgaggataagcttgagttcagcaagattttggaggctattaaggcaaacttcaacgacaagttcgatgaggtcaggaagaagtggggaggtggcatcatgggatccaagtcgcaggccaagaccaaggcccgggaaaagctgctcgccaaggaggctgcgcagcggatgacctagattgtctactgctgtgtctgccctgtagtttaacggggaagaactgatgaactcgtattgtggttttccgaatctagtttcatatgtttctgtccaccagaccatgtttagaagctttgcaagacagagtttacagtgtttatgtgatgcctcagatccatgcagctttgcttctaattgcctaagagcaacctcaaaagtatttcatgaaaaaatgcccttctacagctttttaaatttagaattttaaatgttgccatcttttgtgactgtttgcgagcgaatggtttttaaatgaggatttagaaagtgggtttatgctctaa

SEQ ID NO: 66266 - DNA, 616 bp, Zea Mays
cagccctgtgcaggaagatggaggtcccttactgcattgttaaaggaaaggctcgccttggatcgattgttcacaagaagaatgcatcagtcttgtgtcttaccactgtcaagaacgaggataagcttgagttcagcaagattttggaggctattaaggcaaacttcaacgacaagttcgatgaggtcaggaagaagtggggaggtggcatcatgggatccaagtcgcaggccaagaccaaggcccgggaaaagctgctcgccaaggaggctgcgcagcggatgacctagattgtctactgctgtgtctgccctgtagtttaacggggaagaactgatgaactcgtattgtggttttccgaatctagtttcatatgtttctgtccaccagaccatgtttagaagctttgcaagacagagtttacagtgtttatgtgatgcctcagatccatgcagctttgcttctaattgcctaagagcaacctcaaaagtatttcatgaaaaaatgcccttctacagctttttaaatttagaattttaaatgttgccatcttttgtgactgtttgcgagcgaatggtttttaaatgaggatttagaaagtgggtttatgctctaa

SEQ ID NO: 66267 - DNA, 274 bp, Zea Mays
agcggcgcccggcgcaccacacaggctttctccaactctccgccctcgccatggccatgaccgtggcagccgcctggcttccgtcgaccgcctctcgccggagaatcttatcctctccgctccctccgttcgcggcccctatctccatccacatgccacggcgggcgccgcctcccagtcccatccatccaaagccgcgcctcttcgtcgcctacgcgcagctcgatttctccagagcatcacttgtgtgtctgtttctgcgtctcgttacaac

SEQ ID NO: 66268 - DNA, 881 bp, Zea Mays
cccggcgcaccacacaggctttctccaactctccgccctcgccatggccatgaccgtggcagccgcctggcttccgtcgaccgcctctcgccggagaatcttatcctctccgctccctccgttcgcggcccctatctccatccacatgccacggcgggcgccgcctcccagtcccatccatccaaagccgcgcctcttcgtcgcctacgcgcagctcgatttctccagagctgttcaaacagcatggagggtcggtaacgatgctgtggaggcaggaagtaatcttgtcccaggttcagttccacgaccaattgccaggataggtgttgcctttgctgctgtgtcagtcgcctttttccttgtcaaatccattgtgtccactgcattatttgttctggtaagcagtcacgacatttgcggcaatgatgggccttatatatctcagcttcctggctatgaacccaaaggaggcatccggctctaggctggatgaagcaatgggcaacccatcggaggaccctgttgaagaggcccgtaggataatggacaaatacaagtaattaacctgtgcaaaggtgctgtactctcagaggtatgatttgtctgtagagcttccttgcgtgacgtgaggggtgatggatgggtggatctgattttagcatactacactacactcagtgttttgatatatgtaaatatagttgcacggttgatgaccaaatgaattccgcaaatcaacaagaggttaccaatttccgggtcacaaaaaaaaaagaggttagcaacaatttcattcttaatattgtactacctccattttttatttgacgtgagatagtacaaatttacactaacaaatgtctaataaaaaaatcggaggg

SEQ ID NO: 66269 - DNA, 820 bp, Zea Mays
cccggcgcaccacacaggctttctccaactctccgccctcgccatggccatgaccgtggcagccgcctggcttccgtcgaccgcctctcgccggagaatcttatcctctccgctccctccgttcgcggcccctatctccatccacatgccacggcgggcgccgcctcccagtcccatccatccaaagccgcgcctcttcgtcgcctacgcgcagctcgatttctccagagctgttcaaacagcatggagggtcggtaacgatgctgtggaggcaggaagtaatcttgtcccaggttcagttccacgaccaattgccaggataggtgttgcctttgctgctgtgtcagtcgcctttttccttgtcaaatccattgtgtccactgcattatttgttctggcaatgatgggccttatatatctcagcttcctggctatgaacccaaaggaggcatccggctctaggctggatgaagcaatgggcaacccatcggaggaccctgttgaagaggcccgtaggataatggacaaatacaagtaattaacctgtgcaaaggtgctgtactctcagaggtatgatttgtctgtagagcttccttgcgtgacgtgaggggtgatggatgggtggatctgattttagcatactacactacactcagtgttttgatatatgtaaatatagttgcacggttgatgaccaaatgaattccgcaaatcaacaagaggttaccaatttccgggtcacaaaaaaaaaagagtgcagacggacgggcctgtcgaacacccagctgatgctgacagattgggcctctttttgggcggc

SEQ ID NO: 66270 - DNA, 1015 bp, Zea Mays
caaatggtttgttgggggtgtgattccagctatgcttaccttacggcgtccattctcttgacatgcagctagtgggttaaagcaacataatgcttccgtgcatttaatctatgcatagggctgacaaatgtgtactagcatcttctggctttcagggtgatattaaagctctgcacaagaacctagctgccagagaattgctataccaacaccagcataacaaaaggatgagctgccctgccatggcacagctcctctccaataccctgtactacaagcgcttcttcccatattacgccttcaatgtgctcggtgggcttgacagcgaggggaaagggtgtgttttcacctatgatgcagtaggttcctatgagagaactggttatagtgctcagggaacgggatctactttgattatgccagtcctggacaatcaactaaaatcaccaagtcctctattgctccctgccagggatgctgtcacaccattgtcggagtcagaggccatcgatctagttaaggatgtgtttgcatctgcaactgagagagacatctacactggagacaagttggaaattgtagtcatcaacaaagtcgggactaagcgcgagtacatcgacctgaggaaggactaagccaacgcttcagttgtgctgcagctgtcatttgcttcggacatgtttcctagtctggggatttatgtctaaagccgttgcttgcatagaaacatatgttattacttgcatatgtcctgtaccagggttcagtcagcttgttttttttttgttgaaacaaattgcttggatattgaagcggtacttactggcggaaagtctatatttggttgggagcttaacattaatggcctcatccgaaatgtcacaatcacaagtctctttatatctcttctactcattcggattcgaattgccttttgtctttaaagatctttaacttttatgtagtacctcccttttaaattatatgatgtttttagtttcttttagtatattgt

SEQ ID NO: 66271 - DNA, 1199 bp, Zea Mays
caccggccacctcaccaactcccctacaagccgccgggccgaacgaccgaagcatccacttccaaagtgtactgtttgctgcccgcctggcgcctgcccccataactactctgccaccaatccggggaggaatcaacctagcggtaagcggacatggcggcggcgaagatagcgccgtcgatgctctcgtcggactttgccaacctcgcttcggaggctgagcgcatggtccgcctaggcgccgactggctacatatggacatcatggatgggtgagttggtctctaattctcaatgaggatattttacttctattgtggtttgctactgaagtgtccggtggcacttcgttcctaacctgactattggggctccggtgatccagagcttgaggaaacataccaaagcatatttggactgccatcttatggtcacaaagccttcagattacgtagaaccatttggaaaggctggcgcttctggattcacattccatatagaagttgctagagacaactggcaagatctcatccaaagcattaaatcaaagggtatgcggcctggtgtatcattgaggccaggtggaagcagaaaatccggtagaattggttcttgtgatgacagtcgagcctggttttggtggtcagaaatttatgccagaaatgatggataaggtgcgcacactgagaaagaagtacccttcccttgacatagaggtccttcaaccatagacgtggccgcatctgctggggccaattgcatcgtcgctggaagctctatatttggcgctgcggacccaggagccatcatatctgtgctgaggaagagcgtcgagggctctcagaacaaaaactgattttggtgtttctgctgtaaagtactccctccgtttttttttattcgtcgcgttttagttcaaacatgaactagcggacgactgatattcgagaatggagggagtacttcgaccctgcacgtcagatgagctgatcctcacattgcaccggaactgttcggcgagaataaaatttgatgttagaccttgaacgtcttttgcaatatgcttttttgtctgccctgattatattctaccccttcatataacgcttgatgtgccgtcaagaaatggcgaaacattggcatgactgtaaacaagaaactaaatacgggtataaaaatcgtgtcatgtcatgtccata

SEQ ID NO: 66272 - DNA, 1087 bp, Zea Mays
  misc_feature (1)..(2): n is a, c, g, or t
nnccactgcattgtctgcttcttcatatcctactgcgaatctattctatcctcacattgtggatataaaaattgcattgagggcagcaatggtctccaataatttgaatttgagaacaatgggtaatgctatgatggaaaagtttaacaagtattgggaagaaaagaataatgttatggtgattgctactattcttgatccaaggtataaaatgagatttattgagtggtgcttcaataagatatttgatgaacatcaagttttgtttgaattagaagatgttcgtagtgagttagaaaaactttatggggattttgaggtgcagcatagagagagaaaagagtctcaaagcaaatctaatgcttcctcatctttgagtattgaaagatcatgtagtttgccatccgcttcatgtcaatttcagtctttcttgtcatcaactcagtctaacccatcaaagagcgagttgcttatctatttggaggagactaatgtgtgtttatcggacaaagagtttgatttgctgaattggtggaaggttaattcacatagatttccagtggtgtcgagaatggcaaagaaattcctaactataccggcgacatcagtgtcttcggagtctacttttagcacgggaggtagaactcttgatgattatcgtagttctctaaggccttcaatggtggaggcattggtatgctcttctagctggatccgaggaacacatgatggaagcatgatatatgtggaagaagatgatgaggacaatgttgagaacattctatttccaaaaagcttggtggaaagcaactaaatttggaagaattggatggagacaagtaaacaaagtcaagactcaagagaaaagatgcatcatttgaattaattttgtcgttgaaactttgagatactgaatattttgagcttatcaatggattatgcattgctcttgtatactttgagatactgctgctggtttaaaatgtcttattgtatgttttgaggagtagcgtatcttcttgtatgttttgagatgattttatggaatatatatacaactggaggttgggctcgcgagccggctcga

SEQ ID NO: 66273 - DNA, 670 bp, Zea Mays
gtcatcaaaagagtcttccaactaaaagggaacaaacgccagagggttgtggcagtagatcacctctctcccgattggggagcagggtccagcttgcagccaaatggcgtacaaaccggcaaagagcctgctaaggaggttcccaaggaaccatcttttacctgcccaatatgttggaataagatggaggagccttccacaacgacttgtggccatatcttctgcgacacgtgcatcaaacaggccatcaaggttcagaagaaatgccctacttgcaggaaggggctgaaaatgaatagtgttcatcgtattttccttccgaacgcttctagttaaggtcgattggctttgtcaaaggaacttctggtaacacaaggctgtgcaatgtacagtgaggatcagaagttcttgggtgaacagcagatagatgtttcatcctagtctgtatcatttaacagcatcactaggagctcatcatgaaaacttcctgactagggaagtggatatcagcctcagttttactggcctcttattgcatccgtggttcataatgttatttcgctgttgtatgtattaggttattactgtggtggattagtgtaactgggatttgcttcattgtaaaatgataatgacgagttgaaacgtttagcatttttggatgcttttg

SEQ ID NO: 66274 - DNA, 2041 bp, Zea Mays
gaaccttctcaaagactcaaaaagcaaaggtgtgccctagccaatggctagtgaaaagtactataccgttggcaaactttaattttaaaaaataaagaagcccctagtttaacacaatccgctctcctacaagaagacggcaagtcggcaaccccgaggcgtatggggcaagcggtggctacgggctcggcgtcaactacggccgggtggcggacgacatcccttcgccgtggcgctccgtggagctgctccgcgcggcgggggccgggtcggtcaagatctacgacgccaacccgggcgtgctccgcgcgctggctgggacgcgctggcccgtctccatcatggtgccaaaccagatcataccggacctcgccgcctctgcggccgcggcggaccggtgggtcgccgagaacctggtcccctactacccggcgacacgggtcaagttccttctcgtggggaacgagatcctctccgacttgtccatcgcgaactccacctggccacaccttgtcccggcgatggagaacatccaccggagcctccgaaagaggagcatcagcagcgtcaagatcggcaccacgctcgccatggacgcgctcgccgacggcgccttcccgcgcccaccgtcggccgccgcgttccgcgccgacatcgccgaggcagtcgtgcgcccgctgctgcacttcttgaacgggaccaactcgtactacttcgtcgacgcgtacccctacttcgtctgggccgacaacaacctcaccgtctcgctcgactacgcgctcttccagggcggacgcacacgctacgtcgacccgggcaccgggctcacgtacaccaacctgctcgacgaaatgctcgacgcggtggtcatcgcgatggcgaagcttgggtacgggcacgtgaagctggccatcgcggagaccgggtggcccaacggctgcgactacaaccagattggcggcaacgtccacaacgccgccatctacaacaggaacctcgcggcgcggatggctaagaacccgggcacgccggtgaggccgggcgcgaagatgccggtgttcgtgttctcgctctacaacgaggacctcaagccagggccgggcaccgagcgacactggggactgtactacgccaacggcacggcagtctacgagatcgacctcaccggacggcggccactggggtcgtacccgcccctgccggcgccggagaacaacacaccgtacaaaggaccgatatggtgcgtgctctcggccgccgccagcaacaagctgaacgagacggcggtggggaacgcgctgtcgtacgcgtgcgggcagggaaacgggacctgcgacgccattcagcccgggaaaacgtgctacacgcccaacacaacggcggcgcacgccagctatgctttcaattcgtactggcagcagttcgagaagactggagcgacgtgctacttcaacaacctcgcagagcagactatcaaagacccaagtcatggatcctgcaggttccctagctcgtcggggtcgccttgaaggggtgcagagcgggcgagaagacagcatttgggtcctgattttgtgtaaccagacgacttgggacctagtgaagtgtggagcaacgtagatgttctaactaacacagcactctctccgttcttatttatttgtcgcgttttagtttaaaaataagctagctcgcgacaaatatttgagaacggagttaccagacttgtgccatgacagtgaaggctcactcggttgctcctgctcgcttgagaatcagaaatcgaaggtggaaacgtagttcgtttcagtttttagtaactgtgagttgcactgcatgagagctattggaagtacgtatcacttaaccctcgtgtcagtttgccacaacaagacgcctctttattctagcttctactgtttatacgatatttttatctctagaattgtaattgtagcagtccaaacagtcggctttattaatctgcagtcggctttattaatccgaagcaagcaacctggtccgtagagggaaaaggaac

SEQ ID NO: 66275 - DNA, 1355 bp, Zea Mays
ctgactcttcaattacacattgtttgatttgaacgcatattatcttcatcaagtgccagtgaaaatggtgaagtggttggtccggaagacattactgtcaggagtagttctgaactggtgaacaagacttgcttgactgaccatgccctgcaggaaaatggacatacaagtggtgatatttttgtgccatctcaggcagcctccacagagcttagcacaatatctatgcaggatatcagtgcactcagtgaagttgaaattatgcaaaccgaagatgctagtgcaaaggacatgactgcagtatgtagcattgattgtattgaaatgaaacaggctatcaacactacagcaaatgatacatatgcagctattgttgaagaaaagaagttgattgaaggcaccactgcaaggatgaatggggtgcgagagacatattatgttgaagaacagacacaagctagtgacacaaaggagttgagtgcagtacagaacatagggaattctgaagaaaataagcagactgaaaatactgatgcaaaggagactaatgcacggtttaatgcaaacgatgttgagcacaaaacacagactgcaaaggagattgctgcagccgaaagcacaagcagcgttgaagagaagcagcagctaaacatcgtggttgtccaagatggaagcaacaagaagatgaatgaagagattgcatcgacaggtgcccaactgaattcaggaagagttcgtgtcccgctgaaggtcctcctcgccgaggcaagcatggagaaccaagtgaagaaacccagcactaaggaacgaatgctgtcgttccggcgccaggtgaccaaggacaacaacttgtcagtgaaatcggggtcacgcaaatctggccctgatgaccaccattggagctccccagccaaactgccacataaggacgttgacaagatttccagagaaaagaagcagccgtggatgccgttcatctgctgccactccgtgcgctgataatatattttgcatcagttgacaactctacatacatgtgctgctgtaactaatgctatccgtctttgtgtagatagtctgcaatctagtatctgatattttgaatcagtgcaattttgatgtatccgctacctgacttgttagacatttgcgcgtgaatctgtcctgatgttcagattcagctagtgtttctgtggactgaacaggcctggaatcttgtaccggattaagctcggtgtggcctgctggtaattttgcggcaacgaaaagaagcaaagtgaaattaacgaaacgatttcatgttcatgggactgccggatctgatgacagttggctggagagtggggagaagtcag

SEQ ID NO: 66276 - DNA, 2020 bp, Zea Mays
tctcggcctgccggcgcggcggcctcacctccacccgccccgtcccgttttgacggccctttctcccctctcctccgcgagcgccgccgcagtagaacccggtggtaacccactgccgcaagcatcccaccgcgccgagctacgcgacggacgcggcgcgcggcccacaacccaaccgcagcggcaacaaccgctctataaagcaatccccccacctaccggctccgcggcctcgttcgcttcgctttcccccaaatccaccgcgggctcgagctcggaggagaggagacgagacgacccaagactttctcacccccctttgcttcctgcgcaattcctgcggcagcgcctttctctctttcaatggacagcgactacgttgccagcctgctcatgggcatgggctcatccgcccctgcgctcgacttcgccgcgctggacgccgggttcctcgaaacgctctgcggcggcggcggcggcctcttcggggtgtccggggtcgccgcgggggccgggtgtggcggcgtgtccccggaggggtcgtcggtgtccgacccggcgtgggcgcgcgccaggggcgatgacaatgtcaggaagcgcaaggcgccgcccacggggtccgccggcggcaaggaagcctgcccgggcaaggctgcggaggccaagggtccggacgggaagaggtgcagagtgggcggcagcgacagcccggtgaagccgaaggtagaggaggtggcggcgagcgacgcctcggttgaactcaaagcgcagaagaagggcaaggggaagaccgccaagccggcagtcgaaccgcccaaggactacgtccatgtccgggcgcggcgagggcaggcgactgacagccacagcctcgcagagaggaagagagaagatcagccagaggatgaagtttctgcaggacctagtgccaggatgcaacaaggtagttggcaaggcactcatgctcgatgagatcataaactacgtccagtctctgcagcagcaagtcgagttcctgtccatgaagctcgccactgtgaacccacagcttgacttcagcaacctgtcgacactcctacacaaagacatgtaccaaccatgtggcccttcggcaaattcggtctttccactggaaagtgacggtgcagctttcccattctgtgaccaagcggatcttttccacagctttggttcgggttcggctgctatggaggatcagtgctctctaagcctgctagacacggctctgccccacgcggccaacccacagttcgcttttcaaaagcagagggacttctgggaggatggcctacagaacgccttgcctaccggtagtgagcaaagacaggaggaggatgggcttttagtacccaactttgatggtacgtaacctgtgcctaaatgatgggcgatcgattgaagggcacgcacgctttggagattaaccatttggctgataccccatcatacgttgtgtctgatgcaggccagttacatgctgaccagacaaaggttgagttctagtccctggtgatcctcccaaggttgatatttttgtatataggtgggtaccaagacctgtggcaagcaaagcgctctctctctctgtgtgtccgaagctgaccatcattagagtctaggcctgcgaactgatttcgttccgtgataatgctgcatgtatggcatctcggttcttcccacagagatcatgtgatgtgatcgacctcgagaaattaaaagtagattgtgtactagatatggcgcaaatattacatgcgccatcttctaaagttgtactgattggtatgtaagggcgctgggtggtgttggaacggataccgtgtactgttttgttgcttttttttctctagtattaatgattatgatgacgaaagtccaagtatcctctcagcttgttgcaattgtgtctgtgtcctggtaccttttttttctgcaggtgttgtaataaaatgtaaaaagctgatctgaaactgttggagaaatcagaagtgagtgttgc

SEQ ID NO: 66277 - DNA, 1561 bp, Zea Mays
caaggctccacactgcatggagtccggtcaaaactagatggcactccccataactcttttcactcatagcataattttgtcgatatgaaaagtctatcataagcatagaaatggtacagaagaacatcaatctcagtaacatcttcaacaccagcagagcacaatcaaaactactcaacatttcactcgtcctcttggctgcggagcctggcgagcttgttggtgaccacgatgtccagttgcgcagcacgctccacaatctccttgcgcttgcgggtggacacgttgtgggcgatctcagcgcagtaagtcctgtgtgcatcagcagcagctccagctcggagacattgtgaacaacaaactttttgaacttgttgggaaggtagtgcctggtcttcttgtcggagccatatccaatgttgggcatcaaggtgcatcccttgaacttacgcctgacgcgggagtcgatacccttgggcctgcgccagcttggctacagaaaacattgtcagcaagattagtttcaacagacagaaatgctagtgcagatgactcaaatatacagtgccaatgcattggaaagatgtgcccatctttttataggatatctacttacacctagtgatagaagtaatatctgagactcaattcatggctctccacaggaaataaaatggaaggaaaattctggcaggtttaggtatggtatggcaaattctggatccatacagttaccagcatggctagaagcaacgagcattttgctaaactggtacagtattgtgcaagggacatttcgagctgcaaacatggtcagaactcagaagtaatatgcattttctaaacttacagaatcagtggcattacatcagcataaactaatcaatttccacaaacagaagggatttgatctctaagcaggcattatgctaatgagctaatccagtacttgtcaagcaaagcttgcatttcaggccgctggagcaaagatttctatctaaatcggacacaggccaacgagctgctagtccaaactgaaatcgtgcaaaaggtattcaaattggtgcacatgtggccattctttcggtgaacctaatggagtgccagtcgaccaacaaggaaccaacgaaggccttaccaaatgctcgcttggcacgcacaagcacaacaagggtcaaggcaacgggtggtgtttttcctaccttaaggcacttgtagcgatcaagatggggcctcttgaactgcttgaccctcttcttcacgatcttctgcgtcagcagcggcaccgccatctgcactagcaaaggtcacgcaaagcaattaaacaccaggtggacggaccaaaccacaaatccggtagcacgagagcaaggaattcgagaacatcgtggtcggggtcgcgccgcctgtggctgtacctttgcgaaccttcggtgatgcggcggtgctggcgagataggcggtaagcagcggcggcggagtgggagaggacaggagatggtcttatggcgccggagagaaccctagggttggtgggctcgggaggcctagtgggccgtag

SEQ ID NO: 66278 - DNA, 1331 bp, Zea Mays
atggtacagaagaacatcaatctcagtaacatcttcaacaccagcagagcacaatcaaaactactcaacatttcactcgtcctcttggctgcggagcctggcgagcttgttggtgaccacgatgtccagttgcgcagcacgctccacaatctccttgcgcttgcgggtggacacgttgtgggcgatctcagcgcagtaagtcctgttgtgcatcagcagcagctccagctcggagacattgtgaacaacaaactttttgaacttgttgggaaggtagtgcctggtcttcttgtcggagccatatccaatgttgggcatcaaggtgcatcccttgaacttacgcctgacgcgggagtcgatacccttgggcctgcgccagcttggctacagaaaacattgtcagcaagattagtttcaacagacagaaatgctagtgcagatgactcaaatatacagtgccaatgcattggaaagatgtgcccatctttttataggatatctacttacacctagtgatagaagtaatatctgagactcaattcatggctctccacaggaaataaaatggaaggaaaattctggcaggtttaggtatggtatggcaaattctggatccatacagttaccagcatggctagaagcaacgagcattttgctaaactggtacagtattgtgcaagggacatttcgagctgcaaacatggtcagaactcagaagtaatatgcattttctaaacttacagaatcagtggcattacatcagcataaactaatcaatttccacaaacagaagggatttgatctctaagcaggcattatgctaatgagctaatccagtacttgtcaagcaaagcttgcatttcaggccgctggagcaaagatttctatctaaatcggacacaggccaacgagctgctagtccaaactgaaatcgtgcaaaaggtattcaaattggtgcacatgtggccattctttcggtgaacctaatggagtgccagtcgaccaacaaggaaccaacgaaggccttaccaaatgctcgcttggcacgcacaagcacaacaagggtcaaggcaacgggtggtgtttttcctaccttaaggcacttgtagcgatcaagatggggcctcttgaactgcttgaccctcttcttcacgatcttctgcgtcagcagcggcaccgccatctgcactttgcgaaccttcggtgatgcggcggtgctggcgagataggcggtaagcagcggcggcggagtgggagaggacaggagatggtcttatggcgccggagagaaccctagggttggtgggctcgggaggcctagtgggccgtag

SEQ ID NO: 66279 - DNA, 604 bp, Zea Mays
atgtgggagcaatacaatgcaattacacatgttgcagtaaagccgccatttgggtgcactaactggatcaagaatcagggtaccactacactcaggacaagcacaaactccctgagtgatcatagattgcttgcatgtcgggtgaggacaaaggaagcatggcatgccggcccctttcccaaccttgccggtgtcatcgagcttgagagcaccaaagagtttgtcgatgccttcaaatggaggacaattatagcaaaaagggcacagtgggaaagattttgcatcaggtcccaccatcgagaacaaaagcaactcaaaaccatcaagagggcatacgatttccttgtaaagctggaaagacaagaactattaatcaaagagtagacataaactgagcttgtcacaaaaaagcacataggataatgggatatatgcttttagaatataacttggcatgaaacaaagtggtgaacacaaactaagggcaaagaaatggaagaaacaagttatagcaattaagaaaaaataaaataaaataaaattacaggactgcatgtggaatttggaagcagaggaatgacttcatctttaagaatgaggctcc

SEQ ID NO: 66280 - DNA, 2651 bp, Zea Mays
  misc_feature (1)..(2): n is a, c, g, or t
nntttgtccgcacaaaaagagaggataaagaagcatgcttggattgcaaggtgatagatgaggagtgtgttgtttctcaatgtaagcttgtggtagcggtccttcgttctcaggacaggtgtgtgtccgtagggattaacaagcaaagattgtgagaataaagtggtgaaaacttaaaactaaaaggggagatgtcataagtcttcaagaaaagagccatcaaagagggcacttggaaaaaagaagatgacacaaacaacatgcaggagaagatggcaacctgcactcggaaggtggtctcagagctatgtgcaacaatcaaagggagtggtcgaagctaaagatacttgatggtgggatggggaagtccaaagagctattaagaagaagaaagaatgttatcgacatttgtaccatgacaagagtgtggacaacatagagaagtacaaggtagcaaaaaagaccacaaaatgagttgtaagtgtggcaaagggtaggatgtacaaggatctttaccaactgcatgagtatgaaggaaggagataagaacatatatagaatggccagctgatgaaaaaaggatataccttgatgtatttttttgcggcgatgaagtgctagttaatgaaagtcatgcgtgagtaaataagaaaatggagttgcagcaggagactctatagtccaaaagttttagactcagtagaaataaaaccaaatatattagatgtgacttcgatactactacacatgaggaaggagaagttagtttggaaggtcaaatcgtgctcaggaaggatacctttcggtatttaggatcaatgctataaagaaaatggggatgttgacgaagacgctagctatagaatcaaagcaaggtggatgaagtagtgtcaagcatctggcattctatgtgacaagtgggcaccacagaagctaaaaggaaagtttaataggacgatgattaaacttgctatgttttatggtgcagaatgtcaacatattcaacagataagtgttgcagaaatgtgtatgttacgttgaatttatgaccatagaagaaaggattaagttcaaaacgatgatatatgtgataggctacggtagcatcaattggaaaaaaatgtatccaatactagttgagatcgttttgaaatgtccaacaaagacttccggaggcaccaggtagcatcaagccatcaattggggaaaaaaatgtatccaatactggttgagatcgttttgaaatgtccaacaaagacttccagaggcaccaatgcatagtgagatcctaaggcacgatagcaatggaaagagagacagaaaaagaccaaagttgacatgggaaaagacaataagagaagacttgaaatgatgaaatatacccaaagatttagccttgtataggagcgtatgaaaaacaactatccatgacttgtggtttcggttgggtttcaactcaagtctacctcaacttgcttgggactaagggcctgtttgtttacccccatggattatataatctggattatttttggaggattatataatctggattatataatctggattatataatctgagtagtcatgtttgtttacccagattatttgagttgttaataggattattttgtatgaggaagacaagaatgtcctctatatttgtactaggttgaaactcatatatgaaaaaaaataattcaattgacattggcaaatattgcattagcaatattatcacggaaggcattcatgtcaccttcttcatccccaaattgactagtactaggcgcaaaaacgattcggtggattataatggcaatggtgggtaatttttaggaaacttgaaagggtagtggggaagtgggaaaaaaataatctgaaataagcacctcctcacttgcttatggattatcataatccaaggggttagattatataatctgggcaaataagctggactgtttgtttgcctcttaggattatttaatccagattatataatctggggggtaaacaaacaggccctaagggcttgtttggtttgatgcctaacttgccacactttgcctaacttttctgcctaaggttagttcttcaattcgaacgactaaccttaggcaaagtgtggcacatttagccacgaaccaaacagcccctaaaagactttgttgttgttgacaatataatctatatggggggagggaaaacacatatgttaaaaaaaatctgaacagtggaacatataacaaagacacagaataagacaaacactgccactaggattcagtgcttttgcagattctgcaggtgtaattaagagcttgcgaaaaaaatggtggaaacagtaaccaggacatttgttgttcagattccacctagagtcaactaaatggagggcaaaggacataagttcaaatttcagagaaacggcatagttgatcaaccatccatgggtagagtagatttgcataatagagtttattaccgcttcactttgttgagttacaccaacaattaactgagttatattgtcttacgatctgagttgacccctaacagttaactaagttgcattctgtctcaactagagttgtaaatgaacacattacctttgggttgcattcagatctcagaactggagcctcaaat

SEQ ID NO: 66281 - DNA, 981 bp, Zea Mays
gtttgattcaatactgcatttttcagaaaagaaaaggtttgctctcaaagcaaatgacataagtaaaacggaagtaaaaatgcaattttagtaaggataggatgtagatattggagattttagaattgaattagatccaataccaaatctgtctagtattagaaataagtttcaataaaaatatattgtttggatatatccggaattgcaattccatccaatacctagagtcttggctctgaattgggagacactttttagttaaagtccaattccaagaaattgagctttaattccagctctcaattcattagacaaataaacagcagaattcagaaatcattatttcaattcccaatttcagttttgaatatctagatccaaacgggatataaagtgaaacacaaacaaatctaaactgataaacatgcccaactacccgaatctggctgattatttggccttgcagtctggtggagcctaagaatacacagatacataaagctcacatatatgcatatctcagcaggcatgatattaatttgtttctcattgcatgaatccttttttttcaccacgccaaacaatgtcttgaagctttccttctggcatttctgaaaggctctggggttctgaaaccctgttgggctagtttgcaagaaaggggaggcaaaccagggaggaaaaccccaatatatataactaaatatctaggagatttgggttcccaaactagccctaactattcttggcagctgtggctgctgcggctgctgcggctcgtgaactatagcgatagctacagcagcgaaaacacactatgaatctaactttcatgctttctgtcattcaaacgtagaggatttaaatgacaggacacgccatgagaacaagattcaaagggtgccacaagttgaacgaagcaccaaggttgcctgtcatgaagaaagtttctttgatgcaggcaccttaatttcacac

SEQ ID NO: 66282 - DNA, 411 bp, Zea Mays
gattcacccactcgctcagatcagatgagccctttgttcctgcatcaaaggcgcatcacggatccgttagtaacgagcgcgcagatctggtgcgtcgccggtacctccatctcatggagggaggaaggcagagaggcagagcacacctacgtctgcttggagaaggaggagggccccgcggcggaggcggaggaaggcgaacgcttgctgcggaagatcatgtacgccagcgggagcaccacgccggccatcatgatcgctgcccccaccaggtacctcgccggcgaaggcgcacccacctccagctccatccttgatctctgtcgcttcgctggatttggatctgggggtgggtttccctggaaacccggggcagagggagggagggaggggcgaccgggcgaggcttga

SEQ ID NO: 66283 - DNA, 4286 bp, Zea Mays
atggcctcacccacggtcgcctccccgatccgggcgagccccgtcgacaaccccaccgtcgcgccctcactggcctcctgccgctgcgccttatcgctagatgctcgacatccccatccgcgcgctcgaggcagaggccagggacaccaagatgagcccgaccgcgaccgcctagccatcagctccaaagaagaagccaggggaccgatggacgtcagtgttccgtcgtggtggcccgctagatccatattcagcaagaaagatatctcgccatgccggcccagggccgcagcccgtcaccttcctccccccgcacccgccgtgacagccgcctccccacgcccgcttacccgactggccgcacaagatgcccacagtggcccccatcgcgcccacccgctccccccatccaccgcgacctcagccgccacgccgacgccatccccgtcctctagcgcgttgtcgccgtcgtcacaccgccaaaggtgcctgccccctgctaccgaggtcgacgaccagcagcggcaagctgccgagctcgacgacacgcacgccatgcttggccatatggacgagtccatcgcctgctacgagaaggggctccagatccagatgtccgcgctcgatgagcgcaatccctgcctccctgagacctgcaggtgattgacaaggtttaggaggaaacttccaaaagccggtcaagtatggagtgcttaacatcactttggcaacttatatttttttacatgtttgctttgtttgttaacaacataatttatgggctgacaatgtgatcatgtattctttctggtagtcttcgtgtcactgcttgcagttgcaggggagggatcatggctttcttttattttccatgtgcaatgtttaatttaggtgatgaactccaaagcttatcccattgttttctagcaagagctaagcaatactggatggagaacatttatctttttaataacgagtaaaagcataatggcatgcttgtgtttagttctctgtttgttgaccaatcgctatatttaatcttgattttttttatctataacttgaatttcaaagattcaatattttttattcagacattttctcttctctagatattcttttatgcaaataacgcggttacactagatcagccaacattctgggaaataagctatatggtcagagtaagaggttcaagagttgatagttcaacaactttaactgagagcaaatctacaagaaaaaggaaacaagcaacctggaacctacaactgcaggagcttgcttgaaagtgaacaatcaaggttgtgtgtatatattatgcccgacatttttgaaggatattgcgagggccattgtatctgctggaaaaatcatttcaacttgtcgaacatggtattaggatacgaattggagtggtcaacagaaattctggacagatatgtcaaatttcagaatccacgatggtcctccaagaaataaagatgctcttgatcatctattgagaagtggaatactaattttttgctgcagcgtgatggataaaggtttttgcgtattcttgggtttttttcctttcctttttggctacacacaactctttttaaatatacattcagtaggtggcaatgcctcctatttccctaaaaatatagcgccaaagagttcaaaattgaattctcataatctgctattaggaaaagaggtcaacttctatattttttacatcaggtaatttggctataatacaacggcatgctgaggtcaacttctgtatttttttctgcaagtaacttggctataatacagcggcatgctccattctgaagctggtcaagaaataaatatagcacttgcaatattttccagtagtcaaacctctccattacttcaattctcgttctcatttttgactatgttcttcatgtcagttcaacataataattaagaggtcgcttgcccctgagacggcttcatggtattttatttgttttttacaaagtattttttaagcgctaaacttacagtgcactttctctattcgttttggtgctgcttataagtcttttgtgttttagatccatcgaagatggcgcttaatctcgagagctagggagatgaaatgccttttgtacatgatggaaggaaacaaattacgtacatgtatatgtggatcgaattgactgttgcattctgcctgtatttaagcaacggtttccacccaaaacgtctataatttggtccttcctagatgtgtcaaatgtgtttactgcactgcgtttgcttttgtggcagcgccctaatagttgtttataaagtctgatgttaacaaactattgtcatgctatgtaatatatagtcttaacatgttggtttgttgagtgttcgaatatcagttttatattattatgtcaggtgttattagtgttcaattttttaagttcttgttgtacatcctatcattacatgagacaatgttgtgatgtttacaatattgtgttatgtatgttatatcattttggtattatagtataatttaatttgtatcagtttagttctgtattggttgttgccaaaaaaaattatgagatattaaggtcgataataatgttcgtttttatataatcgttttgcactaatattttgttaatttttttgtataccgttgcaacgcacgggcacctaactagtatgagactatgagtacatcaagtgcattcccttagaactcttgttgtgtaaaaaaatgtgtaacatgtcttggtacagagattaatttggtttgtgttttttagactgcaattatatctgggttctcagccttgccatggttagtcaagcccctctatgattttatcaggtttcaccaaaatactgaatagccttcctatcatccctttctttctgtatatgatatatgcatttaattgcaatgatgtactgttgctatttccgtacacagttgattcaggtggttgattatatggtggttcagagagctcgaggtgaatcacagagtacatatagatctctccactccagtcactatgttgggaatcctcagcctttggaggaatcatgagtgcatacttcagtggttctccagtcacttatggcgtaagatttgtctttggtgttacagcacttttgccactgttccgagtagcagagaaggacaactctggcaaactgtgaagaaaataaaagattttcacaagcggaatcttcagaatctgaataaaggagttcgtgggaatcagttgtaccaaaaactggttcagttttcgtattccaagcatactactggaagttcacactgatcggcgacaaactctcgcccaaggagaagttgaaggaggatcagcgtgaacacccactgaaagagagatggagttgaatgagaaatctgaaaagaatacgcaagaggtagatgagaagttccaaaacacaaacttgtatctcaagaacttagagatggagcttcgggagttacaagtgcttcataagcaatcagatagatctgaaagttttactgtgccaacacatgcacacactggtggtgcctgcatctagctattcagatcaaagcctgacaggtaccatagggcaaagtgaagaagaaacagaagagttgagcaagatcacgctagagaataaggatattcagcttgatatcaatataagagtgtttgatggagccgaccctatggagctgcatgtttatgattttaaaggacctggtgtaaccttatcaatgtacaatagcgatgagtttattaggccttttgctaagtcctccatggatatggctctttcaaaaaagtcgtctcttcatctcagcaccaagaatacaatcatcaagaagtatgacgacaggcatggatcatctatgtttctacaagctcgcggtcacatttattaggccttttgctaagttcatggatatggctctttcaaaaaagtcgtctcttcatctcagcaccaagaatacaatcatcaagaagtatgacgacatgcatggatcatctatgtttctacaagctcgcgcgaagcgatggcgatggtgggttttgatgttcaggacagaatcaatggccgcaccttcattgtttaaaaaggcgcggcctagggcgtcgcctaggcgacgcctaggcgtccaggcgtcaattgttgctaggcgtccgcgccgcccagggaagatcgagtatggcgtccgcctaggcgcggtaggcgtccgcctaggcgtggtaggcgtctgggcgacgcctttctccccctgggcgacg

SEQ ID NO: 66284 - DNA, 4798 bp, Zea Mays
atggcctcacccacggtcgcctccccgatccgggcgagccccgtcgacaaccccaccgtcgcgccctcactggcctcctgccgctgcgccttatcgctagatgctcgacatccccatccgcgcgctcgaggcagaggccagggacaccaagatgagcccgaccgcgaccgcctagccatcagctccaaagaagaagccaggggaccgatggacgtcagtgttccgtcgtggtggcccgctagatccatattcagcaagaaagatatctcgccatgccggcccagggccgcagcccgtcaccttcctccccccgcacccgccgtgacagccgcctccccacgcccgcttacccgactggccgcacaagatgcccacagtggcccccatcgcgcccacccgctccccccatccaccgcgacctcagccgccacgccgacgccatccccgtcctctagcgcgttgtcgccgtcgtcacaccgccaaaggtgcctgccccctgctaccgaggtcgacgaccagcagcggcaagctgccgagctcgacgacacgcacgccatgcttggccatatggacgagtccatcgcctgctacgagaaggggctccagatccagatgtccgcgctcgatgagcgcaatccctgcctccctgagacctgcaggtaggtgacaatgtcatcaagggcccctccccctttgtcgcttctcgatctagatctcgcctctccctaaagcacgggttgcacctccccccgtcacccactccttccttggcttctcccgggaaacgaccttcagtctttacaggtatgaggtcttattgtgtgccatcattttcttttgctattcattcccgaatccccactgtgccctccagtgatgatggggtatgagctctgaataacaaacaaggtaaatgtttactcttttgagtagctgaattttgctatgatgtagtaaattatactagtaaattatacttgtactgaatatgaatataagaaaaaaatactgcactaattatttttctacgctctatattgtaaaataataggaatataataaaaagctgacataaaagctaatttacaacatccctttattttactatgttttatgataaataccttgattttccttgtaagttgtatcttttagtgattttcaaagaaactcctatttgcttggtgctttttctgtaagcatatgttgattaaatctttgtgtattctttctgtacactaatttaacttatcattattctgtcatccagtatgttgtcttatttgaatggttcatttccttctttaggtgattgacaaggtttaggaggaaacttccaaaagccggtcaagtatggagtgcttaacatcactttggcaacttatatttttttacatgtttgctttgtttgttaacaacataatttatgggctgacaatgtgatcatgtattctttctggtagtcttcgtgtcactgcttgcagttgcaggggagggatcatggctttcttttattttccatgtgcaatgtttaatttaggtgatgaactccaaagcttatcccattgttttctagcaagagctaagcaatactggatggagaacatttatctttttaataacgagtaaaagcataatggcatgcttgtgtttagttctctgtttgttgaccaatcgctatatttaatcttgattttttttatctataacttgaatttcaaagattcaatattttttattcagacattttctcttctctagatattcttttatgcaaataacgcggttacactagatcagccaacattctgggaaataagctatatggtcagagtaagaggttcaagagttgatagttcaacaactttaactgagagcaaatctacaagaaaaaggaaacaagcaacctggaacctacaactgcaggagcttgcttgaaagtgaacaatcaaggttgtgtgtatatattatgcccgacatttttgaaggatattgcgagggccattgtatctgctggaaaaatcatttcaacttgtcgaacatggtattaggatacgaattggagtggtcaacagaaattctggacagatatgtcaaatttcagaatccacgatggtcctccaagaaataaagatgctcttgatcatctattgagaagtggaatactaattttttgctgcagcgtgatggataaaggtttttgcgtattcttgggtttttttcctttcctttttggctacacacaactctttttaaatatacattcagtaggtggcaatgcctcctatttccctaaaaatatagcgccaaagagttcaaaattgaattctcataatctgctattaggaaaagaggtcaacttctatattttttacatcaggtaatttggctataatacaacggcatgctgaggtcaacttctgtatttttttctgcaagtaacttggctataatacagcggcatgctccattctgaagctggtcaagaaataaatatagcacttgcaatattttccagtagtcaaacctctccattacttcaattctcgttctcatttttgactatgttcttcatgtcagttcaacataataattaagaggtcgcttgcccctgagacggcttcatgatccatcgaagatggcgcttaatctcgagagctagggagatgaaatgccttttgtacatgatggaaggaaacaaattacgtacatgtatatgtggatcgaattgactgttgcattctgcctgtatttaagcaacggtttccacccaaaacgtctataatttggtccttcctagatgtgtcaaatgtgtttactgcactgcgtttgcttttgtggcagcgccctaatagttgtttataaagtctgatgttaacaaactattgtcatgctatgtaatatatagtcttaacatgttggtttgttgagtgttcgaatatcagttttatattattatgtcaggtgttattagtgttcaattttttaagttcttgttgtacatcctatcattacatgagacaatgttgtgatgtttacaatattgtgttatgtatgttatatcattttggtattatagtataatttaatttgtatcagtttagttctgtattggttgttgccaaaaaaaattatgagatattaaggtcgataataatgttcgtttttatataatcgttttgcactaatattttgttaatttttttgtataccgttgcaacgcacgggcacctaactagtatgagactatgagtacatcaagtgcattcccttagaactcttgttgtgtaaaaaaatgtgtaacatgtcttggtacagagattaatttggtttgtgttttttagactgcaattatatctgggttctcagccttgccatggttagtcaagcccctctatgattttatcagttgattcaggtggttgattatatggtggttcagagagctcgaggtgaatcacagagtacatatagatctctccactccagtcactatgttgggaatcctcagcctttggaggaatcatgagtgcatacttcagtggttctccagtcacttatggcgtaagatttgtctttggtgttacagcacttttgccactgttccgagtagcagagaaggacaactctggcaaactgtgaagaaaataaaagattttcacaagcggaatcttcagaatctgaataaaggagttcgtgggaatcagttgtaccaaaaactggttcagttttcgtattccaagcatactactggaagttcacactgatcggcgacaaactctcgcccaaggagaagttgaaggaggatcagcgtgaacacccactgaaagagagatggagttgaatgagaaatctgaaaagaatacgcaagaggtagatgagaagttccaaaacacaaacttgtatctcaagaacttagagatggagcttcgggagttacaagtgcttcataagcaatcagatagatctgaaagttttactgtgccaacacatgcacacactggtggtgcctgcatctagctattcagatcaaagcctgacaggtaccatagggcaaagtgaagaagaaacagaagagttgagcaagatcacgctagagaataaggatattcagcttgatatcaatataagagaagaatcttggagctcttcacaacaagtgaacttttacacagaaagtaccagctccagtgaggcttgtttgatggagccgaccctatggagctgcatgtttatgattttaaaggacctggtgtaaccttatcaatgtacaatagcgatgagtttattaggccttttgctaagtcctccatggatatggctctttcaaaaaagtcgtctcttcatctcagcaccaagaatacaatcatcaagaagtatgacgacaggcatggatcatctatgtttctacaagctcgcggtcacatttattaggccttttgctaagttcatggatatggctctttcaaaaaagtcgtctcttcatctcagcaccaagaatacaatcatcaagaagtatgacgacatgcatggatcatctatgtttctacaagctcgcgcgaagcgatggcgatggtgggttttgatgttcaggacagaatcaatggccgcaccttcattgtttaaaaaggcgcggcctagggcgtcgcctaggcgacgcctaggcgtccaggcgtcaattgttgctaggcgtccgcgccgcccagggaagatcgagtatggcgtccgcctaggcgcggtaggcgtccgcctaggcgtggtaggcgtctgggcgacgcctttctccccctgggcgacg

SEQ ID NO: 66285 - DNA, 4790 bp, Zea Mays
atggcctcacccacggtcgcctccccgatccgggcgagccccgtcgacaaccccaccgtcgcgccctcactggcctcctgccgctgcgccttatcgctagatgctcgacatccccatccgcgcgctcgaggcagaggccagggacaccaagatgagcccgaccgcgaccgcctagccatcagctccaaagaagaagccaggggaccgatggacgtcagtgttccgtcgtggtggcccgctagatccatattcagcaagaaagatatctcgccatgccggcccagggccgcagcccgtcaccttcctccccccgcacccgccgtgacagccgcctccccacgcccgcttacccgactggccgcacaagatgcccacagtggcccccatcgcgcccacccgctccccccatccaccgcgacctcagccgccacgccgacgccatccccgtcctctagcgcgttgtcgccgtcgtcacaccgccaaaggtgcctgccccctgctaccgaggtcgacgaccagcagcggcaagctgccgagctcgacgacacgcacgccatgcttggccatatggacgagtccatcgcctgctacgagaaggggctccagatccagatgtccgcgctcgatgagcgcaatccctgcctccctgagacctgcaggtaggtgacaatgtcatcaagggcccctccccctttgtcgcttctcgatctagatctcgcctctccctaaagcacgggttgcacctccccccgtcacccactccttccttggcttctcccgggaaacgaccttcagtctttacaggtatgaggtcttattgtgtgccatcattttcttttgctattcattcccgaatccccactgtgccctccagtgatgatggggtatgagctctgaataacaaacaaggtaaatgtttactcttttgagtagctgaattttgctatgatgtagtaaattatactagtaaattatacttgtactgaatatgaatataagaaaaaaatactgcactaattatttttctacgctctatattgtaaaataataggaatataataaaaagctgacataaaagctaatttacaacatccctttattttactatgttttatgataaataccttgattttccttgtaagttgtatcttttagtgattttcaaagaaactcctatttgcttggtgctttttctgtaagcatatgttgattaaatctttgtgtattctttctgtacactaatttaacttatcattattctgtcatccagtatgttgtcttatttgaatggttcatttccttctttaggtgattgacaaggtttaggaggaaacttccaaaagccggtcaagtatggagtgcttaacatcactttggcaacttatatttttttacatgtttgctttgtttgttaacaacataatttatgggctgacaatgtgatcatgtattctttctggtagtcttcgtgtcactgcttgcagttgcaggggagggatcatggctttcttttattttccatgtgcaatgtttaatttaggtgatgaactccaaagcttatcccattgttttctagcaagagctaagcaatactggatggagaacatttatctttttaataacgagtaaaagcataatggcatgcttgtgtttagttctctgtttgttgaccaatcgctatatttaatcttgattttttttatctataacttgaatttcaaagattcaatattttttattcagacattttctcttctctagatattcttttatgcaaataacgcggttacactagatcagccaacattctgggaaataagctatatggtcagagtaagaggttcaagagttgatagttcaacaactttaactgagagcaaatctacaagaaaaaggaaacaagcaacctggaacctacaactgcaggagcttgcttgaaagtgaacaatcaaggttgtgtgtatatattatgcccgacatttttgaaggatattgcgagggccattgtatctgctggaaaaatcatttcaacttgtcgaacatggtattaggatacgaattggagtggtcaacagaaattctggacagatatgtcaaatttcagaatccacgatggtcctccaagaaataaagatgctcttgatcatctattgagaagtggaatactaattttttgctgcagcgtgatggataaaggtttttgcgtattcttgggtttttttcctttcctttttggctacacacaactctttttaaatatacattcagtaggtggcaatgcctcctatttccctaaaaatatagcgccaaagagttcaaaattgaattctcataatctgctattaggaaaagaggtcaacttctatattttttacatcaggtaatttggctataatacaacggcatgctgaggtcaacttctgtatttttttctgcaagtaacttggctataatacagcggcatgctccattctgaagctggtcaagaaataaatatagcacttgcaatattttccagtagtcaaacctctccattacttcaattctcgttctcatttttgactatgttcttcatgtcagttcaacataataattaagaggtcgcttgcccctgagacggcttcatgatccatcgaagatggcgcttaatctcgagagctagggagatgaaatgccttttgtacatgatggaaggaaacaaattacgtacatgtatatgtggatcgaattgactgttgcattctgcctgtatttaagcaacggtttccacccaaaacgtctataatttggtccttcctagatgtgtcaaatgtgtttactgcactgcgtttgcttttgtggcagcgccctaatagttgtttataaagtctgatgttaacaaactattgtcatgctatgtaatatatagtcttaacatgttggtttgttgagtgttcgaatatcagttttatattattatgtcaggtgttattagtgttcaattttttaagttcttgttgtacatcctatcattacatgagacaatgttgtgatgtttacaatattgtgttatgtatgttatatcattttggtattatagtataatttaatttgtatcagtttagttctgtattggttgttgccaaaaaaaattatgagatattaaggtcgataataatgttcgtttttatataatcgttttgcactaatattttgttaatttttttgtataccgttgcaacgcacgggcacctaactagtatgagactatgagtacatcaagtgcattcccttagaactcttgttgtgtaaaaaaatgtgtaacatgtcttggtacagagattaatttggtttgtgttttttagactgcaattatatctgggttctcagccttgccatggttagtcaagcccctctatgattttatcagttgattcaggtggttgattatatggtggttcagagagctcgaggtgaatcacagagtacatatagatctctccactccagtcactatgttgggaatcctcagcctttggaggaatcatgagtgcatacttcagtggttctccagtcacttatggcgtaagatttgtctttggtgttacagcacttttgccactgttccgagtagcagagaaggacaactctggcaaactgtgaagaaaataaaagattttcacaagcggaatcttcagaatctgaataaaggagttcgtgggaatcagttgtaccaaaaactggttcagttttcgtattccaagcatactactggaagttcacactgatcggcgacaaactctcgcccaaggagaagttgaaggaggatcagcgtgaacacccactgaaagagagatggagttgaatgagaaatctgaaaagaatacgcaagaggtagatgagaagttccaaaacacaaacttgtatctcaagaacttagagatggagcttcgggagttacaagtgcttcataagcaatcagatagatctgaaagttttactgtgccaacacatgcacacactggtggtgcctgcatctagctattcagatcaaagcctgacaggtaccatagggcaaagtgaagaagaaacagaagagttgagcaagatcacgctagagaataaggatattcagcttgatatcaatataagagaagaatcttggagctcttcacaacaagtgaacttttacacagaaagtaccagctccagtgaggcttgtttgatggagccgaccctatggagctgcatgtttatgattttaaaggacctggtgtaaccttatcaatgtacaatagcgatgaggccttttgctaagtcctccatggatatggctctttcaaaaaagtcgtctcttcatctcagcaccaagaatacaatcatcaagaagtatgacgacaggcatggatcatctatgtttctacaagctcgcggtcacatttattaggccttttgctaagttcatggatatggctctttcaaaaaagtcgtctcttcatctcagcaccaagaatacaatcatcaagaagtatgacgacatgcatggatcatctatgtttctacaagctcgcgcgaagcgatggcgatggtgggttttgatgttcaggacagaatcaatggccgcaccttcattgtttaaaaaggcgcggcctagggcgtcgcctaggcgacgcctaggcgtccaggcgtcaattgttgctaggcgtccgcgccgcccagggaagatcgagtatggcgtccgcctaggcgcggtaggcgtccgcctaggcgtggtaggcgtctgggcgacgcctttctccccctgggcgacg

SEQ ID NO: 66286 - DNA, 4101 bp, Zea Mays
atggcctcacccacggtcgcctccccgatccgggcgagccccgtcgacaaccccaccgtcgcgccctcactggcctcctgccgctgcgccttatcgctagatgctcgacatccccatccgcgcgctcgaggcagaggccagggacaccaagatgagcccgaccgcgaccgcctagccatcagctccaaagaagaagccaggggaccgatggacgtcagtgttccgtcgtggtggcccgctagatccatattcagcaagaaagatatctcgccatgccggcccagggccgcagcccgtcaccttcctccccccgcacccgccgtgacagccgcctccccacgcccgcttacccgactggccgcacaagatgcccacagtggcccccatcgcgcccacccgctccccccatccaccgcgacctcagccgccacgccgacgccatccccgtcctctagcgcgttgtcgccgtcgtcacaccgccaaaggtgcctgccccctgctaccgaggtcgacgaccagcagcggcaagctgccgagctcgacgacacgcacgccatgcttggccatatggacgagtccatcgcctgctacgagaaggggctccagatccagatgtccgcgctcgatgagcgcaatccctgcctccctgagacctgcaggtaggtgacaatgtcatcaagggcccctccccctttgtcgcttctcgatctagatctcgcctctccctaaagcacgggttgcacctccccccgtcacccactccttccttggcttctcccgggaaacgaccttcagtctttacaggtatgaggtcttattgtgtgccatcattttcttttgctattcattcccgaatccccactgtgccctccagtgatgatggggtatgagctctgaataacaaacaaggtaaatgtttactcttttgagtagctgaattttgctatgatgtagtaaattatactagtaaattatacttgtactgaatatgaatataagaaaaaaatactgcactaattatttttctacgctctatattgtaaaataataggaatataataaaaagctgacataaaagctaatttacaacatccctttattttactatgttttatgataaataccttgattttccttgtaagttgtatcttttagtgattttcaaagaaactcctatttgcttggtgctttttctgtaagcatatgttgattaaatctttgtgtattctttctgtacactaatttaacttatcattattctgtcatccagtatgttgtcttatttgaatggttcatttccttctttaggtgattgacaaggtttaggaggaaacttccaaaagccggtcaagtatggagtgcttaacatcactttggcaacttatatttttttacatgtttgctttgtttgttaacaacataatttatgggctgacaatgtgatcatgtattctttctggtagtcttcgtgtcactgcttgcagttgcaggggagggatcatggctttcttttattttccatgtgcaatgtttaatttaggtgatgaactccaaagcttatcccattgttttctagcaagagctaagcaatactggatggagaacatttatctttttaataacgagtaaaagcataatggcatgcttgtgtttagttctctgtttgttgaccaatcgctatatttaatcttgattttttttatctataacttgaatttcaaagattcaatattttttattcagacattttctcttctctagatattcttttatgcaaataacgcggttacactagatcagccaacattctgggaaataagctatatggtcagagtaagaggttcaagagttgatagttcaacaactttaactgagagcaaatctacaagaaaaaggaaacaagcaacctggaacctacaactgcaggagcttgcttgaaagtgaacaatcaaggttgtgtgtatatattatgcccgacatttttgaaggatattgcgagggccattgtatctgctggaaaaatcatttcaacttgtcgaacatggtattaggatacgaattggagtggtcaacagaaattctggacagatatgtcaaatttcagaatccacgatggtcctccaagaaataaagatgctcttgatcatctattgagaagtggaatactaattttttgctgcagcgtgatggataaaggtttttgcgtattcttgggtttttttcctttcctttttggctacacacaactctttttaaatatacattcagtaggtggcaatgcctcctatttccctaaaaatatagcgccaaagagttcaaaattgaattctcataatctgctattaggaaaagaggtcaacttctatattttttacatcaggtaatttggctataatacaacggcatgctgaggtcaacttctgtatttttttctgcaagtaacttggctataatacagcggcatgctccattctgaagctggtcaagaaataaatatagcacttgcaatattttccagtagtcaaacctctccattacttcaattctcgttctcatttttgactatgttcttcatgtcagttcaacataataattaagaggtcgcttgcccctgagacggcttcatgatccatcgaagatggcgcttaatctcgagagctagggagatgaaatgccttttgtacatgatggaaggaaacaaattacgtacatactgcaattatatctgggttctcagccttgccatggttagtcaagcccctctatgattttatcagttgattcaggtggttgattatatggtggttcagagagctcgaggtgaatcacagagtacatatagatctctccactccagtcactatgttgggaatcctcagcctttggaggaatcatgagtgcatacttcagtggttctccagtcacttatggcgtaagatttgtctttggtgttacagcacttttgccactgttccgagtagcagagaaggacaactctggcaaactgtgaagaaaataaaagattttcacaagcggaatcttcagaatctgaataaaggagttcgtgggaatcagttgtaccaaaaactggttcagttttcgtattccaagcatactactggaagttcacactgatcggcgacaaactctcgcccaaggagaagttgaaggaggatcagcgtgaacacccactgaaagagagatggagttgaatgagaaatctgaaaagaatacgcaagaggtagatgagaagttccaaaacacaaacttgtatctcaagaacttagagatggagcttcgggagttacaagtgcttcataagcaatcagatagatctgaaagttttactgtgccaacacatgcacacactggtggtgcctgcatctagctattcagatcaaagcctgacaggtaccatagggcaaagtgaagaagaaacagaagagttgagcaagatcacgctagagaataaggatattcagcttgatatcaatataagagtgtttgatggagccgaccctatggagctgcatgtttatgattttaaaggacctggtgtaaccttatcaatgtacaatagcgatgagtttattaggccttttgctaagtcctccatggatatggctctttcaaaaaagtcgtctcttcatctcagcaccaagaatacaatcatcaagaagtatgacgacaggcatggatcatctatgtttctacaagctcgcggtcacatttattaggccttttgctaagttcatggatatggctctttcaaaaaagtcgtctcttcatctcagcaccaagaatacaatcatcaagaagtatgacgacatgcatggatcatctatgtttctacaagctcgcgcgaagcgatggcgatggtgggttttgatgttcaggacagaatcaatggccgcaccttcattgtttaaaaaggcgcggcctagggcgtcgcctaggcgacgcctaggcgtccaggcgtcaattgttgctaggcgtccgcgccgcccagggaagatcgagtatggcgtccgcctaggcgcggtaggcgtccgcctaggcgtggtaggcgtctgggcgacgcctttctccccctgggcgacg

SEQ ID NO: 66287 - DNA, 4733 bp, Zea Mays
atggcctcacccacggtcgcctccccgatccgggcgagccccgtcgacaaccccaccgtcgcgccctcactggcctcctgccgctgcgccttatcgctagatgctcgacatccccatccgcgcgctcgaggcagaggccagggacaccaagatgagcccgaccgcgaccgcctagccatcagctccaaagaagaagccaggggaccgatggacgtcagtgttccgtcgtggtggcccgctagatccatattcagcaagaaagatatctcgccatgccggcccagggccgcagcccgtcaccttcctccccccgcacccgccgtgacagccgcctccccacgcccgcttacccgactggccgcacaagatgcccacagtggcccccatcgcgcccacccgctccccccatccaccgcgacctcagccgccacgccgacgccatccccgtcctctagcgcgttgtcgccgtcgtcacaccgccaaaggtgcctgccccctgctaccgaggtcgacgaccagcagcggcaagctgccgagctcgacgacacgcacgccatgcttggccatatggacgagtccatcgcctgctacgagaaggggctccagatccagatgtccgcgctcgatgagcgcaatccctgcctccctgagacctgcaggtaggtgacaatgtcatcaagggcccctccccctttgtcgcttctcgatctagatctcgcctctccctaaagcacgggttgcacctccccccgtcacccactccttccttggcttctcccgggaaacgaccttcagtctttacaggtatgaggtcttattgtgtgccatcattttcttttgctattcattcccgaatccccactgtgccctccagtgatgatggggtatgagctctgaataacaaacaaggtaaatgtttactcttttgagtagctgaattttgctatgatgtagtaaattatactagtaaattatacttgtactgaatatgaatataagaaaaaaatactgcactaattatttttctacgctctatattgtaaaataataggaatataataaaaagctgacataaaagctaatttacaacatccctttattttactatgttttatgataaataccttgattttccttgtaagttgtatcttttagtgattttcaaagaaactcctatttgcttggtgctttttctgtaagcatatgttgattaaatctttgtgtattctttctgtacactaatttaacttatcattattctgtcatccagtatgttgtcttatttgaatggttcatttccttctttaggtgattgacaaggtttaggaggaaacttccaaaagccggtcaagtatggagtgcttaacatcactttggcaacttatatttttttacatgtttgctttgtttgttaacaacataatttatgggctgacaatgtgatcatgtattctttctggtagtcttcgtgtcactgcttgcagttgcaggggagggatcatggctttcttttattttccatgtgcaatgtttaatttaggtgatgaactccaaagcttatcccattgttttctagcaagagctaagcaatactggatggagaacatttatctttttaataacgagtaaaagcataatggcatgcttgtgtttagttctctgtttgttgaccaatcgctatatttaatcttgattttttttatctataacttgaatttcaaagattcaatattttttattcagacattttctcttctctagatattcttttatgcaaataacgcggttacactagatcagccaacattctgggaaataagctatatggtcagagtaagaggttcaagagttgatagttcaacaactttaactgagagcaaatctacaagaaaaaggaaacaagcaacctggaacctacaactgcaggagcttgcttgaaagtgaacaatcaaggttgtgtgtatatattatgcccgacatttttgaaggatattgcgagggccattgtatctgctggaaaaatcatttcaacttgtcgaacatggtattaggatacgaattggagtggtcaacagaaattctggacagatatgtcaaatttcagaatccacgatggtcctccaagaaataaagatgctcttgatcatctattgagaagtggaatactaattttttgctgcagcgtgatggataaaggtttttgcgtattcttgggtttttttcctttcctttttggctacacacaactctttttaaatatacattcagtaggtggcaatgcctcctatttccctaaaaatatagcgccaaagagttcaaaattgaattctcataatctgctattaggaaaagaggtcaacttctatattttttacatcaggtaatttggctataatacaacggcatgctgaggtcaacttctgtatttttttctgcaagtaacttggctataatacagcggcatgctccattctgaagctggtcaagaaataaatatagcacttgcaatattttccagtagtcaaacctctccattacttcaattctcgttctcatttttgactatgttcttcatgtcagttcaacataataattaagaggtcgcttgcccctgagacggcttcatgatccatcgaagatggcgcttaatctcgagagctagggagatgaaatgccttttgtacatgatggaaggaaacaaattacgtacatgtatatgtggatcgaattgactgttgcattctgcctgtatttaagcaacggtttccacccaaaacgtctataatttggtccttcctagatgtgtcaaatgtgtttactgcactgcgtttgcttttgtggcagcgccctaatagttgtttataaagtctgatgttaacaaactattgtcatgctatgtaatatatagtcttaacatgttggtttgttgagtgttcgaatatcagttttatattattatgtcaggtgttattagtgttcaattttttaagttcttgttgtacatcctatcattacatgagacaatgttgtgatgtttacaatattgtgttatgtatgttatatcattttggtattatagtataatttaatttgtatcagtttagttctgtattggttgttgccaaaaaaaattatgagatattaaggtcgataataatgttcgtttttatataatcgttttgcactaatattttgttaatttttttgtataccgttgcaacgcacgggcacctaactagtatgagactatgagtacatcaagtgcattcccttagaactcttgttgtgtaaaaaaatgtgtaacatgtcttggtacagagattaatttggtttgtgttttttagactgcaattatatctgggttctcagccttgccatggttagtcaagcccctctatgattttatcagttgattcaggtggttgattatatggtggttcagagagctcgaggtgaatcacagagtacatatagatctctccactccagtcactatgttgggaatcctcagcctttggaggaatcatgagtgcatacttcagtggttctccagtcacttatggcgtaagatttgtctttggtgttacagcacttttgccactgttccgagtagcagagaaggacaactctggcaaactgtgaagaaaataaaagattttcacaagcggaatcttcagaatctgaataaaggagttcgtgggaatcagttgtaccaaaaactggttcagttttcgtattccaagcatactactggaagttcacactgatcggcgacaaactctcgcccaaggagaagttgaaggaggatcagcgtgaacacccactgaaagagagatggagttgaatgagaaatctgaaaagaatacgcaagaggtagatgagaagttccaaaacacaaacttgtatctcaagaacttagagatggagcttcgggagttacaagtgcttcataagcaatcagatagatctgaaagttttactgtgccaacacatgcacacactggtggtgcctgcatctagctattcagatcaaagcctgacaggtaccatagggcaaagtgaagaagaaacagaagagttgagcaagatcacgctagagaataaggatattcagcttgatatcaatataagagtgtttgatggagccgaccctatggagctgcatgtttatgattttaaaggacctggtgtaaccttatcaatgtacaatagcgatgagtttattaggccttttgctaagtcctccatggatatggctctttcaaaaaagtcgtctcttcatctcagcaccaagaatacaatcatcaagaagtatgacgacaggcatggatcatctatgtttctacaagctcgcggtcacatttattaggccttttgctaagttcatggatatggctctttcaaaaaagtcgtctcttcatctcagcaccaagaatacaatcatcaagaagtatgacgacatgcatggatcatctatgtttctacaagctcgcgcgaagcgatggcgatggtgggttttgatgttcaggacagaatcaatggccgcaccttcattgtttaaaaaggcgcggcctagggcgtcgcctaggcgacgcctaggcgtccaggcgtcaattgttgctaggcgtccgcgccgcccagggaagatcgagtatggcgtccgcctaggcgcggtaggcgtccgcctaggcgtggtaggcgtctgggcgacgcctttctccccctgggcgacg

SEQ ID NO: 66288 - DNA, 6082 bp, Zea Mays
atggcctcacccacggtcgcctccccgatccgggcgagccccgtcgacaaccccaccgtcgcgccctcactggcctcctgccgctgcgccttatcgctagatgctcgacatccccatccgcgcgctcgaggcagaggccagggacaccaagatgagcccgaccgcgaccgcctagccatcagctccaaagaagaagccaggggaccgatggacgtcagtgttccgtcgtggtggcccgctagatccatattcagcaagaaagatatctcgccatgccggcccagggccgcagcccgtcaccttcctccccccgcacccgccgtgacagccgcctccccacgcccgcttacccgactggccgcacaagatgcccacagtggcccccatcgcgcccacccgctccccccatccaccgcgacctcagccgccacgccgacgccatccccgtcctctagcgcgttgtcgccgtcgtcacaccgccaaaggtgcctgccccctgctaccgaggtcgacgaccagcagcggcaagctgccgagctcgacgacacgcacgccatgcttggccatatggacgagtccatcgcctgctacgagaaggggctccagatccagatgtccgcgctcgatgagcgcaatccctgcctccctgagacctgcaggtaggtgacaatgtcatcaagggcccctccccctttgtcgcttctcgatctagatctcgcctctccctaaagcacgggttgcacctccccccgtcacccactccttccttggcttctcccgggaaacgaccttcagtctttacaggtatgaggtcttattgtgtgccatcattttcttttgctattcattcccgaatccccactgtgccctccagtgatgatggggtatgagctctgaataacaaacaaggtgattgacaaggtttaggaggaaacttccaaaagccggtcaagtatggagtgcttaacatcactttggcaacttatatttttttacatgtttgctttgtttgttaacaacataatttatgggctgacaatgtgatcatgtattctttctggtagtcttcgtgtcactgcttgcagttgcaggggagggatcatggctttcttttattttccatgtgcaatgtttaatttaggtgatgaactccaaagcttatcccattgttttctagcaagagctaagcaatactggatggagaacatttatctttttaataacgagtaaaagcataatggcatgcttgtgtttagttctctgtttgttgaccaatcgctatatttaatcttgattttttttatctataacttgaatttcaaagattcaatattttttattcagacattttctcttctctagatattcttttatgcaaataacgcggttacactagatcagccaacattctgggaaataagctatatggtcagagtaagaggttcaagagttgatagttcaacaactttaactgagagcaaatctacaagaaaaaggaaacaagcaacctggaacctacaactgcaggagcttgcttgaaagtgaacaatcaaggttgtgtgtatatattatgcccgacatttttgaaggatattgcgagggccattgtatctgctggaaaaatcatttcaacttgtcgaacatggtattaggatacgaattggagtggtcaacagaaattctggacagatatgtcaaatttcagaatccacgatggtcctccaagaaataaagatgctcttgatcatctattgagaagtggaatactaattttttgctgcagcgtgatggataaaggtttttgcgtattcttgggtttttttcctttcctttttggctacacacaactctttttaaatatacattcagtaggtggcaatgcctcctatttccctaaaaatatagcgccaaagagttcaaaattgaattctcataatctgctattaggaaaagaggtcaacttctatattttttacatcaggtaatttggctataatacaacggcatgctgaggtcaacttctgtatttttttctgcaagtaacttggctataatacagcggcatgctccattctgaagctggtcaagaaataaatatagcacttgcaatattttccagtagtcaaacctctccattacttcaattctcgttctcatttttgactatgttcttcatgtcagttcaacataataattaagaggtcgcttgcccctgagacggcttcatggtattttatttgttttttacaaagtattttttaagcgctaaacttacagtgcactttctctattcgttttggtgctgcttataagtcttttgtgttttagatccatcgaagatggcgcttaatctcgagagctagggagatgaaatgccttttgtacatgatggaaggaaacaaattacgtacatgtatatgtggatcgaattgactgttgcattctgcctgtatttaagcaacggtttccacccaaaacgtctataatttggtccttcctagatgtgtcaaatgtgtttactgcactgcgtttgcttttgtggcagcgccctaatagttgtttataaagtctgatgttaacaaactattgtcatgctatgtaatatatagtcttaacatgttggtttgttgagtgttcgaatatcagttttatattattatgtcaggtgttattagtgttcaattttttaagttcttgttgtacatcctatcattacatgagacaatgttgtgatgtttacaatattgtgttatgtatgttatatcattttggtattatagtataatttaatttgtatcagtttagttctgtattggttgttgccaaaaaaaattatgagatattaaggtcgataataatgttcgtttttatataatcgttttgcactaatattttgttaatttttttgtataccgttgcaacgcacgggcacctaactagtatgagactatgagtacatcaagtgcattcccttagaactcttgttgtgtaaaaaaatgtgtaacatgtcttggtacagagattaatttggtttgtgttttttagactgcaattatatctgggttctcagccttgccatggttagtcaagcccctctatgattttatcagttgattcaggtggttgattatatggtggttcagagagctcgaggtgaatcacagagtacatatagatctctccactccagtcactatgttgggaatcctcagcctttggaggaatcatgagtgcatacttcagtggttctccagtcacttatggcgtaagatttgtctttggtgttacagcacttttgccactgttccgagtagcagagaaggacaactctggcaaactgtgaagaaaataaaagattttcacaagcggaatcttcagaatctgaataaaggagttcgtgggaatcagttgtaccaaaaactggttcagttttcgtattccaagcatactactggaagttcacactgatcggcgacaaactctcgcccaaggagaagttgaaggaggatcagcgtgaacacccactgaaagagagatggagttgaatgagaaatctgaaaagaatacgcaagaggtagatgagaagttccaaaacacaaacttgtatctcaagaacttagagatggagcttcgggagttacaagtgcttcataagcaatcagatagatctgaaagttttactgtgccaacacatgcacacactggtggtgcctgcatctagctattcagatcaaagcctgacaggtaccatagggcaaagtgaagaagaaacagaagagttgagcaagatcacgctagagaataaggatattcagcttgatatcaatataagagaagaatcttggagctcttcacaacaagtgaacttttacacagaaagtaccagctccagtgaggcttgtttgatggagccgaccctatggagctgcatgtttatgattttaaaggacctggtgtaaccttatcaatgtacaatagcgatgagtttattaggccttttgctaagtcctccatggatatggctctttcaaaaaagtcgtctcttcatctcagcaccaagaatacaatcatcaagaagtatgacgacaggcatggatcatctatgtttctacaagctcgcggtcacatttattaggccttttgctaagttcatggatatggctctttcaaaaaagtcgtctcttcatctcagcaccaagaatacaatcatcaagaagtatgacgacatgcatggatcatctatgtttctacaagctcgcgttacaatggaatgctaagagacaaatagttaaagaactgctttaacctaccttgatggagaggggagaatgcatcgtgttagcaagggagcaccagagcaggtgatcaacttgctattgggaaagaaactgcacgtcgtttgggaatgggtactaatatgtacccttcctctgctttactcagacagaataaggatgagtcaattgcttccttgccaattgatgaattgatcgagaaggctgatggctttgctggtgtctttccagaacacaagtatgagatcgtgaaaggcttgcaagcaagaaaacatatatgtggcatgactggggatggtgtaaatgatgccccagctttgaagaaggctgatattggtattgcagtagcagactctactgatgcaactcgtagtgcttctgacattgtcctaactgaacctggccttagtgtgattattagtgctgtgctgacgagtcgggcaattttccaaaggatgaagaattacacgatctatgctgtatcgattaccatccgtattgtgcttggttttatgcttcttgcgctgatatggaagtttgacttcccaccatttatggtcctgatcattgccatcctcaatgacggtaccattatgactatctcgaaggacagagtaaaaccatctccacaaccagacagttggaagttagctgagatttttgcaactggagtagttcttggtggttatttggccatgatgactgtcattttcttctgggctgcatacaagactgactttttcccgcggctgttccacgtcgaaagcctcgagaagaccgcccaggatgactttcagaagttcgcctctgccgtgtaccttcaagtcagcacggtcagtcaggcccttatcttcgtgacacggtcgcgcagctggtcgtttgtggagcgtcctgggttcttgctggtcttcgctttcttggtggctaagctgattgccactctgatcgctgtatatgccaactgggcgttcactgcgatcaagggcattggatggggctgggccggtgtcatctggctctataacatcgtcttctacttcccgctggacatcatcaagttcctcatccgctatgcgctgagtgggagggcatggaacctcgtccttgagcagaggattgcgttcacgagcaagaagaatttcggcacggaagaaagggagcgcaagtgggcgcatgcgcagaggactctccatgggctccagccgccagaagcatccatcttcgagaacaagacgacattcaatgagctgaaccagctcgcggaagaggcccgcaggagagccgagatggcgaggttgcgagaagtgagcaccctgaaggggaggatggagtcagtggtgaagcagaagggtctggacatctagaccatccagcagtcctacactgtgtgactgactgactgacgacgacggggtttatagaggtttcttcttatactatacaatctgtactaggtagcaataaggatcaaggaaggaacccctatatattggctgcggttcgcaggaaatgaatgatggtaatatttatgatgtcggtgtggtgcttctgtcgccaactctcgaccatactaccctcaactcacccccggcaccaccggcaggcattgatattcagagatgaggtatagtagtctgtagcctctagtagatgctgatgaattgatgatatagtacatttttgcttgctttcttgcttgtttgttgttttccttggttctgctctgggtgttttgatgcttgctggctttgtgctattcctgattcctctaaatctgaagtggtagc

SEQ ID NO: 66289 - DNA, 5872 bp, Zea Mays
atggcctcacccacggtcgcctccccgatccgggcgagccccgtcgacaaccccaccgtcgcgccctcactggcctcctgccgctgcgccttatcgctagatgctcgacatccccatccgcgcgctcgaggcagaggccagggacaccaagatgagcccgaccgcgaccgcctagccatcagctccaaagaagaagccaggggaccgatggacgtcagtgttccgtcgtggtggcccgctagatccatattcagcaagaaagatatctcgccatgccggcccagggccgcagcccgtcaccttcctccccccgcacccgccgtgacagccgcctccccacgcccgcttacccgactggccgcacaagatgcccacagtggcccccatcgcgcccacccgctccccccatccaccgcgacctcagccgccacgccgacgccatccccgtcctctagcgcgttgtcgccgtcgtcacaccgccaaaggtgcctgccccctgctaccgaggtcgacgaccagcagcggcaagctgccgagctcgacgacacgcacgccatgcttggccatatggacgagtccatcgcctgctacgagaaggggctccagatccagatgtccgcgctcgatgagcgcaatccctgcctccctgagacctgcaggtgattgacaaggtttaggaggaaacttccaaaagccggtcaagtatggagtgcttaacatcactttggcaacttatatttttttacatgtttgctttgtttgttaacaacataatttatgggctgacaatgtgatcatgtattctttctggtagtcttcgtgtcactgcttgcagttgcaggggagggatcatggctttcttttattttccatgtgcaatgtttaatttaggtgatgaactccaaagcttatcccattgttttctagcaagagctaagcaatactggatggagaacatttatctttttaataacgagtaaaagcataatggcatgcttgtgtttagttctctgtttgttgaccaatcgctatatttaatcttgattttttttatctataacttgaatttcaaagattcaatattttttattcagacattttctcttctctagatattcttttatgcaaataacgcggttacactagatcagccaacattctgggaaataagctatatggtcagagtaagaggttcaagagttgatagttcaacaactttaactgagagcaaatctacaagaaaaaggaaacaagcaacctggaacctacaactgcaggagcttgcttgaaagtgaacaatcaaggttgtgtgtatatattatgcccgacatttttgaaggatattgcgagggccattgtatctgctggaaaaatcatttcaacttgtcgaacatggtattaggatacgaattggagtggtcaacagaaattctggacagatatgtcaaatttcagaatccacgatggtcctccaagaaataaagatgctcttgatcatctattgagaagtggaatactaattttttgctgcagcgtgatggataaaggtttttgcgtattcttgggtttttttcctttcctttttggctacacacaactctttttaaatatacattcagtaggtggcaatgcctcctatttccctaaaaatatagcgccaaagagttcaaaattgaattctcataatctgctattaggaaaagaggtcaacttctatattttttacatcaggtaatttggctataatacaacggcatgctgaggtcaacttctgtatttttttctgcaagtaacttggctataatacagcggcatgctccattctgaagctggtcaagaaataaatatagcacttgcaatattttccagtagtcaaacctctccattacttcaattctcgttctcatttttgactatgttcttcatgtcagttcaacataataattaagaggtcgcttgcccctgagacggcttcatggtattttatttgttttttacaaagtattttttaagcgctaaacttacagtgcactttctctattcgttttggtgctgcttataagtcttttgtgttttagatccatcgaagatggcgcttaatctcgagagctagggagatgaaatgccttttgtacatgatggaaggaaacaaattacgtacatgtatatgtggatcgaattgactgttgcattctgcctgtatttaagcaacggtttccacccaaaacgtctataatttggtccttcctagatgtgtcaaatgtgtttactgcactgcgtttgcttttgtggcagcgccctaatagttgtttataaagtctgatgttaacaaactattgtcatgctatgtaatatatagtcttaacatgttggtttgttgagtgttcgaatatcagttttatattattatgtcaggtgttattagtgttcaattttttaagttcttgttgtacatcctatcattacatgagacaatgttgtgatgtttacaatattgtgttatgtatgttatatcattttggtattatagtataatttaatttgtatcagtttagttctgtattggttgttgccaaaaaaaattatgagatattaaggtcgataataatgttcgtttttatataatcgttttgcactaatattttgttaatttttttgtataccgttgcaacgcacgggcacctaactagtatgagactatgagtacatcaagtgcattcccttagaactcttgttgtgtaaaaaaatgtgtaacatgtcttggtacagagattaatttggtttgtgttttttagactgcaattatatctgggttctcagccttgccatggttagtcaagcccctctatgattttatcagttgattcaggtggttgattatatggtggttcagagagctcgaggtgaatcacagagtacatatagatctctccactccagtcactatgttgggaatcctcagcctttggaggaatcatgagtgcatacttcagtggttctccagtcacttatggcgtaagatttgtctttggtgttacagcacttttgccactgttccgagtagcagagaaggacaactctggcaaactgtgaagaaaataaaagattttcacaagcggaatcttcagaatctgaataaaggagttcgtgggaatcagttgtaccaaaaactggttcagttttcgtattccaagcatactactggaagttcacactgatcggcgacaaactctcgcccaaggagaagttgaaggaggatcagcgtgaacacccactgaaagagagatggagttgaatgagaaatctgaaaagaatacgcaagaggtagatgagaagttccaaaacacaaacttgtatctcaagaacttagagatggagcttcgggagttacaagtgcttcataagcaatcagatagatctgaaagttttactgtgccaacacatgcacacactggtggtgcctgcatctagctattcagatcaaagcctgacaggtaccatagggcaaagtgaagaagaaacagaagagttgagcaagatcacgctagagaataaggatattcagcttgatatcaatataagagtgtttgatggagccgaccctatggagctgcatgtttatgattttaaaggacctggtgtaaccttatcaatgtacaatagcgatgagtttattaggccttttgctaagtcctccatggatatggctctttcaaaaaagtcgtctcttcatctcagcaccaagaatacaatcatcaagaagtatgacgacaggcatggatcatctatgtttctacaagctcgcggtcacatttattaggccttttgctaagttcatggatatggctctttcaaaaaagtcgtctcttcatctcagcaccaagaatacaatcatcaagaagtatgacgacatgcatggatcatctatgtttctacaagctcgcgttacaatggaatgctaagagacaaatagttaaagaactgctttaacctaccttgatggagaggggagaatgcatcgtgttagcaagggagcaccagagcagatccttcatcttgcccacaacaagtcagatattgaaagaagggtcagagctgtgattgacaaatttgctgagcgtggtctgtgagcacttggtgtggcttaccaggtgatcaacttgctattgggaaagaaactgcacgtcgtttgggaatgggtactaatatgtacccttcctctgctttactcagacagaataaggatgagtcaattgcttccttgccaattgatgaattgatcgagaaggctgatggctttgctggtgtctttccagaacacaagtatgagatcgtgaaaggcttgcaagcaagaaaacatatatgtggcatgactggggatggtgtaaatgatgccccagctttgaagaaggctgatattggtattgcagtagcagactctactgatgcaactcgtagtgcttctgacattgtcctaactgaacctggccttagtgtgattattagtgctgtgctgacgagtcgggcaattttccaaaggatgaagaattacacgatctatgctgtatcgattaccatccgtattgtgcttggttttatgcttcttgcgctgatatggaagtttgacttcccaccatttatggtcctgatcattgccatcctcaatgacggtaccattatgactatctcgaaggacagagtaaaaccatctccacaaccagacagttggaagttagctgagatttttgcaactggagtagttcttggtggttatttggccatgatgactgtcattttcttctgggctgcatacaagactgactttttcccgcggctgttccacgtcgaaagcctcgagaagaccgcccaggatgactttcagaagttcgcctctgccgtgtaccttcaagtcagcacggtcagtcaggcccttatcttcgtgacacggtcgcgcagctggtcgtttgtggagcgtcctgggttcttgctggtcttcgctttcttggtggctaagctgattgccactctgatcgctgtatatgccaactgggcgttcactgcgatcaagggcattggatggggctgggccggtgtcatctggctctataacatcgtcttctacttcccgctggacatcatcaagttcctcatccgctatgcgctgagtgggagggcatggaacctcgtccttgagcagaggattgcgttcacgagcaagaagaatttcggcacggaagaaagggagcgcaagtgggcgcatgcgcagaggactctccatgggctccagccgccagaagcatccatcttcgagaacaagacgacattcaatgagctgaaccagctcgcggaagaggcccgcaggagagccgagatggcgaggttgcgagaagtgagcaccctgaaggggaggatggagtcagtggtgaagcagaagggtctggacatctagaccatccagcagtcctacactgtgtgactgactgactgacgacgacggggtttatagaggtttcttcttatactatacaatctgtactaggtagcaataaggatcaaggaaggaacccctatatattggctgcggttcgcaggaaatgaatgatggtaatatttatgatgtcggtgtggtgcttctgtcgccaactctcgaccatactaccctcaactcacccccggcaccaccggcaggcattgatattcagagatgaggtatagtagtctgtagcctctagtagatgctgatgaattgatgatatagtacatttttgcttgctttcttgcttgtttgttgttttccttggttctgctctgggtgttttgatgcttgctggctttgtgctattcctgattcctctaaatctgaagtggtagc

SEQ ID NO: 66290 - DNA, 5667 bp, Zea Mays
atggcctcacccacggtcgcctccccgatccgggcgagccccgtcgacaaccccaccgtcgcgccctcactggcctcctgccgctgcgccttatcgctagatgctcgacatccccatccgcgcgctcgaggcagaggccagggacaccaagatgagcccgaccgcgaccgcctagccatcagctccaaagaagaagccaggggaccgatggacgtcagtgttccgtcgtggtggcccgctagatccatattcagcaagaaagatatctcgccatgccggcccagggccgcagcccgtcaccttcctccccccgcacccgccgtgacagccgcctccccacgcccgcttacccgactggccgcacaagatgcccacagtggcccccatcgcgcccacccgctccccccatccaccgcgacctcagccgccacgccgacgccatccccgtcctctagcgcgttgtcgccgtcgtcacaccgccaaaggtgcctgccccctgctaccgaggtcgacgaccagcagcggcaagctgccgagctcgacgacacgcacgccatgcttggccatatggacgagtccatcgcctgctacgagaaggggctccagatccagatgtccgcgctcgatgagcgcaatccctgcctccctgagacctgcaggtgattgacaaggtttaggaggaaacttccaaaagccggtcaagtatggagtgcttaacatcactttggcaacttatatttttttacatgtttgctttgtttgttaacaacataatttatgggctgacaatgtgatcatgtattctttctggtagtcttcgtgtcactgcttgcagttgcaggggagggatcatggctttcttttattttccatgtgcaatgtttaatttaggtgatgaactccaaagcttatcccattgttttctagcaagagctaagcaatactggatggagaacatttatctttttaataacgagtaaaagcataatggcatgcttgtgtttagttctctgtttgttgaccaatcgctatatttaatcttgattttttttatctataacttgaatttcaaagattcaatattttttattcagacattttctcttctctagatattcttttatgcaaataacgcggttacactagatcagccaacattctgggaaataagctatatggtcagagtaagaggttcaagagttgatagttcaacaactttaactgagagcaaatctacaagaaaaaggaaacaagcaacctggaacctacaactgcaggagcttgcttgaaagtgaacaatcaaggttgtgtgtatatattatgcccgacatttttgaaggatattgcgagggccattgtatctgctggaaaaatcatttcaacttgtcgaacatggtattaggatacgaattggagtggtcaacagaaattctggacagatatgtcaaatttcagaatccacgatggtcctccaagaaataaagatgctcttgatcatctattgagaagtggaatactaattttttgctgcagcgtgatggataaaggtttttgcgtattcttgggtttttttcctttcctttttggctacacacaactctttttaaatatacattcagtaggtggcaatgcctcctatttccctaaaaatatagcgccaaagagttcaaaattgaattctcataatctgctattaggaaaagaggtcaacttctatattttttacatcaggtaatttggctataatacaacggcatgctgaggtcaacttctgtatttttttctgcaagtaacttggctataatacagcggcatgctccattctgaagctggtcaagaaataaatatagcacttgcaatattttccagtagtcaaacctctccattacttcaattctcgttctcatttttgactatgttcttcatgtcagttcaacataataattaagaggtcgcttgcccctgagacggcttcatgatccatcgaagatggcgcttaatctcgagagctagggagatgaaatgccttttgtacatgatggaaggaaacaaattacgtacatgtatatgtggatcgaattgactgttgcattctgcctgtatttaagcaacggtttccacccaaaacgtctataatttggtccttcctagatgtgtcaaatgtgtttactgcactgcgtttgcttttgtggcagcgccctaatagttgtttataaagtctgatgttaacaaactattgtcatgctatgtaatatatagtcttaacatgttggtttgttgagtgttcgaatatcagttttatattattatgtcaggtgttattagtgttcaattttttaagttcttgttgtacatcctatcattacatgagacaatgttgtgatgtttacaatattgtgttatgtatgttatatcattttggtattatagtataatttaatttgtatcagtttagttctgtattggttgttgccaaaaaaaattatgagatattaaggtcgataataatgttcgtttttatataatcgttttgcactaatattttgttaatttttttgtataccgttgcaacgcacgggcacctaactagtatgagactatgagtacatcaagtgcattcccttagaactcttgttgtgtaaaaaaatgtgtaacatgtcttggtacagagattaatttggtttgtgttttttagactgcaattatatctgggttctcagccttgccatggttagtcaagcccctctatgattttatcagttgattcaggtggttgattatatggtggttcagagagctcgaggtgaatcacagagtacatatagatctctccactccagtcactatgttgggaatcctcagcctttggaggaatcatgagtgcatacttcagtggttctccagtcacttatggcgtaagatttgtctttggtgttacagcacttttgccactgttccgagtagcagagaaggacaactctggcaaactgtgaagaaaataaaagattttcacaagcggaatcttcagaatctgaataaaggagttcgtgggaatcagttgtaccaaaaactggttcagttttcgtattccaagcatactactggaagttcacactgatcggcgacaaactctcgcccaaggagaagttgaaggaggatcagcgtgaacacccactgaaagagagatggagttgaatgagaaatctgaaaagaatacgcaagaggtagatgagaagttccaaaacacaaacttgtatctcaagaacttagagatggagcttcgggagttacaagtgcttcataagcaatcagatagatctgaaagttttactgtgccaacacatgcacacactggtggtgcctgcatctagctattcagatcaaagcctgacaggtaccatagggcaaagtgaagaagaaacagaagagttgagcaagatcacgctagagaataaggatattcagcttgatatcaatataagagtgtttgatggagccgaccctatggagctgcatgtttatgattttaaaggacctggtgtaaccttatcaatgtacaatagcgatgagtttattaggccttttgctaagtcctccatggatatggctctttcaaaaaagtcgtctcttcatctcagcaccaagaatacaatcatcaagaagtatgacgacaggcatggatcatctatgtttctacaagctcgcggtcacatttattaggccttttgctaagttcatggatatggctctttcaaaaaagtcgtctcttcatctcagcaccaagaatacaatcatcaagaagtatgacgacatgcatggatcatctatgtttctacaagctcgcgttacaatggaatgctaagagacaaatagttaaagaactgctttaacctaccttgatggagaggggagaatgcatcgtgttagcaagggagcaccagagcaggtgatcaacttgctattgggaaagaaactgcacgtcgtttgggaatgggtactaatatgtacccttcctctgctttactcagacagaataaggatgagtcaattgcttccttgccaattgatgaattgatcgagaaggctgatggctttgctggtgtctttccagaacacaagtatgagatcgtgaaaggcttgcaagcaagaaaacatatatgtggcatgactggggatggtgtaaatgatgccccagctttgaagaaggctgatattggtattgcagtagcagactctactgatgcaactcgtagtgcttctgacattgtcctaactgaacctggccttagtgtgattattagtgctgtgctgacgagtcgggcaattttccaaaggatgaagaattacacgatctatgctgtatcgattaccatccgtattgtgcttggttttatgcttcttgcgctgatatggaagtttgacttcccaccatttatggtcctgatcattgccatcctcaatgacggtaccattatgactatctcgaaggacagagtaaaaccatctccacaaccagacagttggaagttagctgagatttttgcaactggagtagttcttggtggttatttggccatgatgactgtcattttcttctgggctgcatacaagactgactttttcccgcggctgttccacgtcgaaagcctcgagaagaccgcccaggatgactttcagaagttcgcctctgccgtgtaccttcaagtcagcacggtcagtcaggcccttatcttcgtgacacggtcgcgcagctggtcgtttgtggagcgtcctgggttcttgctggtcttcgctttcttggtggctaagctgattgccactctgatcgctgtatatgccaactgggcgttcactgcgatcaagggcattggatggggctgggccggtgtcatctggctctataacatcgtcttctacttcccgctggacatcatcaagttcctcatccgctatgcgctgagtgggagggcatggaacctcgtccttgagcagaggattgcgttcacgagcaagaagaatttcggcacggaagaaagggagcgcaagtgggcgcatgcgcagaggactctccatgggctccagccgccagaagcatccatcttcgagaacaagacgacattcaatgagctgaaccagctcgcggaagaggcccgcaggagagccgagatggcgaggttgcgagaagtgagcaccctgaaggggaggatggagtcagtggtgaagcagaagggtctggacatctagaccatccagcagtcctacactgtgtgactgactgactgacgacgacggggtttatagaggtttcttcttatactatacaatctgtactaggtagcaataaggatcaaggaaggaacccctatatattggctgcggttcgcaggaaatgaatgatggtaatatttatgatgtcggtgtggtgcttctgtcgccaactctcgaccatactaccctcaactcacccccggcaccaccggcaggcattgatattcagagatgaggtatagtagtctgtagcctctagtagatgctgatgaattgatgatatagtacatttttgcttgctttcttgcttgtttgttgttttccttggttctgctctgggtgttttgatgcttgctggctttgtgctattcctgattcctctaaatctgaagtggtagc

SEQ ID NO: 66291 - DNA, 5350 bp, Zea Mays
atggcctcacccacggtcgcctccccgatccgggcgagccccgtcgacaaccccaccgtcgcgccctcactggcctcctgccgctgcgccttatcgctagatgctcgacatccccatccgcgcgctcgaggcagaggccagggacaccaagatgagcccgaccgcgaccgcctagccatcagctccaaagaagaagccaggggaccgatggacgtcagtgttccgtcgtggtggcccgctagatccatattcagcaagaaagatatctcgccatgccggcccagggccgcagcccgtcaccttcctccccccgcacccgccgtgacagccgcctccccacgcccgcttacccgactggccgcacaagatgcccacagtggcccccatcgcgcccacccgctccccccatccaccgcgacctcagccgccacgccgacgccatccccgtcctctagcgcgttgtcgccgtcgtcacaccgccaaaggtgcctgccccctgctaccgaggtcgacgaccagcagcggcaagctgccgagctcgacgacacgcacgccatgcttggccatatggacgagtccatcgcctgctacgagaaggggctccagatccagatgtccgcgctcgatgagcgcaatccctgcctccctgagacctgcaggtgattgacaaggtttaggaggaaacttccaaaagccggtcaaatattcttttatgcaaataacgcggttacactagatcagccaacattctgggaaataagctatatggtcagagtaagaggttcaagagttgatagttcaacaactttaactgagagcaaatctacaagaaaaaggaaacaagcaacctggaacctacaactgcaggagcttgcttgaaagtgaacaatcaaggttgtgtgtatatattatgcccgacatttttgaaggatattgcgagggccattgtatctgctggaaaaatcatttcaacttgtcgaacatggtattaggatacgaattggagtggtcaacagaaattctggacagatatgtcaaatttcagaatccacgatggtcctccaagaaataaagatgctcttgatcatctattgagaagtggaatactaattttttgctgcagcgtgatggataaaggtttttgcgtattcttgggtttttttcctttcctttttggctacacacaactctttttaaatatacattcagtaggtggcaatgcctcctatttccctaaaaatatagcgccaaagagttcaaaattgaattctcataatctgctattaggaaaagaggtcaacttctatattttttacatcaggtaatttggctataatacaacggcatgctgaggtcaacttctgtatttttttctgcaagtaacttggctataatacagcggcatgctccattctgaagctggtcaagaaataaatatagcacttgcaatattttccagtagtcaaacctctccattacttcaattctcgttctcatttttgactatgttcttcatgtcagttcaacataataattaagaggtcgcttgcccctgagacggcttcatggtattttatttgttttttacaaagtattttttaagcgctaaacttacagtgcactttctctattcgttttggtgctgcttataagtcttttgtgttttagatccatcgaagatggcgcttaatctcgagagctagggagatgaaatgccttttgtacatgatggaaggaaacaaattacgtacatgtatatgtggatcgaattgactgttgcattctgcctgtatttaagcaacggtttccacccaaaacgtctataatttggtccttcctagatgtgtcaaatgtgtttactgcactgcgtttgcttttgtggcagcgccctaatagttgtttataaagtctgatgttaacaaactattgtcatgctatgtaatatatagtcttaacatgttggtttgttgagtgttcgaatatcagttttatattattatgtcaggtgttattagtgttcaattttttaagttcttgttgtacatcctatcattacatgagacaatgttgtgatgtttacaatattgtgttatgtatgttatatcattttggtattatagtataatttaatttgtatcagtttagttctgtattggttgttgccaaaaaaaattatgagatattaaggtcgataataatgttcgtttttatataatcgttttgcactaatattttgttaatttttttgtataccgttgcaacgcacgggcacctaactagtatgagactatgagtacatcaagtgcattcccttagaactcttgttgtgtaaaaaaatgtgtaacatgtcttggtacagagattaatttggtttgtgttttttagactgcaattatatctgggttctcagccttgccatggttagtcaagcccctctatgattttatcaggtttcaccaaaatactgaatagccttcctatcatccctttctttctgtatatgatatatgcatttaattgcaatgatgtactgttgctatttccgtacacagttgattcaggtggttgattatatggtggttcagagagctcgaggtgaatcacagagtacatatagatctctccactccagtcactatgttgggaatcctcagcctttggaggaatcatgagtgcatacttcagtggttctccagtcacttatggcgtaagatttgtctttggtgttacagcacttttgccactgttccgagtagcagagaaggacaactctggcaaactgtgaagaaaataaaagattttcacaagcggaatcttcagaatctgaataaaggagttcgtgggaatcagttgtaccaaaaactggttcagttttcgtattccaagcatactactggaagttcacactgatcggcgacaaactctcgcccaaggagaagttgaaggaggatcagcgtgaacacccactgaaagagagatggagttgaatgagaaatctgaaaagaatacgcaagaggtagatgagaagttccaaaacacaaacttgtatctcaagaacttagagatggagcttcgggagttacaagtgcttcataagcaatcagatagatctgaaagttttactgtgccaacacatgcacacactggtggtgcctgcatctagctattcagatcaaagcctgacaggtaccatagggcaaagtgaagaagaaacagaagagttgagcaagatcacgctagagaataaggatattcagcttgatatcaatataagagtgtttgatggagccgaccctatggagctgcatgtttatgattttaaaggacctggtgtaaccttatcaatgtacaatagcgatgaggccttttgctaagtcctccatggatatggctctttcaaaaaagtcgtctcttcatctcagcaccaagaatacaatcatcaagaagtatgacgacaggcatggatcatctatgtttctacaagctcgcggtcacatttattaggccttttgctaagttcatggatatggctctttcaaaaaagtcgtctcttcatctcagcaccaagaatacaatcatcaagaagtatgacgacatgcatggatcatctatgtttctacaagctcgcggtgatcaacttgctattgggaaagaaactgcacgtcgtttgggaatgggtactaatatgtacccttcctctgctttactcagacagaataaggatgagtcaattgcttccttgccaattgatgaattgatcgagaaggctgatggctttgctggtgtctttccagaacacaagtatgagatcgtgaaaggcttgcaagcaagaaaacatatatgtggcatgactggggatggtgtaaatgatgccccagctttgaagaaggctgatattggtattgcagtagcagactctactgatgcaactcgtagtgcttctgacattgtcctaactgaacctggccttagtgtgattattagtgctgtgctgacgagtcgggcaattttccaaaggatgaagaattacacgatctatgctgtatcgattaccatccgtattgtgcttggttttatgcttcttgcgctgatatggaagtttgacttcccaccatttatggtcctgatcattgccatcctcaatgacggtaccattatgactatctcgaaggacagagtaaaaccatctccacaaccagacagttggaagttagctgagatttttgcaactggagtagttcttggtggttatttggccatgatgactgtcattttcttctgggctgcatacaagactgactttttcccgcggctgttccacgtcgaaagcctcgagaagaccgcccaggatgactttcagaagttcgcctctgccgtgtaccttcaagtcagcacggtcagtcaggcccttatcttcgtgacacggtcgcgcagctggtcgtttgtggagcgtcctgggttcttgctggtcttcgctttcttggtggctaagctgattgccactctgatcgctgtatatgccaactgggcgttcactgcgatcaagggcattggatggggctgggccggtgtcatctggctctataacatcgtcttctacttcccgctggacatcatcaagttcctcatccgctatgcgctgagtgggagggcatggaacctcgtccttgagcagaggattgcgttcacgagcaagaagaatttcggcacggaagaaagggagcgcaagtgggcgcatgcgcagaggactctccatgggctccagccgccagaagcatccatcttcgagaacaagacgacattcaatgagctgaaccagctcgcggaagaggcccgcaggagagccgagatggcgaggttgcgagaagtgagcaccctgaaggggaggatggagtcagtggtgaagcagaagggtctggacatctagaccatccagcagtcctacactgtgtgactgactgactgacgacgacggggtttatagaggtttcttcttatactatacaatctgtactaggtagcaataaggatcaaggaaggaacccctatatattggctgcggttcgcaggaaatgaatgatggtaatatttatgatgtcggtgtggtgcttctgtcgccaactctcgaccatactaccctcaactcacccccggcaccaccggcaggcattgatattcagagatgaggtatagtagtctgtagcctctagtagatgctgatgaattgatgatatagtacatttttgcttgctttcttgcttgtttgttgttttccttggttctgctctgggtgttttgatgcttgctggctttgtgctattcctgattcctctaaatctgaagtggtagc

SEQ ID NO: 66292 - DNA, 5909 bp, Zea Mays
atggcctcacccacggtcgcctccccgatccgggcgagccccgtcgacaaccccaccgtcgcgccctcactggcctcctgccgctgcgccttatcgctagatgctcgacatccccatccgcgcgctcgaggcagaggccagggacaccaagatgagcccgaccgcgaccgcctagccatcagctccaaagaagaagccaggggaccgatggacgtcagtgttccgtcgtggtggcccgctagatccatattcagcaagaaagatatctcgccatgccggcccagggccgcagcccgtcaccttcctccccccgcacccgccgtgacagccgcctccccacgcccgcttacccgactggccgcacaagatgcccacagtggcccccatcgcgcccacccgctccccccatccaccgcgacctcagccgccacgccgacgccatccccgtcctctagcgcgttgtcgccgtcgtcacaccgccaaaggtgcctgccccctgctaccgaggtcgacgaccagcagcggcaagctgccgagctcgacgacacgcacgccatgcttggccatatggacgagtccatcgcctgctacgagaaggggctccagatccagatgtccgcgctcgatgagcgcaatccctgcctccctgagacctgcaggtgattgacaaggtttaggaggaaacttccaaaagccggtcaagtatggagtgcttaacatcactttggcaacttatatttttttacatgtttgctttgtttgttaacaacataatttatgggctgacaatgtgatcatgtattctttctggtagtcttcgtgtcactgcttgcagttgcaggggagggatcatggctttcttttattttccatgtgcaatgtttaatttaggtgatgaactccaaagcttatcccattgttttctagcaagagctaagcaatactggatggagaacatttatctttttaataacgagtaaaagcataatggcatgcttgtgtttagttctctgtttgttgaccaatcgctatatttaatcttgattttttttatctataacttgaatttcaaagattcaatattttttattcagacattttctcttctctagatattcttttatgcaaataacgcggttacactagatcagccaacattctgggaaataagctatatggtcagagtaagaggttcaagagttgatagttcaacaactttaactgagagcaaatctacaagaaaaaggaaacaagcaacctggaacctacaactgcaggagcttgcttgaaagtgaacaatcaaggttgtgtgtatatattatgcccgacatttttgaaggatattgcgagggccattgtatctgctggaaaaatcatttcaacttgtcgaacatggtattaggatacgaattggagtggtcaacagaaattctggacagatatgtcaaatttcagaatccacgatggtcctccaagaaataaagatgctcttgatcatctattgagaagtggaatactaattttttgctgcagcgtgatggataaaggtttttgcgtattcttgggtttttttcctttcctttttggctacacacaactctttttaaatatacattcagtaggtggcaatgcctcctatttccctaaaaatatagcgccaaagagttcaaaattgaattctcataatctgctattaggaaaagaggtcaacttctatattttttacatcaggtaatttggctataatacaacggcatgctgaggtcaacttctgtatttttttctgcaagtaacttggctataatacagcggcatgctccattctgaagctggtcaagaaataaatatagcacttgcaatattttccagtagtcaaacctctccattacttcaattctcgttctcatttttgactatgttcttcatgtcagttcaacataataattaagaggtcgcttgcccctgagacggcttcatggtattttatttgttttttacaaagtattttttaagcgctaaacttacagtgcactttctctattcgttttggtgctgcttataagtcttttgtgttttagatccatcgaagatggcgcttaatctcgagagctagggagatgaaatgccttttgtacatgatggaaggaaacaaattacgtacatgtatatgtggatcgaattgactgttgcattctgcctgtatttaagcaacggtttccacccaaaacgtctataatttggtccttcctagatgtgtcaaatgtgtttactgcactgcgtttgcttttgtggcagcgccctaatagttgtttataaagtctgatgttaacaaactattgtcatgctatgtaatatatagtcttaacatgttggtttgttgagtgttcgaatatcagttttatattattatgtcaggtgttattagtgttcaattttttaagttcttgttgtacatcctatcattacatgagacaatgttgtgatgtttacaatattgtgttatgtatgttatatcattttggtattatagtataatttaatttgtatcagtttagttctgtattggttgttgccaaaaaaaattatgagatattaaggtcgataataatgttcgtttttatataatcgttttgcactaatattttgttaatttttttgtataccgttgcaacgcacgggcacctaactagtatgagactatgagtacatcaagtgcattcccttagaactcttgttgtgtaaaaaaatgtgtaacatgtcttggtacagagattaatttggtttgtgttttttagactgcaattatatctgggttctcagccttgccatggttagtcaagcccctctatgattttatcagttgattcaggtggttgattatatggtggttcagagagctcgaggtgaatcacagagtacatatagatctctccactccagtcactatgttgggaatcctcagcctttggaggaatcatgagtgcatacttcagtggttctccagtcacttatggcgtaagatttgtctttggtgttacagcacttttgccactgttccgagtagcagagaaggacaactctggcaaactgtgaagaaaataaaagattttcacaagcggaatcttcagaatctgaataaaggagttcgtgggaatcagttgtaccaaaaactggttcagttttcgtattccaagcatactactggaagttcacactgatcggcgacaaactctcgcccaaggagaagttgaaggaggatcagcgtgaacacccactgaaagagagatggagttgaatgagaaatctgaaaagaatacgcaagaggtagatgagaagttccaaaacacaaacttgtatctcaagaacttagagatggagcttcgggagttacaagtgcttcataagcaatcagatagatctgaaagttttactgtgccaacacatgcacacactggtggtgcctgcatctagctattcagatcaaagcctgacaggtaccatagggcaaagtgaagaagaaacagaagagttgagcaagatcacgctagagaataaggatattcagcttgatatcaatataagagaagaatcttggagctcttcacaacaagtgaacttttacacagaaagtaccagctccagtgaggctgtatgtttatgagattgagatcctttttttgctctgtcgatccataagattgagattttttttgcttgtatacgaggtgtttgatggagccgaccctatggagctgcatgtttatgattttaaaggacctggtgtaaccttatcaatgtacaatagcgatgagtttattaggccttttgctaagtcctccatggatatggctctttcaaaaaagtcgtctcttcatctcagcaccaagaatacaatcatcaagaagtatgacgacaggcatggatcatctatgtttctacaagctcgcggtcacatttattaggccttttgctaagttcatggatatggctctttcaaaaaagtcgtctcttcatctcagcaccaagaatacaatcatcaagaagtatgacgacatgcatggatcatctatgtttctacaagctcgcgttacaatggaatgctaagagacaaatagttaaagaactgctttaacctaccttgatggagaggggagaatgcatcgtgttagcaagggagcaccagagcaggtgatcaacttgctattgggaaagaaactgcacgtcgtttgggaatgggtactaatatgtacccttcctctgctttactcagacagaataaggatgagtcaattgcttccttgccaattgatgaattgatcgagaaggctgatggctttgctggtgtctttccagaacacaagtatgagatcgtgaaaggcttgcaagcaagaaaacatatatgtggcatgactggggatggtgtaaatgatgccccagctttgaagaaggctgatattggtattgcagtagcagactctactgatgcaactcgtagtgcttctgacattgtcctaactgaacctggccttagtgtgattattagtgctgtgctgacgagtcgggcaattttccaaaggatgaagaattacacgatctatgctgtatcgattaccatccgtattgtgcttggttttatgcttcttgcgctgatatggaagtttgacttcccaccatttatggtcctgatcattgccatcctcaatgacggtaccattatgactatctcgaaggacagagtaaaaccatctccacaaccagacagttggaagttagctgagatttttgcaactggagtagttcttggtggttatttggccatgatgactgtcattttcttctgggctgcatacaagactgactttttcccgcggctgttccacgtcgaaagcctcgagaagaccgcccaggatgactttcagaagttcgcctctgccgtgtaccttcaagtcagcacggtcagtcaggcccttatcttcgtgacacggtcgcgcagctggtcgtttgtggagcgtcctgggttcttgctggtcttcgctttcttggtggctaagctgattgccactctgatcgctgtatatgccaactgggcgttcactgcgatcaagggcattggatggggctgggccggtgtcatctggctctataacatcgtcttctacttcccgctggacatcatcaagttcctcatccgctatgcgctgagtgggagggcatggaacctcgtccttgagcagaggattgcgttcacgagcaagaagaatttcggcacggaagaaagggagcgcaagtgggcgcatgcgcagaggactctccatgggctccagccgccagaagcatccatcttcgagaacaagacgacattcaatgagctgaaccagctcgcggaagaggcccgcaggagagccgagatggcgaggttgcgagaagtgagcaccctgaaggggaggatggagtcagtggtgaagcagaagggtctggacatctagaccatccagcagtcctacactgtgtgactgactgactgacgacgacggggtttatagaggtttcttcttatactatacaatctgtactaggtagcaataaggatcaaggaaggaacccctatatattggctgcggttcgcaggaaatgaatgatggtaatatttatgatgtcggtgtggtgcttctgtcgccaactctcgaccatactaccctcaactcacccccggcaccaccggcaggcattgatattcagagatgaggtatagtagtctgtagcctctagtagatgctgatgaattgatgatatagtacatttttgcttgctttcttgcttgtttgttgttttccttggttctgctctgggtgttttgatgcttgctggctttgtgctattcctgattcctctaaatctgaagtggtagc

SEQ ID NO: 66293 - DNA, 5851 bp, Zea Mays
atggcctcacccacggtcgcctccccgatccgggcgagccccgtcgacaaccccaccgtcgcgccctcactggcctcctgccgctgcgccttatcgctagatgctcgacatccccatccgcgcgctcgaggcagaggccagggacaccaagatgagcccgaccgcgaccgcctagccatcagctccaaagaagaagccaggggaccgatggacgtcagtgttccgtcgtggtggcccgctagatccatattcagcaagaaagatatctcgccatgccggcccagggccgcagcccgtcaccttcctccccccgcacccgccgtgacagccgcctccccacgcccgcttacccgactggccgcacaagatgcccacagtggcccccatcgcgcccacccgctccccccatccaccgcgacctcagccgccacgccgacgccatccccgtcctctagcgcgttgtcgccgtcgtcacaccgccaaaggtgcctgccccctgctaccgaggtcgacgaccagcagcggcaagctgccgagctcgacgacacgcacgccatgcttggccatatggacgagtccatcgcctgctacgagaaggggctccagatccagatgtccgcgctcgatgagcgcaatccctgcctccctgagacctgcaggtaggtgacaatgtcatcaagggcccctccccctttgtcgcttctcgatctagatctcgcctctccctaaagcacgggttgcacctccccccgtcacccactccttccttggcttctcccgggaaacgaccttcagtctttacaggtatgaggtcttattgtgtgccatcattttcttttgctattcattcccgaatccccactgtgccctccagtgatgatggggtatgagctctgaataacaaacaaggtaaatgtttactcttttgagtagctgaattttgctatgatgtagtaaattatactagtaaattatacttgtactgaatatgaatataagaaaaaaatactgcactaattatttttctacgctctatattgtaaaataataggaatataataaaaagctgacataaaagctaatttacaacatccctttattttactatgttttatgataaataccttgattttccttgtaagttgtatcttttagtgattttcaaagaaactcctatttgcttggtgctttttctgtaagcatatgttgattaaatctttgtgtattctttctgtacactaatttaacttatcattattctgtcatccagtatgttgtcttatttgaatggttcatttccttctttaggtgattgacaaggtttaggaggaaacttccaaaagccggtcaagtatggagtgcttaacatcactttggcaacttatatttttttacatgtttgctttgtttgttaacaacataatttatgggctgacaatgtgatcatgtattctttctggtagtcttcgtgtcactgcttgcagttgcaggggagggatcatggctttcttttattttccatgtgcaatgtttaatttaggtgatgaactccaaagcttatcccattgttttctagcaagagctaagcaatactggatggagaacatttatctttttaataacgagtaaaagcataatggcatgcttgtgtttagttctctgtttgttgaccaatcgctatatttaatcttgattttttttatctataacttgaatttcaaagattcaatattttttattcagacattttctcttctctagatattcttttatgcaaataacgcggttacactagatcagccaacattctgggaaataagctatatggtcagagtaagaggttcaagagttgatagttcaacaactttaactgagagcaaatctacaagaaaaaggaaacaagcaacctggaacctacaactgcaggagcttgcttgaaagtgaacaatcaaggttgtgtgtatatattatgcccgacatttttgaaggatattgcgagggccattgtatctgctggaaaaatcatttcaacttgtcgaacatggtattaggatacgaattggagtggtcaacagaaattctggacagatatgtcaaatttcagaatccacgatggtcctccaagaaataaagatgctcttgatcatctattgagaagtggaatactaattttttgctgcagcgtgatggataaaggtttttgcgtattcttgggtttttttcctttcctttttggctacacacaactctttttaaatatacattcagtaggtggcaatgcctcctatttccctaaaaatatagcgccaaagagttcaaaattgaattctcataatctgctattaggaaaagaggtcaacttctatattttttacatcaggtaatttggctataatacaacggcatgctgaggtcaacttctgtatttttttctgcaagtaacttggctataatacagcggcatgctccattctgaagctggtcaagaaataaatatagcacttgcaatattttccagtagtcaaacctctccattacttcaattctcgttctcatttttgactatgttcttcatgtcagttcaacataataattaagaggtcgcttgcccctgagacggcttcatgatccatcgaagatggcgcttaatctcgagagctagggagatgaaatgccttttgtacatgatggaaggaaacaaattacgtacatactgcaattatatctgggttctcagccttgccatggttagtcaagcccctctatgattttatcaggtttcaccaaaatactgaatagccttcctatcatccctttctttctgtatatgatatatgcatttaattgcaatgatgtactgttgctatttccgtacacagttgattcaggtggttgattatatggtggttcagagagctcgaggtgaatcacagagtacatatagatctctccactccagtcactatgttgggaatcctcagcctttggaggaatcatgagtgcatacttcagtggttctccagtcacttatggcgtaagatttgtctttggtgttacagcacttttgccactgttccgagtagcagagaaggacaactctggcaaactgtgaagaaaataaaagattttcacaagcggaatcttcagaatctgaataaaggagttcgtgggaatcagttgtaccaaaaactggttcagttttcgtattccaagcatactactggaagttcacactgatcggcgacaaactctcgcccaaggagaagttgaaggaggatcagcgtgaacacccactgaaagagagatggagttgaatgagaaatctgaaaagaatacgcaagaggtagatgagaagttccaaaacacaaacttgtatctcaagaacttagagatggagcttcgggagttacaagtgcttcataagcaatcagatagatctgaaagttttactgtgccaacacatgcacacactggtggtgcctgcatctagctattcagatcaaagcctgacaggtaccatagggcaaagtgaagaagaaacagaagagttgagcaagatcacgctagagaataaggatattcagcttgatatcaatataagagaagaatcttggagctcttcacaacaagtgaacttttacacagaaagtaccagctccagtgaggcttgtttgatggagccgaccctatggagctgcatgtttatgattttaaaggacctggtgtaaccttatcaatgtacaatagcgatgagtttattaggccttttgctaagtcctccatggatatggctctttcaaaaaagtcgtctcttcatctcagcaccaagaatacaatcatcaagaagtatgacgacaggcatggatcatctatgtttctacaagctcgcggtcacatttattaggccttttgctaagttcatggatatggctctttcaaaaaagtcgtctcttcatctcagcaccaagaatacaatcatcaagaagtatgacgacatgcatggatcatctatgtttctacaagctcgcgttacaatggaatgctaagagacaaatagttaaagaactgctttaacctaccttgatggagaggggagaatgcatcgtgttagcaagggagcaccagagcaggtgatcaacttgctattgggaaagaaactgcacgtcgtttgggaatgggtactaatatgtacccttcctctgctttactcagacagaataaggatgagtcaattgcttccttgccaattgatgaattgatcgagaaggctgatggctttgctggtgtctttccagaacacaagtatgagatcgtgaaaggcttgcaagcaagaaaacatatatgtggcatgactggggatggtgtaaatgatgccccagctttgaagaaggctgatattggtattgcagtagcagactctactgatgcaactcgtagtgcttctgacattgtcctaactgaacctggccttagtgtgattattagtgctgtgctgacgagtcgggcaattttccaaaggatgaagaattacacgatctatgctgtatcgattaccatccgtattgtgcttggttttatgcttcttgcgctgatatggaagtttgacttcccaccatttatggtcctgatcattgccatcctcaatgacggtaccattatgactatctcgaaggacagagtaaaaccatctccacaaccagacagttggaagttagctgagatttttgcaactggagtagttcttggtggttatttggccatgatgactgtcattttcttctgggctgcatacaagactgactttttcccgcggctgttccacgtcgaaagcctcgagaagaccgcccaggatgactttcagaagttcgcctctgccgtgtaccttcaagtcagcacggtcagtcaggcccttatcttcgtgacacggtcgcgcagctggtcgtttgtggagcgtcctgggttcttgctggtcttcgctttcttggtggctaagctgattgccactctgatcgctgtatatgccaactgggcgttcactgcgatcaagggcattggatggggctgggccggtgtcatctggctctataacatcgtcttctacttcccgctggacatcatcaagttcctcatccgctatgcgctgagtgggagggcatggaacctcgtccttgagcagaggattgcgttcacgagcaagaagaatttcggcacggaagaaagggagcgcaagtgggcgcatgcgcagaggactctccatgggctccagccgccagaagcatccatcttcgagaacaagacgacattcaatgagctgaaccagctcgcggaagaggcccgcaggagagccgagatggcgaggttgcgagaagtgagcaccctgaaggggaggatggagtcagtggtgaagcagaagggtctggacatctagaccatccagcagtcctacactgtgtgactgactgactgacgacgacggggtttatagaggtttcttcttatactatacaatctgtactaggtagcaataaggatcaaggaaggaacccctatatattggctgcggttcgcaggaaatgaatgatggtaatatttatgatgtcggtgtggtgcttctgtcgccaactctcgaccatactaccctcaactcacccccggcaccaccggcaggcattgatattcagagatgaggtatagtagtctgtagcctctagtagatgctgatgaattgatgatatagtacatttttgcttgctttcttgcttgtttgttgttttccttggttctgctctgggtgttttgatgcttgctggctttgtgctattcctgattcctctaaatctgaagtggtagc

SEQ ID NO: 66294 - DNA, 5730 bp, Zea Mays
atggcctcacccacggtcgcctccccgatccgggcgagccccgtcgacaaccccaccgtcgcgccctcactggcctcctgccgctgcgccttatcgctagatgctcgacatccccatccgcgcgctcgaggcagaggccagggacaccaagatgagcccgaccgcgaccgcctagccatcagctccaaagaagaagccaggggaccgatggacgtcagtgttccgtcgtggtggcccgctagatccatattcagcaagaaagatatctcgccatgccggcccagggccgcagcccgtcaccttcctccccccgcacccgccgtgacagccgcctccccacgcccgcttacccgactggccgcacaagatgcccacagtggcccccatcgcgcccacccgctccccccatccaccgcgacctcagccgccacgccgacgccatccccgtcctctagcgcgttgtcgccgtcgtcacaccgccaaaggtgcctgccccctgctaccgaggtcgacgaccagcagcggcaagctgccgagctcgacgacacgcacgccatgcttggccatatggacgagtccatcgcctgctacgagaaggggctccagatccagatgtccgcgctcgatgagcgcaatccctgcctccctgagacctgcaggtgattgacaaggtttaggaggaaacttccaaaagccggtcaagtatggagtgcttaacatcactttggcaacttatatttttttacatgtttgctttgtttgttaacaacataatttatgggctgacaatgtgatcatgtattctttctggtagtcttcgtgtcactgcttgcagttgcaggggagggatcatggctttcttttattttccatgtgcaatgtttaatttaggtgatgaactccaaagcttatcccattgttttctagcaagagctaagcaatactggatggagaacatttatctttttaataacgagtaaaagcataatggcatgcttgtgtttagttctctgtttgttgaccaatcgctatatttaatcttgattttttttatctataacttgaatttcaaagattcaatattttttattcagacattttctcttctctagatattcttttatgcaaataacgcggttacactagatcagccaacattctgggaaataagctatatggtcagagtaagaggttcaagagttgatagttcaacaactttaactgagagcaaatctacaagaaaaaggaaacaagcaacctggaacctacaactgcaggagcttgcttgaaagtgaacaatcaaggttgtgtgtatatattatgcccgacatttttgaaggatattgcgagggccattgtatctgctggaaaaatcatttcaacttgtcgaacatggtattaggatacgaattggagtggtcaacagaaattctggacagatatgtcaaatttcagaatccacgatggtcctccaagaaataaagatgctcttgatcatctattgagaagtggaatactaattttttgctgcagcgtgatggataaaggtttttgcgtattcttgggtttttttcctttcctttttggctacacacaactctttttaaatatacattcagtaggtggcaatgcctcctatttccctaaaaatatagcgccaaagagttcaaaattgaattctcataatctgctattaggaaaagaggtcaacttctatattttttacatcaggtaatttggctataatacaacggcatgctgaggtcaacttctgtatttttttctgcaagtaacttggctataatacagcggcatgctccattctgaagctggtcaagaaataaatatagcacttgcaatattttccagtagtcaaacctctccattacttcaattctcgttctcatttttgactatgttcttcatgtcagttcaacataataattaagaggtcgcttgcccctgagacggcttcatggtattttatttgttttttacaaagtattttttaagcgctaaacttacagtgcactttctctattcgttttggtgctgcttataagtcttttgtgttttagatccatcgaagatggcgcttaatctcgagagctagggagatgaaatgccttttgtacatgatggaaggaaacaaattacgtacatgtatatgtggatcgaattgactgttgcattctgcctgtatttaagcaacggtttccacccaaaacgtctataatttggtccttcctagatgtgtcaaatgtgtttactgcactgcgtttgcttttgtggcagcgccctaatagttgtttataaagtctgatgttaacaaactattgtcatgctatgtaatatatagtcttaacatgttggtttgttgagtgttcgaatatcagttttatattattatgtcaggtgttattagtgttcaattttttaagttcttgttgtacatcctatcattacatgagacaatgttgtgatgtttacaatattgtgttatgtatgttatatcattttggtattatagtataatttaatttgtatcagtttagttctgtattggttgttgccaaaaaaaattatgagatattaaggtcgataataatgttcgtttttatataatcgttttgcactaatattttgttaatttttttgtataccgttgcaacgcacgggcacctaactagtatgagactatgagtacatcaagtgcattcccttagaactcttgttgtgtaaaaaaatgtgtaacatgtcttggtacagagattaatttggtttgtgttttttagactgcaattatatctgggttctcagccttgccatggttagtcaagcccctctatgattttatcaggtttcaccaaaatactgaatagccttcctatcatccctttctttctgtatatgatatatgcatttaattgcaatgatgtactgttgctatttccgtacacagttgattcaggtggttgattatatggtggttcagagagctcgaggtgaatcacagagtacatatagatctctccactccagtcactatgttgggaatcctcagcctttggaggaatcatgagtgcatacttcagtggttctccagtcacttatggcgtaagatttgtctttggtgttacagcacttttgccactgttccgagtagcagagaaggacaactctggcaaactgtgaagaaaataaaagattttcacaagcggaatcttcagaatctgaataaaggagttcgtgggaatcagttgtaccaaaaactggttcagttttcgtattccaagcatactactggaagttcacactgatcggcgacaaactctcgcccaaggagaagttgaaggaggatcagcgtgaacacccactgaaagagagatggagttgaatgagaaatctgaaaagaatacgcaagaggtagatgagaagttccaaaacacaaacttgtatctcaagaacttagagatggagcttcgggagttacaagtgcttcataagcaatcagatagatctgaaagttttactgtgccaacacatgcacacactggtggtgcctgcatctagctattcagatcaaagcctgacaggtaccatagggcaaagtgaagaagaaacagaagagttgagcaagatcacgctagagaataaggatattcagcttgatatcaatataagagtgtttgatggagccgaccctatggagctgcatgtttatgattttaaaggacctggtgtaaccttatcaatgtacaatagcgatgagtttattaggccttttgctaagtcctccatggatatggctctttcaaaaaagtcgtctcttcatctcagcaccaagaatacaatcatcaagaagtatgacgacaggcatggatcatctatgtttctacaagctcgcgttacaatggaatgctaagagacaaatagttaaagaactgctttaacctaccttgatggagaggggagaatgcatcgtgttagcaagggagcaccagagcaggtgatcaacttgctattgggaaagaaactgcacgtcgtttgggaatgggtactaatatgtacccttcctctgctttactcagacagaataaggatgagtcaattgcttccttgccaattgatgaattgatcgagaaggctgatggctttgctggtgtctttccagaacacaagtatgagatcgtgaaaggcttgcaagcaagaaaacatatatgtggcatgactggggatggtgtaaatgatgccccagctttgaagaaggctgatattggtattgcagtagcagactctactgatgcaactcgtagtgcttctgacattgtcctaactgaacctggccttagtgtgattattagtgctgtgctgacgagtcgggcaattttccaaaggatgaagaattacacgatctatgctgtatcgattaccatccgtattgtgcttggttttatgcttcttgcgctgatatggaagtttgacttcccaccatttatggtcctgatcattgccatcctcaatgacggtaccattatgactatctcgaaggacagagtaaaaccatctccacaaccagacagttggaagttagctgagatttttgcaactggagtagttcttggtggttatttggccatgatgactgtcattttcttctgggctgcatacaagactgactttttcccgcggctgttccacgtcgaaagcctcgagaagaccgcccaggatgactttcagaagttcgcctctgccgtgtaccttcaagtcagcacggtcagtcaggcccttatcttcgtgacacggtcgcgcagctggtcgtttgtggagcgtcctgggttcttgctggtcttcgctttcttggtggctaagctgattgccactctgatcgctgtatatgccaactgggcgttcactgcgatcaagggcattggatggggctgggccggtgtcatctggctctataacatcgtcttctacttcccgctggacatcatcaagttcctcatccgctatgcgctgagtgggagggcatggaacctcgtccttgagcagaggattgcgttcacgagcaagaagaatttcggcacggaagaaagggagcgcaagtgggcgcatgcgcagaggactctccatgggctccagccgccagaagcatccatcttcgagaacaagacgacattcaatgagctgaaccagctcgcggaagaggcccgcaggagagccgagatggcgaggttgcgagaagtgagcaccctgaaggggaggatggagtcagtggtgaagcagaagggtctggacatctagaccatccagcagtcctacactgtgtgactgactgactgacgacgacggggtttatagaggtttcttcttatactatacaatctgtactaggtagcaataaggatcaaggaaggaacccctatatattggctgcggttcgcaggaaatgaatgatggtaatatttatgatgtcggtgtggtgcttctgtcgccaactctcgaccatactaccctcaactcacccccggcaccaccggcaggcattgatattcagagatgaggtatagtagtctgtagcctctagtagatgctgatgaattgatgatatagtacatttttgcttgctttcttgcttgtttgttgttttccttggttctgctctgggtgttttgatgcttgctggctttgtgctattcctgattcctctaaatctgaagtggtagc

SEQ ID NO: 66295 - DNA, 5678 bp, Zea Mays
atggcctcacccacggtcgcctccccgatccgggcgagccccgtcgacaaccccaccgtcgcgccctcactggcctcctgccgctgcgccttatcgctagatgctcgacatccccatccgcgcgctcgaggcagaggccagggacaccaagatgagcccgaccgcgaccgcctagccatcagctccaaagaagaagccaggggaccgatggacgtcagtgttccgtcgtggtggcccgctagatccatattcagcaagaaagatatctcgccatgccggcccagggccgcagcccgtcaccttcctccccccgcacccgccgtgacagccgcctccccacgcccgcttacccgactggccgcacaagatgcccacagtggcccccatcgcgcccacccgctccccccatccaccgcgacctcagccgccacgccgacgccatccccgtcctctagcgcgttgtcgccgtcgtcacaccgccaaaggtgcctgccccctgctaccgaggtcgacgaccagcagcggcaagctgccgagctcgacgacacgcacgccatgcttggccatatggacgagtccatcgcctgctacgagaaggggctccagatccagatgtccgcgctcgatgagcgcaatccctgcctccctgagacctgcaggtaggtgacaatgtcatcaagggcccctccccctttgtcgcttctcgatctagatctcgcctctccctaaagcacgggttgcacctccccccgtcacccactccttccttggcttctcccgggaaacgaccttcagtctttacaggtgattgacaaggtttaggaggaaacttccaaaagccggtcaagtatggagtgcttaacatcactttggcaacttatatttttttacatgtttgctttgtttgttaacaacataatttatgggctgacaatgtgatcatgtattctttctggtagtcttcgtgtcactgcttgcagttgcaggggagggatcatggctttcttttattttccatgtgcaatgtttaatttaggtgatgaactccaaagcttatcccattgttttctagcaagagctaagcaatactggatggagaacatttatctttttaataacgagtaaaagcataatggcatgcttgtgtttagttctctgtttgttgaccaatcgctatatttaatcttgattttttttatctataacttgaatttcaaagattcaatattttttattcagacattttctcttctctagatattcttttatgcaaataacgcggttacactagatcagccaacattctgggaaataagctatatggtcagagtaagaggttcaagagttgatagttcaacaactttaactgagagcaaatctacaagaaaaaggaaacaagcaacctggaacctacaactgcaggagcttgcttgaaagtgaacaatcaaggatacgaattggagtggtcaacagaaattctggacagatatgtcaaatttcagaatccacgatggtcctccaagaaataaagatgctcttgatcatctattgagaagtggaatactaattttttgctgcagcgtgatggataaaggtttttgcgtattcttgggtttttttcctttcctttttggctacacacaactctttttaaatatacattcagtaggtggcaatgcctcctatttccctaaaaatatagcgccaaagagttcaaaattgaattctcataatctgctattaggaaaagaggtcaacttctatattttttacatcaggtaatttggctataatacaacggcatgctgaggtcaacttctgtatttttttctgcaagtaacttggctataatacagcggcatgctccattctgaagctggtcaagaaataaatatagcacttgcaatattttccagtagtcaaacctctccattacttcaattctcgttctcatttttgactatgttcttcatgtcagttcaacataataattaagaggtcgcttgcccctgagacggcttcatgatccatcgaagatggcgcttaatctcgagagctagggagatgaaatgccttttgtacatgatggaaggaaacaaattacgtacatgtatatgtggatcgaattgactgttgcattctgcctgtatttaagcaacggtttccacccaaaacgtctataatttggtccttcctagatgtgtcaaatgtgtttactgcactgcgtttgcttttgtggcagcgccctaatagttgtttataaagtctgatgttaacaaactattgtcatgctatgtaatatatagtcttaacatgttggtttgttgagtgttcgaatatcagttttatattattatgtcaggtgttattagtgttcaattttttaagttcttgttgtacatcctatcattacatgagacaatgttgtgatgtttacaatattgtgttatgtatgttatatcattttggtattatagtataatttaatttgtatcagtttagttctgtattggttgttgccaaaaaaaattatgagatattaaggtcgataataatgttcgtttttatataatcgttttgcactaatattttgttaatttttttgtataccgttgcaacgcacgggcacctaactagtatgagactatgagtacatcaagtgcattcccttagaactcttgttgtgtaaaaaaatgtgtaacatgtcttggtacagagattaatttggtttgtgttttttagactgcaattatatctgggttctcagccttgccatggttagtcaagcccctctatgattttatcagttgattcaggtggttgattatatggtggttcagagagctcgaggtgaatcacagagtacatatagatctctccactccagtcactatgttgggaatcctcagcctttggaggaatcatgagtgcatacttcagtggttctccagtcacttatggcgtaagatttgtctttggtgttacagcacttttgccactgttccgagtagcagagaaggacaactctggcaaactgtgaagaaaataaaagattttcacaagcggaatcttcagaatctgaataaaggagttcgtgggaatcagttgtaccaaaaactggttcagttttcgtattccaagcatactactggaagttcacactgatcggcgacaaactctcgcccaaggagaagttgaaggaggatcagcgtgaacacccactgaaagagagatggagttgaatgagaaatctgaaaagaatacgcaagaggtagatgagaagttccaaaacacaaacttgtatctcaagaacttagagatggagcttcgggagttacaagtgcttcataagcaatcagatagatctgaaagttttactgtgccaacacatgcacacactggtggtgcctgcatctagctattcagatcaaagcctgacaggtaccatagggcaaagtgaagaagaaacagaagagttgagcaagatcacgctagagaataaggatattcagcttgatatcaatataagagaagaatcttggagctcttcacaacaagtgaacttttacacagaaagtaccagctccagtgaggcttgtttgatggagccgaccctatggagctgcatgtttatgattttaaaggacctggtgtaaccttatcaatgtacaatagcgatgagtttattaggccttttgctaagtcctccatggatatggctctttcaaaaaagtcgtctcttcatctcagcaccaagaatacaatcatcaagaagtatgacgacaggcatggatcatctatgtttctacaagctcgcggtcacatttattaggccttttgctaagttcatggatatggctctttcaaaaaagtcgtctcttcatctcagcaccaagaatacaatcatcaagaagtatgacgacatgcatggatcatctatgtttctacaagctcgcggtgatcaacttgctattgggaaagaaactgcacgtcgtttgggaatgggtactaatatgtacccttcctctgctttactcagacagaataaggatgagtcaattgcttccttgccaattgatgaattgatcgagaaggctgatggctttgctggtgtctttccagaacacaagtatgagatcgtgaaaggcttgcaagcaagaaaacatatatgtggcatgactggggatggtgtaaatgatgccccagctttgaagaaggctgatattggtattgcagtagcagactctactgatgcaactcgtagtgcttctgacattgtcctaactgaacctggccttagtgtgattattagtgctgtgctgacgagtcgggcaattttccaaaggatgaagaattacacgatctatgctgtatcgattaccatccgtattgtgcttggttttatgcttcttgcgctgatatggaagtttgacttcccaccatttatggtcctgatcattgccatcctcaatgacggtaccattatgactatctcgaaggacagagtaaaaccatctccacaaccagacagttggaagttagctgagatttttgcaactggagtagttcttggtggttatttggccatgatgactgtcattttcttctgggctgcatacaagactgactttttcccgcggctgttccacgtcgaaagcctcgagaagaccgcccaggatgactttcagaagttcgcctctgccgtgtaccttcaagtcagcacggtcagtcaggcccttatcttcgtgacacggtcgcgcagctggtcgtttgtggagcgtcctgggttcttgctggtcttcgctttcttggtggctaagctgattgccactctgatcgctgtatatgccaactgggcgttcactgcgatcaagggcattggatggggctgggccggtgtcatctggctctataacatcgtcttctacttcccgctggacatcatcaagttcctcatccgctatgcgctgagtgggagggcatggaacctcgtccttgagcagaggattgcgttcacgagcaagaagaatttcggcacggaagaaagggagcgcaagtgggcgcatgcgcagaggactctccatgggctccagccgccagaagcatccatcttcgagaacaagacgacattcaatgagctgaaccagctcgcggaagaggcccgcaggagagccgagatggcgaggttgcgagaagtgagcaccctgaaggggaggatggagtcagtggtgaagcagaagggtctggacatctagaccatccagcagtcctacactgtgtgactgactgactgacgacgacggggtttatagaggtttcttcttatactatacaatctgtactaggtagcaataaggatcaaggaaggaacccctatatattggctgcggttcgcaggaaatgaatgatggtaatatttatgatgtcggtgtggtgcttctgtcgccaactctcgaccatactaccctcaactcacccccggcaccaccggcaggcattgatattcagagatgaggtatagtagtctgtagcctctagtagatgctgatgaattgatgatatagtacatttttgcttgctttcttgcttgtttgttgttttccttggttctgctctgggtgttttgatgcttgctggctttgtgctattcctgattcctctaaatctgaagtggtagc

SEQ ID NO: 66296 - DNA, 5223 bp, Zea Mays
atggcctcacccacggtcgcctccccgatccgggcgagccccgtcgacaaccccaccgtcgcgccctcactggcctcctgccgctgcgccttatcgctagatgctcgacatccccatccgcgcgctcgaggcagaggccagggacaccaagatgagcccgaccgcgaccgcctagccatcagctccaaagaagaagccaggggaccgatggacgtcagtgttccgtcgtggtggcccgctagatccatattcagcaagaaagatatctcgccatgccggcccagggccgcagcccgtcaccttcctccccccgcacccgccgtgacagccgcctccccacgcccgcttacccgactggccgcacaagatgcccacagtggcccccatcgcgcccacccgctccccccatccaccgcgacctcagccgccacgccgacgccatccccgtcctctagcgcgttgtcgccgtcgtcacaccgccaaaggtgcctgccccctgctaccgaggtcgacgaccagcagcggcaagctgccgagctcgacgacacgcacgccatgcttggccatatggacgagtccatcgcctgctacgagaaggggctccagatccagatgtccgcgctcgatgagcgcaatccctgcctccctgagacctgcaggtgattgacaaggtttaggaggaaacttccaaaagccggtcaaatattcttttatgcaaataacgcggttacactagatcagccaacattctgggaaataagctatatggtcagagtaagaggttcaagagttgatagttcaacaactttaactgagagcaaatctacaagaaaaaggaaacaagcaacctggaacctacaactgcaggagcttgcttgaaagtgaacaatcaaggatacgaattggagtggtcaacagaaattctggacagatatgtcaaatttcagaatccacgatggtcctccaagaaataaagatgctcttgatcatctattgagaagtggaatactaattttttgctgcagcgtgatggataaaggtttttgcgtattcttgggtttttttcctttcctttttggctacacacaactctttttaaatatacattcagtaggtggcaatgcctcctatttccctaaaaatatagcgccaaagagttcaaaattgaattctcataatctgctattaggaaaagaggtcaacttctatattttttacatcaggtaatttggctataatacaacggcatgctgaggtcaacttctgtatttttttctgcaagtaacttggctataatacagcggcatgctccattctgaagctggtcaagaaataaatatagcacttgcaatattttccagtagtcaaacctctccattacttcaattctcgttctcatttttgactatgttcttcatgtcagttcaacataataattaagaggtcgcttgcccctgagacggcttcatggtattttatttgttttttacaaagtattttttaagcgctaaacttacagtgcactttctctattcgttttggtgctgcttataagtcttttgtgttttagatccatcgaagatggcgcttaatctcgagagctagggagatgaaatgccttttgtacatgatggaaggaaacaaattacgtacatgtatatgtggatcgaattgactgttgcattctgcctgtatttaagcaacggtttccacccaaaacgtctataatttggtccttcctagatgtgtcaaatgtgtttactgcactgcgtttgcttttgtggcagcgccctaatagttgtttataaagtctgatgttaacaaactattgtcatgctatgtaatatatagtcttaacatgttggtttgttgagtgttcgaatatcagttttatattattatgtcaggtgttattagtgttcaattttttaagttcttgttgtacatcctatcattacatgagacaatgttgtgatgtttacaatattgtgttatgtatgttatatcattttggtattatagtataatttaatttgtatcagtttagttctgtattggttgttgccaaaaaaaattatgagatattaaggtcgataataatgttcgtttttatataatcgttttgcactaatattttgttaatttttttgtataccgttgcaacgcacgggcacctaactagtatgagactatgagtacatcaagtgcattcccttagaactcttgttgtgtaaaaaaatgtgtaacatgtcttggtacagagattaatttggtttgtgttttttagactgcaattatatctgggttctcagccttgccatggttagtcaagcccctctatgattttatcagttgattcaggtggttgattatatggtggttcagagagctcgaggtgaatcacagagtacatatagatctctccactccagtcactatgttgggaatcctcagcctttggaggaatcatgagtgcatacttcagtggttctccagtcacttatggcgtaagatttgtctttggtgttacagcacttttgccactgttccgagtagcagagaaggacaactctggcaaactgtgaagaaaataaaagattttcacaagcggaatcttcagaatctgaataaaggagttcgtgggaatcagttgtaccaaaaactggttcagttttcgtattccaagcatactactggaagttcacactgatcggcgacaaactctcgcccaaggagaagttgaaggaggatcagcgtgaacacccactgaaagagagatggagttgaatgagaaatctgaaaagaatacgcaagaggtagatgagaagttccaaaacacaaacttgtatctcaagaacttagagatggagcttcgggagttacaagtgcttcataagcaatcagatagatctgaaagttttactgtgccaacacatgcacacactggtggtgcctgcatctagctattcagatcaaagcctgacaggtaccatagggcaaagtgaagaagaaacagaagagttgagcaagatcacgctagagaataaggatattcagcttgatatcaatataagagaagaatcttggagctcttcacaacaagtgaacttttacacagaaagtaccagctccagtgaggcttgtttgatggagccgaccctatggagctgcatgtttatgattttaaaggacctggtgtaaccttatcaatgtacaatagcgatgagtttattaggccttttgctaagtcctccatggatatggctctttcaaaaaagtcgtctcttcatctcagcaccaagaatacaatcatcaagaagtatgacgacaggcatggatcatctatgtttctacaagctcgcggtcacatttattaggccttttgctaagttcatggatatggctctttcaaaaaagtcgtctcttcatctcagcaccaagaatacaatcatcaagaagtatgacgacatgcatggatcatctatgtttctacaagctcgcggtgatcaacttgctattgggaaagaaactgcacgtcgtttgggaatgggtactaatatgtacccttcctctgctttactcagacagaataaggatgagtcaattgcttccttgccaattgatgaattgatcgagaaggctgatggctttgctggtgtctttccagaacacaagtatgagatcgtgaaaggcttgcaagcaagaaaacatatatgtggcatgactggggatggtgtaaatgatgccccagctttgaagaaggctgatattggtattgcagtagcagactctactgatgcaactcgtagtgcttctgacattgtcctaactgaacctggccttagtgtgattattagtgctgtgctgacgagtcgggcaattttccaaaggatgaagaattacacgatctatgctgtatcgattaccatccgtattgtgcttggttttatgcttcttgcgctgatatggaagtttgacttcccaccatttatggtcctgatcattgccatcctcaatgacggtaccattatgactatctcgaaggacagagtaaaaccatctccacaaccagacagttggaagttagctgagatttttgcaactggagtagttcttggtggttatttggccatgatgactgtcattttcttctgggctgcatacaagactgactttttcccgcggctgttccacgtcgaaagcctcgagaagaccgcccaggatgactttcagaagttcgcctctgccgtgtaccttcaagtcagcacggtcagtcaggcccttatcttcgtgacacggtcgcgcagctggtcgtttgtggagcgtcctgggttcttgctggtcttcgctttcttggtggctaagctgattgccactctgatcgctgtatatgccaactgggcgttcactgcgatcaagggcattggatggggctgggccggtgtcatctggctctataacatcgtcttctacttcccgctggacatcatcaagttcctcatccgctatgcgctgagtgggagggcatggaacctcgtccttgagcagaggattgcgttcacgagcaagaagaatttcggcacggaagaaagggagcgcaagtgggcgcatgcgcagaggactctccatgggctccagccgccagaagcatccatcttcgagaacaagacgacattcaatgagctgaaccagctcgcggaagaggcccgcaggagagccgagatggcgaggttgcgagaagtgagcaccctgaaggggaggatggagtcagtggtgaagcagaagggtctggacatctagaccatccagcagtcctacactgtgtgactgactgactgacgacgacggggtttatagaggtttcttcttatactatacaatctgtactaggtagcaataaggatcaaggaaggaacccctatatattggctgcggttcgcaggaaatgaatgatggtaatatttatgatgtcggtgtggtgcttctgtcgccaactctcgaccatactaccctcaactcacccccggcaccaccggcaggcattgatattcagagatgaggtatagtagtctgtagcctctagtagatgctgatgaattgatgatatagtacatttttgcttgctttcttgcttgtttgttgttttccttggttctgctctgggtgttttgatgcttgctggctttgtgctattcctgattcctctaaatctgaagtggtagc

SEQ ID NO: 66297 - DNA, 5905 bp, Zea Mays
atggcctcacccacggtcgcctccccgatccgggcgagccccgtcgacaaccccaccgtcgcgccctcactggcctcctgccgctgcgccttatcgctagatgctcgacatccccatccgcgcgctcgaggcagaggccagggacaccaagatgagcccgaccgcgaccgcctagccatcagctccaaagaagaagccaggggaccgatggacgtcagtgttccgtcgtggtggcccgctagatccatattcagcaagaaagatatctcgccatgccggcccagggccgcagcccgtcaccttcctccccccgcacccgccgtgacagccgcctccccacgcccgcttacccgactggccgcacaagatgcccacagtggcccccatcgcgcccacccgctccccccatccaccgcgacctcagccgccacgccgacgccatccccgtcctctagcgcgttgtcgccgtcgtcacaccgccaaaggtgcctgccccctgctaccgaggtcgacgaccagcagcggcaagctgccgagctcgacgacacgcacgccatgcttggccatatggacgagtccatcgcctgctacgagaaggggctccagatccagatgtccgcgctcgatgagcgcaatccctgcctccctgagacctgcaggtaggtgacaatgtcatcaagggcccctccccctttgtcgcttctcgatctagatctcgcctctccctaaagcacgggttgcacctccccccgtcacccactccttccttggcttctcccgggaaacgaccttcagtctttacaggtgattgacaaggtttaggaggaaacttccaaaagccggtcaagtatggagtgcttaacatcactttggcaacttatatttttttacatgtttgctttgtttgttaacaacataatttatgggctgacaatgtgatcatgtattctttctggtagtcttcgtgtcactgcttgcagttgcaggggagggatcatggctttcttttattttccatgtgcaatgtttaatttaggtgatgaactccaaagcttatcccattgttttctagcaagagctaagcaatactggatggagaacatttatctttttaataacgagtaaaagcataatggcatgcttgtgtttagttctctgtttgttgaccaatcgctatatttaatcttgattttttttatctataacttgaatttcaaagattcaatattttttattcagacattttctcttctctagatattcttttatgcaaataacgcggttacactagatcagccaacattctgggaaataagctatatggtcagagtaagaggttcaagagttgatagttcaacaactttaactgagagcaaatctacaagaaaaaggaaacaagcaacctggaacctacaactgcaggagcttgcttgaaagtgaacaatcaaggttgtgtgtatatattatgcccgacatttttgaaggatattgcgagggccattgtatctgctggaaaaatcatttcaacttgtcgaacatggtattaggatacgaattggagtggtcaacagaaattctggacagatatgtcaaatttcagaatccacgatggtcctccaagaaataaagatgctcttgatcatctattgagaagtggaatactaattttttgctgcagcgtgatggataaaggtttttgcgtattcttgggtttttttcctttcctttttggctacacacaactctttttaaatatacattcagtaggtggcaatgcctcctatttccctaaaaatatagcgccaaagagttcaaaattgaattctcataatctgctattaggaaaagaggtcaacttctatattttttacatcaggtaatttggctataatacaacggcatgctgaggtcaacttctgtatttttttctgcaagtaacttggctataatacagcggcatgctccattctgaagctggtcaagaaataaatatagcacttgcaatattttccagtagtcaaacctctccattacttcaattctcgttctcatttttgactatgttcttcatgtcagttcaacataataattaagaggtcgcttgcccctgagacggcttcatggtattttatttgttttttacaaagtattttttaagcgctaaacttacagtgcactttctctattcgttttggtgctgcttataagtcttttgtgttttagatccatcgaagatggcgcttaatctcgagagctagggagatgaaatgccttttgtacatgatggaaggaaacaaattacgtacatgtatatgtggatcgaattgactgttgcattctgcctgtatttaagcaacggtttccacccaaaacgtctataatttggtccttcctagatgtgtcaaatgtgtttactgcactgcgtttgcttttgtggcagcgccctaatagttgtttataaagtctgatgttaacaaactattgtcatgctatgtaatatatagtcttaacatgttggtttgttgagtgttcgaatatcagttttatattattatgtcaggtgttattagtgttcaattttttaagttcttgttgtacatcctatcattacatgagacaatgttgtgatgtttacaatattgtgttatgtatgttatatcattttggtattatagtataatttaatttgtatcagtttagttctgtattggttgttgccaaaaaaaattatgagatattaaggtcgataataatgttcgtttttatataatcgttttgcactaatattttgttaatttttttgtataccgttgcaacgcacgggcacctaactagtatgagactatgagtacatcaagtgcattcccttagaactcttgttgtgtaaaaaaatgtgtaacatgtcttggtacagagattaatttggtttgtgttttttagactgcaattatatctgggttctcagccttgccatggttagtcaagcccctctatgattttatcaggtttcaccaaaatactgaatagccttcctatcatccctttctttctgtatatgatatatgcatttaattgcaatgatgtactgttgctatttccgtacacagttgattcaggtggttgattatatggtggttcagagagctcgaggtgaatcacagagtacatatagatctctccactccagtcactatgttgggaatcctcagcctttggaggaatcatgagtgcatacttcagtggttctccagtcacttatggcgtaagatttgtctttggtgttacagcacttttgccactgttccgagtagcagagaaggacaactctggcaaactgtgaagaaaataaaagattttcacaagcggaatcttcagaatctgaataaaggagttcgtgggaatcagttgtaccaaaaactggttcagttttcgtattccaagcatactactggaagttcacactgatcggcgacaaactctcgcccaaggagaagttgaaggaggatcagcgtgaacacccactgaaagagagatggagttgaatgagaaatctgaaaagaatacgcaagaggtagatgagaagttccaaaacacaaacttgtatctcaagaacttagagatggagcttcgggagttacaagtgcttcataagcaatcagatagatctgaaagttttactgtgccaacacatgcacacactggtggtgcctgcatctagctattcagatcaaagcctgacaggtaccatagggcaaagtgaagaagaaacagaagagttgagcaagatcacgctagagaataaggatattcagcttgatatcaatataagagtgtttgatggagccgaccctatggagctgcatgtttatgattttaaaggacctggtgtaaccttatcaatgtacaatagcgatgaggccttttgctaagtcctccatggatatggctctttcaaaaaagtcgtctcttcatctcagcaccaagaatacaatcatcaagaagtatgacgacaggcatggatcatctatgtttctacaagctcgcggtcacatttattaggccttttgctaagttcatggatatggctctttcaaaaaagtcgtctcttcatctcagcaccaagaatacaatcatcaagaagtatgacgacatgcatggatcatctatgtttctacaagctcgcggtgatcaacttgctattgggaaagaaactgcacgtcgtttgggaatgggtactaatatgtacccttcctctgctttactcagacagaataaggatgagtcaattgcttccttgccaattgatgaattgatcgagaaggctgatggctttgctggtgtctttccagaacacaagtatgagatcgtgaaaggcttgcaagcaagaaaacatatatgtggcatgactggggatggtgtaaatgatgccccagctttgaagaaggctgatattggtattgcagtagcagactctactgatgcaactcgtagtgcttctgacattgtcctaactgaacctggccttagtgtgattattagtgctgtgctgacgagtcgggcaattttccaaaggatgaagaattacacgatctatgctgtatcgattaccatccgtattgtgcttggttttatgcttcttgcgctgatatggaagtttgacttcccaccatttatggtcctgatcattgccatcctcaatgacggtaccattatgactatctcgaaggacagagtaaaaccatctccacaaccagacagttggaagttagctgagatttttgcaactggagtagttcttggtggttatttggccatgatgactgtcattttcttctgggctgcatacaagactgactttttcccgcggctgttccacgtcgaaagcctcgagaagaccgcccaggatgactttcagaagttcgcctctgccgtgtaccttcaagtcagcacggtcagtcaggcccttatcttcgtgacacggtcgcgcagctggtcgtttgtggagcgtcctgggttcttgctggtcttcgctttcttggtggctaagctgattgccactctgatcgctgtatatgccaactgggcgttcactgcgatcaagggcattggatggggctgggccggtgtcatctggctctataacatcgtcttctacttcccgctggacatcatcaagttcctcatccgctatgcgctgagtgggagggcatggaacctcgtccttgagcagaggattgcgttcacgagcaagaagaatttcggcacggaagaaagggagcgcaagtgggcgcatgcgcagaggactctccatgggctccagccgccagaagcatccatcttcgagaacaagacgacattcaatgagctgaaccagctcgcggaagaggcccgcaggagagccgagatggcgaggttgcgagaagtgagcaccctgaaggggaggatggagtcagtggtgaagcagaagggtctggacatctagaccatccagcagtcctacactgtgtgactgactgactgacgacgacggggtttatagaggtttcttcttatactatacaatctgtactaggtagcaataaggatcaaggaaggaacccctatatattggctgcggttcgcaggaaatgaatgatggtaatatttatgatgtcggtgtggtgcttctgtcgccaactctcgaccatactaccctcaactcacccccggcaccaccggcaggcattgatattcagagatgaggtatagtagtctgtagcctctagtagatgctgatgaattgatgatatagtacatttttgcttgctttcttgcttgtttgttgttttccttggttctgctctgggtgttttgatgcttgctggctttgtgctattcctgattcctctaaatctgaagtggtagc

SEQ ID NO: 66298 - DNA, 5872 bp, Zea Mays
atggcctcacccacggtcgcctccccgatccgggcgagccccgtcgacaaccccaccgtcgcgccctcactggcctcctgccgctgcgccttatcgctagatgctcgacatccccatccgcgcgctcgaggcagaggccagggacaccaagatgagcccgaccgcgaccgcctagccatcagctccaaagaagaagccaggggaccgatggacgtcagtgttccgtcgtggtggcccgctagatccatattcagcaagaaagatatctcgccatgccggcccagggccgcagcccgtcaccttcctccccccgcacccgccgtgacagccgcctccccacgcccgcttacccgactggccgcacaagatgcccacagtggcccccatcgcgcccacccgctccccccatccaccgcgacctcagccgccacgccgacgccatccccgtcctctagcgcgttgtcgccgtcgtcacaccgccaaaggtgcctgccccctgctaccgaggtcgacgaccagcagcggcaagctgccgagctcgacgacacgcacgccatgcttggccatatggacgagtccatcgcctgctacgagaaggggctccagatccagatgtccgcgctcgatgagcgcaatccctgcctccctgagacctgcaggtaggtgacaatgtcatcaagggcccctccccctttgtcgcttctcgatctagatctcgcctctccctaaagcacgggttgcacctccccccgtcacccactccttccttggcttctcccgggaaacgaccttcagtctttacaggtatgaggtcttattgtgtgccatcattttcttttgctattcattcccgaatccccactgtgccctccagtgatgatggggtatgagctctgaataacaaacaaggtaaatgtttactcttttgagtagctgaattttgctatgatgtagtaaattatactagtaaattatacttgtactgaatatgaatataagaaaaaaatactgcactaattatttttctacgctctatattgtaaaataataggaatataataaaaagctgacataaaagctaatttacaacatccctttattttactatgttttatgataaataccttgattttccttgtaagttgtatcttttagtgattttcaaagaaactcctatttgcttggtgctttttctgtaagcatatgttgattaaatctttgtgtattctttctgtacactaatttaacttatcattattctgtcatccagtatgttgtcttatttgaatggttcatttccttctttaggtgattgacaaggtttaggaggaaacttccaaaagccggtcaaatattcttttatgcaaataacgcggttacactagatcagccaacattctgggaaataagctatatggtcagagtaagaggttcaagagttgatagttcaacaactttaactgagagcaaatctacaagaaaaaggaaacaagcaacctggaacctacaactgcaggagcttgcttgaaagtgaacaatcaaggatacgaattggagtggtcaacagaaattctggacagatatgtcaaatttcagaatccacgatggtcctccaagaaataaagatgctcttgatcatctattgagaagtggaatactaattttttgctgcagcgtgatggataaaggtttttgcgtattcttgggtttttttcctttcctttttggctacacacaactctttttaaatatacattcagtaggtggcaatgcctcctatttccctaaaaatatagcgccaaagagttcaaaattgaattctcataatctgctattaggaaaagaggtcaacttctatattttttacatcaggtaatttggctataatacaacggcatgctgaggtcaacttctgtatttttttctgcaagtaacttggctataatacagcggcatgctccattctgaagctggtcaagaaataaatatagcacttgcaatattttccagtagtcaaacctctccattacttcaattctcgttctcatttttgactatgttcttcatgtcagttcaacataataattaagaggtcgcttgcccctgagacggcttcatggtattttatttgttttttacaaagtattttttaagcgctaaacttacagtgcactttctctattcgttttggtgctgcttataagtcttttgtgttttagatccatcgaagatggcgcttaatctcgagagctagggagatgaaatgccttttgtacatgatggaaggaaacaaattacgtacatgtatatgtggatcgaattgactgttgcattctgcctgtatttaagcaacggtttccacccaaaacgtctataatttggtccttcctagatgtgtcaaatgtgtttactgcactgcgtttgcttttgtggcagcgccctaatagttgtttataaagtctgatgttaacaaactattgtcatgctatgtaatatatagtcttaacatgttggtttgttgagtgttcgaatatcagttttatattattatgtcaggtgttattagtgttcaattttttaagttcttgttgtacatcctatcattacatgagacaatgttgtgatgtttacaatattgtgttatgtatgttatatcattttggtattatagtataatttaatttgtatcagtttagttctgtattggttgttgccaaaaaaaattatgagatattaaggtcgataataatgttcgtttttatataatcgttttgcactaatattttgttaatttttttgtataccgttgcaacgcacgggcacctaactagtatgagactatgagtacatcaagtgcattcccttagaactcttgttgtgtaaaaaaatgtgtaacatgtcttggtacagagattaatttggtttgtgttttttagactgcaattatatctgggttctcagccttgccatggttagtcaagcccctctatgattttatcagttgattcaggtggttgattatatggtggttcagagagctcgaggtgaatcacagagtacatatagatctctccactccagtcactatgttgggaatcctcagcctttggaggaatcatgagtgcatacttcagtggttctccagtcacttatggcgtaagatttgtctttggtgttacagcacttttgccactgttccgagtagcagagaaggacaactctggcaaactgtgaagaaaataaaagattttcacaagcggaatcttcagaatctgaataaaggagttcgtgggaatcagttgtaccaaaaactggttcagttttcgtattccaagcatactactggaagttcacactgatcggcgacaaactctcgcccaaggagaagttgaaggaggatcagcgtgaacacccactgaaagagagatggagttgaatgagaaatctgaaaagaatacgcaagaggtagatgagaagttccaaaacacaaacttgtatctcaagaacttagagatggagcttcgggagttacaagtgcttcataagcaatcagatagatctgaaagttttactgtgccaacacatgcacacactggtggtgcctgcatctagctattcagatcaaagcctgacaggtaccatagggcaaagtgaagaagaaacagaagagttgagcaagatcacgctagagaataaggatattcagcttgatatcaatataagagaagaatcttggagctcttcacaacaagtgaacttttacacagaaagtaccagctccagtgaggcttgtttgatggagccgaccctatggagctgcatgtttatgattttaaaggacctggtgtaaccttatcaatgtacaatagcgatgagtttattaggccttttgctaagtcctccatggatatggctctttcaaaaaagtcgtctcttcatctcagcaccaagaatacaatcatcaagaagtatgacgacaggcatggatcatctatgtttctacaagctcgcggtcacatttattaggccttttgctaagttcatggatatggctctttcaaaaaagtcgtctcttcatctcagcaccaagaatacaatcatcaagaagtatgacgacatgcatggatcatctatgtttctacaagctcgcggtgatcaacttgctattgggaaagaaactgcacgtcgtttgggaatgggtactaatatgtacccttcctctgctttactcagacagaataaggatgagtcaattgcttccttgccaattgatgaattgatcgagaaggctgatggctttgctggtgtctttccagaacacaagtatgagatcgtgaaaggcttgcaagcaagaaaacatatatgtggcatgactggggatggtgtaaatgatgccccagctttgaagaaggctgatattggtattgcagtagcagactctactgatgcaactcgtagtgcttctgacattgtcctaactgaacctggccttagtgtgattattagtgctgtgctgacgagtcgggcaattttccaaaggatgaagaattacacgatctatgctgtatcgattaccatccgtattgtgcttggttttatgcttcttgcgctgatatggaagtttgacttcccaccatttatggtcctgatcattgccatcctcaatgacggtaccattatgactatctcgaaggacagagtaaaaccatctccacaaccagacagttggaagttagctgagatttttgcaactggagtagttcttggtggttatttggccatgatgactgtcattttcttctgggctgcatacaagactgactttttcccgcggctgttccacgtcgaaagcctcgagaagaccgcccaggatgactttcagaagttcgcctctgccgtgtaccttcaagtcagcacggtcagtcaggcccttatcttcgtgacacggtcgcgcagctggtcgtttgtggagcgtcctgggttcttgctggtcttcgctttcttggtggctaagctgattgccactctgatcgctgtatatgccaactgggcgttcactgcgatcaagggcattggatggggctgggccggtgtcatctggctctataacatcgtcttctacttcccgctggacatcatcaagttcctcatccgctatgcgctgagtgggagggcatggaacctcgtccttgagcagaggattgcgttcacgagcaagaagaatttcggcacggaagaaagggagcgcaagtgggcgcatgcgcagaggactctccatgggctccagccgccagaagcatccatcttcgagaacaagacgacattcaatgagctgaaccagctcgcggaagaggcccgcaggagagccgagatggcgaggttgcgagaagtgagcaccctgaaggggaggatggagtcagtggtgaagcagaagggtctggacatctagaccatccagcagtcctacactgtgtgactgactgactgacgacgacggggtttatagaggtttcttcttatactatacaatctgtactaggtagcaataaggatcaaggaaggaacccctatatattggctgcggttcgcaggaaatgaatgatggtaatatttatgatgtcggtgtggtgcttctgtcgccaactctcgaccatactaccctcaactcacccccggcaccaccggcaggcattgatattcagagatgaggtatagtagtctgtagcctctagtagatgctgatgaattgatgatatagtacatttttgcttgctttcttgcttgtttgttgttttccttggttctgctctgggtgttttgatgcttgctggctttgtgctattcctgattcctctaaatctgaagtggtagc

SEQ ID NO: 66299 - DNA, 5201 bp, Zea Mays
atggcctcacccacggtcgcctccccgatccgggcgagccccgtcgacaaccccaccgtcgcgccctcactggcctcctgccgctgcgccttatcgctagatgctcgacatccccatccgcgcgctcgaggcagaggccagggacaccaagatgagcccgaccgcgaccgcctagccatcagctccaaagaagaagccaggggaccgatggacgtcagtgttccgtcgtggtggcccgctagatccatattcagcaagaaagatatctcgccatgccggcccagggccgcagcccgtcaccttcctccccccgcacccgccgtgacagccgcctccccacgcccgcttacccgactggccgcacaagatgcccacagtggcccccatcgcgcccacccgctccccccatccaccgcgacctcagccgccacgccgacgccatccccgtcctctagcgcgttgtcgccgtcgtcacaccgccaaaggtgcctgccccctgctaccgaggtcgacgaccagcagcggcaagctgccgagctcgacgacacgcacgccatgcttggccatatggacgagtccatcgcctgctacgagaaggggctccagatccagatgtccgcgctcgatgagcgcaatccctgcctccctgagacctgcaggtgattgacaaggtttaggaggaaacttccaaaagccggtcaagtatggagtgcttaacatcactttggcaacttatatttttttacatgtttgctttgtttgttaacaacataatttatgggctgacaatgtgatcatgtattctttctggtagtcttcgtgtcactgcttgcagttgcaggggagggatcatggctttcttttattttccatgtgcaatgtttaatttaggtgatgaactccaaagcttatcccattgttttctagcaagagctaagcaatactggatggagaacatttatctttttaataacgagtaaaagcataatggcatgcttgtgtttagttctctgtttgttgaccaatcgctatatttaatcttgattttttttatctataacttgaatttcaaagattcaatattttttattcagacattttctcttctctagatattcttttatgcaaataacgcggttacactagatcagccaacattctgggaaataagctatatggtcagagtaagaggttcaagagttgatagttcaacaactttaactgagagcaaatctacaagaaaaaggaaacaagcaacctggaacctacaactgcaggagcttgcttgaaagtgaacaatcaaggttgtgtgtatatattatgcccgacatttttgaaggatattgcgagggccattgtatctgctggaaaaatcatttcaacttgtcgaacatggtattaggatacgaattggagtggtcaacagaaattctggacagatatgtcaaatttcagaatccacgatggtcctccaagaaataaagatgctcttgatcatctattgagaagtggaatactaattttttgctgcagcgtgatggataaaggtttttgcgtattcttgggtttttttcctttcctttttggctacacacaactctttttaaatatacattcagtaggtggcaatgcctcctatttccctaaaaatatagcgccaaagagttcaaaattgaattctcataatctgctattaggaaaagaggtcaacttctatattttttacatcaggtaatttggctataatacaacggcatgctgaggtcaacttctgtatttttttctgcaagtaacttggctataatacagcggcatgctccattctgaagctggtcaagaaataaatatagcacttgcaatattttccagtagtcaaacctctccattacttcaattctcgttctcatttttgactatgttcttcatgtcagttcaacataataattaagaggtcgcttgcccctgagacggcttcatggtattttatttgttttttacaaagtattttttaagcgctaaacttacagtgcactttctctattcgttttggtgctgcttataagtcttttgtgttttagatccatcgaagatggcgcttaatctcgagagctagggagatgaaatgccttttgtacatgatggaaggaaacaaattacgtacatactgcaattatatctgggttctcagccttgccatggttagtcaagcccctctatgattttatcaggtttcaccaaaatactgaatagccttcctatcatccctttctttctgtatatgatatatgcatttaattgcaatgatgtactgttgctatttccgtacacagttgattcaggtggttgattatatggtggttcagagagctcgaggtgaatcacagagtacatatagatctctccactccagtcactatgttgggaatcctcagcctttggaggaatcatgagtgcatacttcagtggttctccagtcacttatggcgtaagatttgtctttggtgttacagcacttttgccactgttccgagtagcagagaaggacaactctggcaaactgtgaagaaaataaaagattttcacaagcggaatcttcagaatctgaataaaggagttcgtgggaatcagttgtaccaaaaactggttcagttttcgtattccaagcatactactggaagttcacactgatcggcgacaaactctcgcccaaggagaagttgaaggaggatcagcgtgaacacccactgaaagagagatggagttgaatgagaaatctgaaaagaatacgcaagaggtagatgagaagttccaaaacacaaacttgtatctcaagaacttagagatggagcttcgggagttacaagtgcttcataagcaatcagatagatctgaaagttttactgtgccaacacatgcacacactggtggtgcctgcatctagctattcagatcaaagcctgacaggtaccatagggcaaagtgaagaagaaacagaagagttgagcaagatcacgctagagaataaggatattcagcttgatatcaatataagagaagaatcttggagctcttcacaacaagtgaacttttacacagaaagtaccagctccagtgaggcttgtttgatggagccgaccctatggagctgcatgtttatgattttaaaggacctggtgtaaccttatcaatgtacaatagcgatgagtttattaggccttttgctaagtcctccatggatatggctctttcaaaaaagtcgtctcttcatctcagcaccaagaatacaatcatcaagaagtatgacgacaggcatggatcatctatgtttctacaagctcgcggtcacatttattaggccttttgctaagttcatggatatggctctttcaaaaaagtcgtctcttcatctcagcaccaagaatacaatcatcaagaagtatgacgacatgcatggatcatctatgtttctacaagctcgcggtgatcaacttgctattgggaaagaaactgcacgtcgtttgggaatgggtactaatatgtacccttcctctgctttactcagacagaataaggatgagtcaattgcttccttgccaattgatgaattgatcgagaaggctgatggctttgctggtgtctttccagaacacaagtatgagatcgtgaaaggcttgcaagcaagaaaacatatatgtggcatgactggggatggtgtaaatgatgccccagctttgaagaaggctgatattggtattgcagtagcagactctactgatgcaactcgtagtgcttctgacattgtcctaactgaacctggccttagtgtgattattagtgctgtgctgacgagtcgggcaattttccaaaggatgaagaattacacgatctatgctgtatcgattaccatccgtattgtgcttggttttatgcttcttgcgctgatatggaagtttgacttcccaccatttatggtcctgatcattgccatcctcaatgacggtaccattatgactatctcgaaggacagagtaaaaccatctccacaaccagacagttggaagttagctgagatttttgcaactggagtagttcttggtggttatttggccatgatgactgtcattttcttctgggctgcatacaagactgactttttcccgcggctgttccacgtcgaaagcctcgagaagaccgcccaggatgactttcagaagttcgcctctgccgtgtaccttcaagtcagcacggtcagtcaggcccttatcttcgtgacacggtcgcgcagctggtcgtttgtggagcgtcctgggttcttgctggtcttcgctttcttggtggctaagctgattgccactctgatcgctgtatatgccaactgggcgttcactgcgatcaagggcattggatggggctgggccggtgtcatctggctctataacatcgtcttctacttcccgctggacatcatcaagttcctcatccgctatgcgctgagtgggagggcatggaacctcgtccttgagcagaggattgcgttcacgagcaagaagaatttcggcacggaagaaagggagcgcaagtgggcgcatgcgcagaggactctccatgggctccagccgccagaagcatccatcttcgagaacaagacgacattcaatgagctgaaccagctcgcggaagaggcccgcaggagagccgagatggcgaggttgcgagaagtgagcaccctgaaggggaggatggagtcagtggtgaagcagaagggtctggacatctagaccatccagcagtcctacactgtgtgactgactgactgacgacgacggggtttatagaggtttcttcttatactatacaatctgtactaggtagcaataaggatcaaggaaggaacccctatatattggctgcggttcgcaggaaatgaatgatggtaatatttatgatgtcggtgtggtgcttctgtcgccaactctcgaccatactaccctcaactcacccccggcaccaccggcaggcattgatattcagagatgaggtatagtagtctgtagcctctagtagatgctgatgaattgatgatatagtacatttttgcttgctttcttgcttgtttgttgttttccttggttctgctctgggtgttttgatgcttgctggctttgtgctattcctgattcctctaaatctgaagtggtagc

SEQ ID NO: 66300 - DNA, 5035 bp, Zea Mays
atggcctcacccacggtcgcctccccgatccgggcgagccccgtcgacaaccccaccgtcgcgccctcactggcctcctgccgctgcgccttatcgctagatgctcgacatccccatccgcgcgctcgaggcagaggccagggacaccaagatgagcccgaccgcgaccgcctagccatcagctccaaagaagaagccaggggaccgatggacgtcagtgttccgtcgtggtggcccgctagatccatattcagcaagaaagatatctcgccatgccggcccagggccgcagcccgtcaccttcctccccccgcacccgccgtgacagccgcctccccacgcccgcttacccgactggccgcacaagatgcccacagtggcccccatcgcgcccacccgctccccccatccaccgcgacctcagccgccacgccgacgccatccccgtcctctagcgcgttgtcgccgtcgtcacaccgccaaaggtgcctgccccctgctaccgaggtcgacgaccagcagcggcaagctgccgagctcgacgacacgcacgccatgcttggccatatggacgagtccatcgcctgctacgagaaggggctccagatccagatgtccgcgctcgatgagcgcaatccctgcctccctgagacctgcaggtgattgacaaggtttaggaggaaacttccaaaagccggtcaagtatggagtgcttaacatcactttggcaacttatatttttttacatgtttgctttgtttgttaacaacataatttatgggctgacaatgtgatcatgtattctttctggtagtcttcgtgtcactgcttgcagttgcaggggagggatcatggctttcttttattttccatgtgcaatgtttaatttaggtgatgaactccaaagcttatcccattgttttctagcaagagctaagcaatactggatggagaacatttatctttttaataacgagtaaaagcataatggcatgcttgtgtttagttctctgtttgttgaccaatcgctatatttaatcttgattttttttatctataacttgaatttcaaagattcaatattttttattcagacattttctcttctctagatattcttttatgcaaataacgcggttacactagatcagccaacattctgggaaataagctatatggtcagagtaagaggttcaagagttgatagttcaacaactttaactgagagcaaatctacaagaaaaaggaaacaagcaacctggaacctacaactgcaggagcttgcttgaaagtgaacaatcaaggttgtgtgtatatattatgcccgacatttttgaaggatattgcgagggccattgtatctgctggaaaaatcatttcaacttgtcgaacatggtattaggatacgaattggagtggtcaacagaaattctggacagatatgtcaaatttcagaatccacgatggtcctccaagaaataaagatgctcttgatcatctattgagaagtggaatactaattttttgctgcagcgtgatggataaaggtttttgcgtattcttgggtttttttcctttcctttttggctacacacaactctttttaaatatacattcagtaggtggcaatgcctcctatttccctaaaaatatagcgccaaagagttcaaaattgaattctcataatctgctattaggaaaagaggtcaacttctatattttttacatcaggtaatttggctataatacaacggcatgctgaggtcaacttctgtatttttttctgcaagtaacttggctataatacagcggcatgctccattctgaagctggtcaagaaataaatatagcacttgcaatattttccagtagtcaaacctctccattacttcaattctcgttctcatttttgactatgttcttcatgtcagttcaacataataattaagaggtcgcttgcccctgagacggcttcatgatccatcgaagatggcgcttaatctcgagagctagggagatgaaatgccttttgtacatgatggaaggaaacaaattacgtacatttgattcaggtggttgattatatggtggttcagagagctcgaggtgaatcacagagtacatatagatctctccactccagtcactatgttgggaatcctcagcctttggaggaatcatgagtgcatacttcagtggttctccagtcacttatggcgtaagatttgtctttggtgttacagcacttttgccactgttccgagtagcagagaaggacaactctggcaaactgtgaagaaaataaaagattttcacaagcggaatcttcagaatctgaataaaggagttcgtgggaatcagttgtaccaaaaactggttcagttttcgtattccaagcatactactggaagttcacactgatcggcgacaaactctcgcccaaggagaagttgaaggaggatcagcgtgaacacccactgaaagagagatggagttgaatgagaaatctgaaaagaatacgcaagaggtagatgagaagttccaaaacacaaacttgtatctcaagaacttagagatggagcttcgggagttacaagtgcttcataagcaatcagatagatctgaaagttttactgtgccaacacatgcacacactggtggtgcctgcatctagctattcagatcaaagcctgacaggtaccatagggcaaagtgaagaagaaacagaagagttgagcaagatcacgctagagaataaggatattcagcttgatatcaatataagagaagaatcttggagctcttcacaacaagtgaacttttacacagaaagtaccagctccagtgaggcttgtttgatggagccgaccctatggagctgcatgtttatgattttaaaggacctggtgtaaccttatcaatgtacaatagcgatgagtttattaggccttttgctaagtcctccatggatatggctctttcaaaaaagtcgtctcttcatctcagcaccaagaatacaatcatcaagaagtatgacgacaggcatggatcatctatgtttctacaagctcgcggtcacatttattaggccttttgctaagttcatggatatggctctttcaaaaaagtcgtctcttcatctcagcaccaagaatacaatcatcaagaagtatgacgacatgcatggatcatctatgtttctacaagctcgcgttacaatggaatgctaagagacaaatagttaaagaactgctttaacctaccttgatggagaggggagaatgcatcgtgttagcaagggagcaccagagcaggtgatcaacttgctattgggaaagaaactgcacgtcgtttgggaatgggtactaatatgtacccttcctctgctttactcagacagaataaggatgagtcaattgcttccttgccaattgatgaattgatcgagaaggctgatggctttgctggtgtctttccagaacacaagtatgagatcgtgaaaggcttgcaagcaagaaaacatatatgtggcatgactggggatggtgtaaatgatgccccagctttgaagaaggctgatattggtattgcagtagcagactctactgatgcaactcgtagtgcttctgacattgtcctaactgaacctggccttagtgtgattattagtgctgtgctgacgagtcgggcaattttccaaaggatgaagaattacacgatctatgctgtatcgattaccatccgtattgtgcttggttttatgcttcttgcgctgatatggaagtttgacttcccaccatttatggtcctgatcattgccatcctcaatgacggtaccattatgactatctcgaaggacagagtaaaaccatctccacaaccagacagttggaagttagctgagatttttgcaactggagtagttcttggtggttatttggccatgatgactgtcattttcttctgggctgcatacaagactgactttttcccgcggctgttccacgtcgaaagcctcgagaagaccgcccaggatgactttcagaagttcgcctctgccgtgtaccttcaagtcagcacggtcagtcaggcccttatcttcgtgacacggtcgcgcagctggtcgtttgtggagcgtcctgggttcttgctggtcttcgctttcttggtggctaagctgattgccactctgatcgctgtatatgccaactgggcgttcactgcgatcaagggcattggatggggctgggccggtgtcatctggctctataacatcgtcttctacttcccgctggacatcatcaagttcctcatccgctatgcgctgagtgggagggcatggaacctcgtccttgagcagaggattgcgttcacgagcaagaagaatttcggcacggaagaaagggagcgcaagtgggcgcatgcgcagaggactctccatgggctccagccgccagaagcatccatcttcgagaacaagacgacattcaatgagctgaaccagctcgcggaagaggcccgcaggagagccgagatggcgaggttgcgagaagtgagcaccctgaaggggaggatggagtcagtggtgaagcagaagggtctggacatctagaccatccagcagtcctacactgtgtgactgactgactgacgacgacggggtttatagaggtttcttcttatactatacaatctgtactaggtagcaataaggatcaaggaaggaacccctatatattggctgcggttcgcaggaaatgaatgatggtaatatttatgatgtcggtgtggtgcttctgtcgccaactctcgaccatactaccctcaactcacccccggcaccaccggcaggcattgatattcagagatgaggtatagtagtctgtagcctctagtagatgctgatgaattgatgatatagtacatttttgcttgctttcttgcttgtttgttgttttccttggttctgctctgggtgttttgatgcttgctggctttgtgctattcctgattcctctaaatctgaagtggtagc

SEQ ID NO: 66301 - DNA, 6421 bp, Zea Mays
atggcctcacccacggtcgcctccccgatccgggcgagccccgtcgacaaccccaccgtcgcgccctcactggcctcctgccgctgcgccttatcgctagatgctcgacatccccatccgcgcgctcgaggcagaggccagggacaccaagatgagcccgaccgcgaccgcctagccatcagctccaaagaagaagccaggggaccgatggacgtcagtgttccgtcgtggtggcccgctagatccatattcagcaagaaagatatctcgccatgccggcccagggccgcagcccgtcaccttcctccccccgcacccgccgtgacagccgcctccccacgcccgcttacccgactggccgcacaagatgcccacagtggcccccatcgcgcccacccgctccccccatccaccgcgacctcagccgccacgccgacgccatccccgtcctctagcgcgttgtcgccgtcgtcacaccgccaaaggtgcctgccccctgctaccgaggtcgacgaccagcagcggcaagctgccgagctcgacgacacgcacgccatgcttggccatatggacgagtccatcgcctgctacgagaaggggctccagatccagatgtccgcgctcgatgagcgcaatccctgcctccctgagacctgcaggtaggtgacaatgtcatcaagggcccctccccctttgtcgcttctcgatctagatctcgcctctccctaaagcacgggttgcacctccccccgtcacccactccttccttggcttctcccgggaaacgaccttcagtctttacaggtatgaggtcttattgtgtgccatcattttcttttgctattcattcccgaatccccactgtgccctccagtgatgatggggtatgagctctgaataacaaacaaggtaaatgtttactcttttgagtagctgaattttgctatgatgtagtaaattatactagtaaattatacttgtactgaatatgaatataagaaaaaaatactgcactaattatttttctacgctctatattgtaaaataataggaatataataaaaagctgacataaaagctaatttacaacatccctttattttactatgttttatgataaataccttgattttccttgtaagttgtatcttttagtgattttcaaagaaactcctatttgcttggtgctttttctgtaagcatatgttgattaaatctttgtgtattctttctgtacactaatttaacttatcattattctgtcatccagtatgttgtcttatttgaatggttcatttccttctttaggtgattgacaaggtttaggaggaaacttccaaaagccggtcaagtatggagtgcttaacatcactttggcaacttatatttttttacatgtttgctttgtttgttaacaacataatttatgggctgacaatgtgatcatgtattctttctggtagtcttcgtgtcactgcttgcagttgcaggggagggatcatggctttcttttattttccatgtgcaatgtttaatttaggtgatgaactccaaagcttatcccattgttttctagcaagagctaagcaatactggatggagaacatttatctttttaataacgagtaaaagcataatggcatgcttgtgtttagttctctgtttgttgaccaatcgctatatttaatcttgattttttttatctataacttgaatttcaaagattcaatattttttattcagacattttctcttctctagatattcttttatgcaaataacgcggttacactagatcagccaacattctgggaaataagctatatggtcagagtaagaggttcaagagttgatagttcaacaactttaactgagagcaaatctacaagaaaaaggaaacaagcaacctggaacctacaactgcaggagcttgcttgaaagtgaacaatcaaggttgtgtgtatatattatgcccgacatttttgaaggatattgcgagggccattgtatctgctggaaaaatcatttcaacttgtcgaacatggtattaggatacgaattggagtggtcaacagaaattctggacagatatgtcaaatttcagaatccacgatggtcctccaagaaataaagatgctcttgatcatctattgagaagtggaatactaattttttgctgcagcgtgatggataaaggtttttgcgtattcttgggtttttttcctttcctttttggctacacacaactctttttaaatatacattcagtaggtggcaatgcctcctatttccctaaaaatatagcgccaaagagttcaaaattgaattctcataatctgctattaggaaaagaggtcaacttctatattttttacatcaggtaatttggctataatacaacggcatgctgaggtcaacttctgtatttttttctgcaagtaacttggctataatacagcggcatgctccattctgaagctggtcaagaaataaatatagcacttgcaatattttccagtagtcaaacctctccattacttcaattctcgttctcatttttgactatgttcttcatgtcagttcaacataataattaagaggtcgcttgcccctgagacggcttcatgatccatcgaagatggcgcttaatctcgagagctagggagatgaaatgccttttgtacatgatggaaggaaacaaattacgtacatgtatatgtggatcgaattgactgttgcattctgcctgtatttaagcaacggtttccacccaaaacgtctataatttggtccttcctagatgtgtcaaatgtgtttactgcactgcgtttgcttttgtggcagcgccctaatagttgtttataaagtctgatgttaacaaactattgtcatgctatgtaatatatagtcttaacatgttggtttgttgagtgttcgaatatcagttttatattattatgtcaggtgttattagtgttcaattttttaagttcttgttgtacatcctatcattacatgagacaatgttgtgatgtttacaatattgtgttatgtatgttatatcattttggtattatagtataatttaatttgtatcagtttagttctgtattggttgttgccaaaaaaaattatgagatattaaggtcgataataatgttcgtttttatataatcgttttgcactaatattttgttaatttttttgtataccgttgcaacgcacgggcacctaactagtatgagactatgagtacatcaagtgcattcccttagaactcttgttgtgtaaaaaaatgtgtaacatgtcttggtacagagattaatttggtttgtgttttttagactgcaattatatctgggttctcagccttgccatggttagtcaagcccctctatgattttatcagttgattcaggtggttgattatatggtggttcagagagctcgaggtgaatcacagagtacatatagatctctccactccagtcactatgttgggaatcctcagcctttggaggaatcatgagtgcatacttcagtggttctccagtcacttatggcgtaagatttgtctttggtgttacagcacttttgccactgttccgagtagcagagaaggacaactctggcaaactgtgaagaaaataaaagattttcacaagcggaatcttcagaatctgaataaaggagttcgtgggaatcagttgtaccaaaaactggttcagttttcgtattccaagcatactactggaagttcacactgatcggcgacaaactctcgcccaaggagaagttgaaggaggatcagcgtgaacacccactgaaagagagatggagttgaatgagaaatctgaaaagaatacgcaagaggtagatgagaagttccaaaacacaaacttgtatctcaagaacttagagatggagcttcgggagttacaagtgcttcataagcaatcagatagatctgaaagttttactgtgccaacacatgcacacactggtggtgcctgcatctagctattcagatcaaagcctgacaggtaccatagggcaaagtgaagaagaaacagaagagttgagcaagatcacgctagagaataaggatattcagcttgatatcaatataagagtgtttgatggagccgaccctatggagctgcatgtttatgattttaaaggacctggtgtaaccttatcaatgtacaatagcgatgagtttattaggccttttgctaagtcctccatggatatggctctttcaaaaaagtcgtctcttcatctcagcaccaagaatacaatcatcaagaagtatgacgacaggcatggatcatctatgtttctacaagctcgcggtcacatttattaggccttttgctaagttcatggatatggctctttcaaaaaagtcgtctcttcatctcagcaccaagaatacaatcatcaagaagtatgacgacatgcatggatcatctatgtttctacaagctcgcgttacaatggaatgctaagagacaaatagttaaagaactgctttaacctaccttgatggagaggggagaatgcatcgtgttagcaagggagcaccagagcagatccttcatcttgcccacaacaagtcagatattgaaagaagggtcagagctgtgattgacaaatttgctgagcgtggtctgtgagcacttggtgtggcttaccaggtgatcaacttgctattgggaaagaaactgcacgtcgtttgggaatgggtactaatatgtacccttcctctgctttactcagacagaataaggatgagtcaattgcttccttgccaattgatgaattgatcgagaaggctgatggctttgctggtgtctttccagaacacaagtatgagatcgtgaaaggcttgcaagcaagaaaacatatatgtggcatgactggggatggtgtaaatgatgccccagctttgaagaaggctgatattggtattgcagtagcagactctactgatgcaactcgtagtgcttctgacattgtcctaactgaacctggccttagtgtgattattagtgctgtgctgacgagtcgggcaattttccaaaggatgaagaattacacgatctatgctgtatcgattaccatccgtattgtgcttggttttatgcttcttgcgctgatatggaagtttgacttcccaccatttatggtcctgatcattgccatcctcaatgacggtaccattatgactatctcgaaggacagagtaaaaccatctccacaaccagacagttggaagttagctgagatttttgcaactggagtagttcttggtggttatttggccatgatgactgtcattttcttctgggctgcatacaagactgactttttcccgcggctgttccacgtcgaaagcctcgagaagaccgcccaggatgactttcagaagttcgcctctgccgtgtaccttcaagtcagcacggtcagtcaggcccttatcttcgtgacacggtcgcgcagctggtcgtttgtggagcgtcctgggttcttgctggtcttcgctttcttggtggctaagctgattgccactctgatcgctgtatatgccaactgggcgttcactgcgatcaagggcattggatggggctgggccggtgtcatctggctctataacatcgtcttctacttcccgctggacatcatcaagttcctcatccgctatgcgctgagtgggagggcatggaacctcgtccttgagcagaggattgcgttcacgagcaagaagaatttcggcacggaagaaagggagcgcaagtgggcgcatgcgcagaggactctccatgggctccagccgccagaagcatccatcttcgagaacaagacgacattcaatgagctgaaccagctcgcggaagaggcccgcaggagagccgagatggcgaggttgcgagaagtgagcaccctgaaggggaggatggagtcagtggtgaagcagaagggtctggacatctagaccatccagcagtcctacactgtgtgactgactgactgacgacgacggggtttatagaggtttcttcttatactatacaatctgtactaggtagcaataaggatcaaggaaggaacccctatatattggctgcggttcgcaggaaatgaatgatggtaatatttatgatgtcggtgtggtgcttctgtcgccaactctcgaccatactaccctcaactcacccccggcaccaccggcaggcattgatattcagagatgaggtatagtagtctgtagcctctagtagatgctgatgaattgatgatatagtacatttttgcttgctttcttgcttgtttgttgttttccttggttctgctctgggtgttttgatgcttgctggctttgtgctattcctgattcctctaaatctgaagtggtagc

SEQ ID NO: 66302 - DNA, 6277 bp, Zea Mays
atggcctcacccacggtcgcctccccgatccgggcgagccccgtcgacaaccccaccgtcgcgccctcactggcctcctgccgctgcgccttatcgctagatgctcgacatccccatccgcgcgctcgaggcagaggccagggacaccaagatgagcccgaccgcgaccgcctagccatcagctccaaagaagaagccaggggaccgatggacgtcagtgttccgtcgtggtggcccgctagatccatattcagcaagaaagatatctcgccatgccggcccagggccgcagcccgtcaccttcctccccccgcacccgccgtgacagccgcctccccacgcccgcttacccgactggccgcacaagatgcccacagtggcccccatcgcgcccacccgctccccccatccaccgcgacctcagccgccacgccgacgccatccccgtcctctagcgcgttgtcgccgtcgtcacaccgccaaaggtgcctgccccctgctaccgaggtcgacgaccagcagcggcaagctgccgagctcgacgacacgcacgccatgcttggccatatggacgagtccatcgcctgctacgagaaggggctccagatccagatgtccgcgctcgatgagcgcaatccctgcctccctgagacctgcaggtaggtgacaatgtcatcaagggcccctccccctttgtcgcttctcgatctagatctcgcctctccctaaagcacgggttgcacctccccccgtcacccactccttccttggcttctcccgggaaacgaccttcagtctttacaggtatgaggtcttattgtgtgccatcattttcttttgctattcattcccgaatccccactgtgccctccagtgatgatggggtatgagctctgaataacaaacaaggtaaatgtttactcttttgagtagctgaattttgctatgatgtagtaaattatactagtaaattatacttgtactgaatatgaatataagaaaaaaatactgcactaattatttttctacgctctatattgtaaaataataggaatataataaaaagctgacataaaagctaatttacaacatccctttattttactatgttttatgataaataccttgattttccttgtaagttgtatcttttagtgattttcaaagaaactcctatttgcttggtgctttttctgtaagcatatgttgattaaatctttgtgtattctttctgtacactaatttaacttatcattattctgtcatccagtatgttgtcttatttgaatggttcatttccttctttaggtgattgacaaggtttaggaggaaacttccaaaagccggtcaagtatggagtgcttaacatcactttggcaacttatatttttttacatgtttgctttgtttgttaacaacataatttatgggctgacaatgtgatcatgtattctttctggtagtcttcgtgtcactgcttgcagttgcaggggagggatcatggctttcttttattttccatgtgcaatgtttaatttaggtgatgaactccaaagcttatcccattgttttctagcaagagctaagcaatactggatggagaacatttatctttttaataacgagtaaaagcataatggcatgcttgtgtttagttctctgtttgttgaccaatcgctatatttaatcttgattttttttatctataacttgaatttcaaagattcaatattttttattcagacattttctcttctctagatattcttttatgcaaataacgcggttacactagatcagccaacattctgggaaataagctatatggtcagagtaagaggttcaagagttgatagttcaacaactttaactgagagcaaatctacaagaaaaaggaaacaagcaacctggaacctacaactgcaggagcttgcttgaaagtgaacaatcaaggttgtgtgtatatattatgcccgacatttttgaaggatattgcgagggccattgtatctgctggaaaaatcatttcaacttgtcgaacatggtattaggatacgaattggagtggtcaacagaaattctggacagatatgtcaaatttcagaatccacgatggtcctccaagaaataaagatgctcttgatcatctattgagaagtggaatactaattttttgctgcagcgtgatggataaaggtttttgcgtattcttgggtttttttcctttcctttttggctacacacaactctttttaaatatacattcagtaggtggcaatgcctcctatttccctaaaaatatagcgccaaagagttcaaaattgaattctcataatctgctattaggaaaagaggtcaacttctatattttttacatcaggtaatttggctataatacaacggcatgctgaggtcaacttctgtatttttttctgcaagtaacttggctataatacagcggcatgctccattctgaagctggtcaagaaataaatatagcacttgcaatattttccagtagtcaaacctctccattacttcaattctcgttctcatttttgactatgttcttcatgtcagttcaacataataattaagaggtcgcttgcccctgagacggcttcatgatccatcgaagatggcgcttaatctcgagagctagggagatgaaatgccttttgtacatgatggaaggaaacaaattacgtacatgtatatgtggatcgaattgactgttgcattctgcctgtatttaagcaacggtttccacccaaaacgtctataatttggtccttcctagatgtgtcaaatgtgtttactgcactgcgtttgcttttgtggcagcgccctaatagttgtttataaagtctgatgttaacaaactattgtcatgctatgtaatatatagtcttaacatgttggtttgttgagtgttcgaatatcagttttatattattatgtcaggtgttattagtgttcaattttttaagttcttgttgtacatcctatcattacatgagacaatgttgtgatgtttacaatattgtgttatgtatgttatatcattttggtattatagtataatttaatttgtatcagtttagttctgtattggttgttgccaaaaaaaattatgagatattaaggtcgataataatgttcgtttttatataatcgttttgcactaatattttgttaatttttttgtataccgttgcaacgcacgggcacctaactagtatgagactatgagtacatcaagtgcattcccttagaactcttgttgtgtaaaaaaatgtgtaacatgtcttggtacagagattaatttggtttgtgttttttagactgcaattatatctgggttctcagccttgccatggttagtcaagcccctctatgattttatcagttgattcaggtggttgattatatggtggttcagagagctcgaggtgaatcacagagtacatatagatctctccactccagtcactatgttgggaatcctcagcctttggaggaatcatgagtgcatacttcagtggttctccagtcacttatggcgtaagatttgtctttggtgttacagcacttttgccactgttccgagtagcagagaaggacaactctggcaaactgtgaagaaaataaaagattttcacaagcggaatcttcagaatctgaataaaggagttcgtgggaatcagttgtaccaaaaactggttcagttttcgtattccaagcatactactggaagttcacactgatcggcgacaaactctcgcccaaggagaagttgaaggaggatcagcgtgaacacccactgaaagagagatggagttgaatgagaaatctgaaaagaatacgcaagaggtagatgagaagttccaaaacacaaacttgtatctcaagaacttagagatggagcttcgggagttacaagtgcttcataagcaatcagatagatctgaaagttttactgtgccaacacatgcacacactggtggtgcctgcatctagctattcagatcaaagcctgacaggtaccatagggcaaagtgaagaagaaacagaagagttgagcaagatcacgctagagaataaggatattcagcttgatatcaatataagagaatcttggagctcttcacaacaagtgaacttttacacagaaagtaccagctccagtgaggcttgtttgatggagccgaccctatggagctgcatgtttatgattttaaaggacctggtgtaaccttatcaatgtacaatagcgatgagtttattaggccttttgctaagtcctccatggatatggctctttcaaaaaagtcgtctcttcatctcagcaccaagaatacaatcatcaagaagtatgacgacaggcatggatcatctatgtttctacaagctcgcggtcacatttattaggccttttgctaagttcatggatatggctctttcaaaaaagtcgtctcttcatctcagcaccaagaatacaatcatcaagaagtatgacgacatgcatggatcatctatgtttctacaagctcgcggtgatcaacttgctattgggaaagaaactgcacgtcgtttgggaatgggtactaatatgtacccttcctctgctttactcagacagaataaggatgagtcaattgcttccttgccaattgatgaattgatcgagaaggctgatggctttgctggtgtctttccagaacacaagtatgagatcgtgaaaggcttgcaagcaagaaaacatatatgtggcatgactggggatggtgtaaatgatgccccagctttgaagaaggctgatattggtattgcagtagcagactctactgatgcaactcgtagtgcttctgacattgtcctaactgaacctggccttagtgtgattattagtgctgtgctgacgagtcgggcaattttccaaaggatgaagaattacacgatctatgctgtatcgattaccatccgtattgtgcttggttttatgcttcttgcgctgatatggaagtttgacttcccaccatttatggtcctgatcattgccatcctcaatgacggtaccattatgactatctcgaaggacagagtaaaaccatctccacaaccagacagttggaagttagctgagatttttgcaactggagtagttcttggtggttatttggccatgatgactgtcattttcttctgggctgcatacaagactgactttttcccgcggctgttccacgtcgaaagcctcgagaagaccgcccaggatgactttcagaagttcgcctctgccgtgtaccttcaagtcagcacggtcagtcaggcccttatcttcgtgacacggtcgcgcagctggtcgtttgtggagcgtcctgggttcttgctggtcttcgctttcttggtggctaagctgattgccactctgatcgctgtatatgccaactgggcgttcactgcgatcaagggcattggatggggctgggccggtgtcatctggctctataacatcgtcttctacttcccgctggacatcatcaagttcctcatccgctatgcgctgagtgggagggcatggaacctcgtccttgagcagaggattgcgttcacgagcaagaagaatttcggcacggaagaaagggagcgcaagtgggcgcatgcgcagaggactctccatgggctccagccgccagaagcatccatcttcgagaacaagacgacattcaatgagctgaaccagctcgcggaagaggcccgcaggagagccgagatggcgaggttgcgagaagtgagcaccctgaaggggaggatggagtcagtggtgaagcagaagggtctggacatctagaccatccagcagtcctacactgtgtgactgactgactgacgacgacggggtttatagaggtttcttcttatactatacaatctgtactaggtagcaataaggatcaaggaaggaacccctatatattggctgcggttcgcaggaaatgaatgatggtaatatttatgatgtcggtgtggtgcttctgtcgccaactctcgaccatactaccctcaactcacccccggcaccaccggcaggcattgatattcagagatgaggtatagtagtctgtagcctctagtagatgctgatgaattgatgatatagtacatttttgcttgctttcttgcttgtttgttgttttccttggttctgctctgggtgttttgatgcttgctggctttgtgctattcctgattcctctaaatctgaagtggtagc

SEQ ID NO: 66303 - DNA, 6223 bp, Zea Mays
atggcctcacccacggtcgcctccccgatccgggcgagccccgtcgacaaccccaccgtcgcgccctcactggcctcctgccgctgcgccttatcgctagatgctcgacatccccatccgcgcgctcgaggcagaggccagggacaccaagatgagcccgaccgcgaccgcctagccatcagctccaaagaagaagccaggggaccgatggacgtcagtgttccgtcgtggtggcccgctagatccatattcagcaagaaagatatctcgccatgccggcccagggccgcagcccgtcaccttcctccccccgcacccgccgtgacagccgcctccccacgcccgcttacccgactggccgcacaagatgcccacagtggcccccatcgcgcccacccgctccccccatccaccgcgacctcagccgccacgccgacgccatccccgtcctctagcgcgttgtcgccgtcgtcacaccgccaaaggtgcctgccccctgctaccgaggtcgacgaccagcagcggcaagctgccgagctcgacgacacgcacgccatgcttggccatatggacgagtccatcgcctgctacgagaaggggctccagatccagatgtccgcgctcgatgagcgcaatccctgcctccctgagacctgcaggtaggtgacaatgtcatcaagggcccctccccctttgtcgcttctcgatctagatctcgcctctccctaaagcacgggttgcacctccccccgtcacccactccttccttggcttctcccgggaaacgaccttcagtctttacaggtatgaggtcttattgtgtgccatcattttcttttgctattcattcccgaatccccactgtgccctccagtgatgatggggtatgagctctgaataacaaacaaggtaaatgtttactcttttgagtagctgaattttgctatgatgtagtaaattatactagtaaattatacttgtactgaatatgaatataagaaaaaaatactgcactaattatttttctacgctctatattgtaaaataataggaatataataaaaagctgacataaaagctaatttacaacatccctttattttactatgttttatgataaataccttgattttccttgtaagttgtatcttttagtgattttcaaagaaactcctatttgcttggtgctttttctgtaagcatatgttgattaaatctttgtgtattctttctgtacactaatttaacttatcattattctgtcatccagtatgttgtcttatttgaatggttcatttccttctttaggtgattgacaaggtttaggaggaaacttccaaaagccggtcaagtatggagtgcttaacatcactttggcaacttatatttttttacatgtttgctttgtttgttaacaacataatttatgggctgacaatgtgatcatgtattctttctggtagtcttcgtgtcactgcttgcagttgcaggggagggatcatggctttcttttattttccatgtgcaatgtttaatttaggtgatgaactccaaagcttatcccattgttttctagcaagagctaagcaatactggatggagaacatttatctttttaataacgagtaaaagcataatggcatgcttgtgtttagttctctgtttgttgaccaatcgctatatttaatcttgattttttttatctataacttgaatttcaaagattcaatattttttattcagacattttctcttctctagatattcttttatgcaaataacgcggttacactagatcagccaacattctgggaaataagctatatggtcagagtaagaggttcaagagttgatagttcaacaactttaactgagagcaaatctacaagaaaaaggaaacaagcaacctggaacctacaactgcaggagcttgcttgaaagtgaacaatcaaggttgtgtgtatatattatgcccgacatttttgaaggatattgcgagggccattgtatctgctggaaaaatcatttcaacttgtcgaacatggtattaggatacgaattggagtggtcaacagaaattctggacagatatgtcaaatttcagaatccacgatggtcctccaagaaataaagatgctcttgatcatctattgagaagtggaatactaattttttgctgcagcgtgatggataaaggtttttgcgtattcttgggtttttttcctttcctttttggctacacacaactctttttaaatatacattcagtaggtggcaatgcctcctatttccctaaaaatatagcgccaaagagttcaaaattgaattctcataatctgctattaggaaaagaggtcaacttctatattttttacatcaggtaatttggctataatacaacggcatgctgaggtcaacttctgtatttttttctgcaagtaacttggctataatacagcggcatgctccattctgaagctggtcaagaaataaatatagcacttgcaatattttccagtagtcaaacctctccattacttcaattctcgttctcatttttgactatgttcttcatgtcagttcaacataataattaagaggtcgcttgcccctgagacggcttcatgatccatcgaagatggcgcttaatctcgagagctagggagatgaaatgccttttgtacatgatggaaggaaacaaattacgtacatgtatatgtggatcgaattgactgttgcattctgcctgtatttaagcaacggtttccacccaaaacgtctataatttggtccttcctagatgtgtcaaatgtgtttactgcactgcgtttgcttttgtggcagcgccctaatagttgtttataaagtctgatgttaacaaactattgtcatgctatgtaatatatagtcttaacatgttggtttgttgagtgttcgaatatcagttttatattattatgtcaggtgttattagtgttcaattttttaagttcttgttgtacatcctatcattacatgagacaatgttgtgatgtttacaatattgtgttatgtatgttatatcattttggtattatagtataatttaatttgtatcagtttagttctgtattggttgttgccaaaaaaaattatgagatattaaggtcgataataatgttcgtttttatataatcgttttgcactaatattttgttaatttttttgtataccgttgcaacgcacgggcacctaactagtatgagactatgagtacatcaagtgcattcccttagaactcttgttgtgtaaaaaaatgtgtaacatgtcttggtacagagattaatttggtttgtgttttttagactgcaattatatctgggttctcagccttgccatggttagtcaagcccctctatgattttatcagttgattcaggtggttgattatatggtggttcagagagctcgaggtgaatcacagagtacatatagatctctccactccagtcactatgttgggaatcctcagcctttggaggaatcatgagtgcatacttcagtggttctccagtcacttatggcgtaagatttgtctttggtgttacagcacttttgccactgttccgagtagcagagaaggacaactctggcaaactgtgaagaaaataaaagattttcacaagcggaatcttcagaatctgaataaaggagttcgtgggaatcagttgtaccaaaaactggttcagttttcgtattccaagcatactactggaagttcacactgatcggcgacaaactctcgcccaaggagaagttgaaggaggatcagcgtgaacacccactgaaagagagatggagttgaatgagaaatctgaaaagaatacgcaagaggtagatgagaagttccaaaacacaaacttgtatctcaagaacttagagatggagcttcgggagttacaagtgcttcataagcaatcagatagatctgaaagttttactgtgccaacacatgcacacactggtggtgcctgcatctagctattcagatcaaagcctgacaggtaccatagggcaaagtgaagaagaaacagaagagttgagcaagatcacgctagagaataaggatattcagcttgatatcaatataagagaagaatcttggagctcttcacaacaagtgaacttttacacagaaagtaccagctccagtgaggcttgtttgatggagccgaccctatggagctgcatgtttatgattttaaaggacctggtgtaaccttatcaatgtacaatagcgatgagtttattaggccttttgctaagtcctccatggatatggctctttcaaaaaagtcgtctcttcatctcagcaccaagaatacaatcatcaagaagtatgacgacaggcatggatcatctatgtttctacaagctcgcggtcacatttattaggccttttgctaagttcatggatatggctctttcaaaaaagtcgtctcttcatctcagcaccaagaatacaatcatcaagaagtatgacgacatgcatggatcatctatgtttctacaagctcgcgttacaatggaatgctaagagacaaatagttaaagaactgctttaacctaccttgatggagaggggagaatgcatcgtgttagcaagggagcaccagagcaggtgatcaacttgctattgggaaagaaactgcacgtcgtttgggaatgggtactaatatgtacccttcctctgctttactcagacagaataaggatgagtcaattgcttccttgccaattgatgaattgatcgagaaggctgatggctttgctggtgtctttccagaacacaagtatgagatcgtgaaaggcttgcaagcaagaaaacatatatgtggcatgactggggatggtgtaaatgatgccccagctttgaagaaggctgatattggtattgcagtagcagactctactgatgcaactcgtagtgcttctgacattgtcctaactgaacctggccttagtgtgattattagtgctgtgctgacgagtcgggcaattttccaaaggatgaagaattacacgatctatgctgtatcgattaccatccgtattgtgcttggttttatgcttcttgcgctgatatggaagtttgacttcccaccatttatggtcctgatcattgccatcctcaatgacggtaccattatgactatctcgaaggacagagtaaaaccatctccacaaccagacagttggaagttagctgagatttttgcaactggagtagttcttggtggttatttggccatgatgactgtcattttcttctgggctgcatacaagactgactttttcccgcggctgttccacgtcgaaagcctcgagaagaccgcccaggatgactttcagaagttcgcctctgccgtgtaccttcaagtcagcacggtcagtcaggcccttatcttcgtgacacggtcgcgcagctggtcgtttgtggagcgtcctgggttcttgctggtcttcgctttcttggtggctaagctgattgccactctgatcgctgtatatgccaactgggcgttcactgcgatcaagggcattggatggggctgggccggtgtcatctggctctataacatcgtcttctacttcccgctggacatcatcaagttcctcatccgctatgcgctgagtgggagggcatggaacctcgtccttgagcagaggattgcgttcacgagcaagaagaatttcggcacggaagaaagggagcgcaagtgggcgcatgcgcagaggactctccatgggctccagccgccagaagcatccatcttcgagaacaagacgacattcaatgagctgaaccagctcgcggaagaggcccgcaggagagccgagatggcgaggttgcgagaagtgagcaccctgaaggggaggatggagtcagtggtgaagcagaagggtctggacatctagaccatccagcagtcctacactgtgtgactgactgactgacgacgacggggtttatagaggaaatgaatgatggtaatatttatgatgtcggtgtggtgcttctgtcgccaactctcgaccatactaccctcaactcacccccggcaccaccggcaggcattgatattcagagatgagcccaaaagcatttgctgctcttttattttcttggcatgcacctccagcagatgtgcatgcgccgccatcgtccatcatcttggaggag

SEQ ID NO: 66304 - DNA, 6245 bp, Zea Mays
atggcctcacccacggtcgcctccccgatccgggcgagccccgtcgacaaccccaccgtcgcgccctcactggcctcctgccgctgcgccttatcgctagatgctcgacatccccatccgcgcgctcgaggcagaggccagggacaccaagatgagcccgaccgcgaccgcctagccatcagctccaaagaagaagccaggggaccgatggacgtcagtgttccgtcgtggtggcccgctagatccatattcagcaagaaagatatctcgccatgccggcccagggccgcagcccgtcaccttcctccccccgcacccgccgtgacagccgcctccccacgcccgcttacccgactggccgcacaagatgcccacagtggcccccatcgcgcccacccgctccccccatccaccgcgacctcagccgccacgccgacgccatccccgtcctctagcgcgttgtcgccgtcgtcacaccgccaaaggtgcctgccccctgctaccgaggtcgacgaccagcagcggcaagctgccgagctcgacgacacgcacgccatgcttggccatatggacgagtccatcgcctgctacgagaaggggctccagatccagatgtccgcgctcgatgagcgcaatccctgcctccctgagacctgcaggtaggtgacaatgtcatcaagggcccctccccctttgtcgcttctcgatctagatctcgcctctccctaaagcacgggttgcacctccccccgtcacccactccttccttggcttctcccgggaaacgaccttcagtctttacaggtatgaggtcttattgtgtgccatcattttcttttgctattcattcccgaatccccactgtgccctccagtgatgatggggtatgagctctgaataacaaacaaggtaaatgtttactcttttgagtagctgaattttgctatgatgtagtaaattatactagtaaattatacttgtactgaatatgaatataagaaaaaaatactgcactaattatttttctacgctctatattgtaaaataataggaatataataaaaagctgacataaaagctaatttacaacatccctttattttactatgttttatgataaataccttgattttccttgtaagttgtatcttttagtgattttcaaagaaactcctatttgcttggtgctttttctgtaagcatatgttgattaaatctttgtgtattctttctgtacactaatttaacttatcattattctgtcatccagtatgttgtcttatttgaatggttcatttccttctttaggtgattgacaaggtttaggaggaaacttccaaaagccggtcaagtatggagtgcttaacatcactttggcaacttatatttttttacatgtttgctttgtttgttaacaacataatttatgggctgacaatgtgatcatgtattctttctggtagtcttcgtgtcactgcttgcagttgcaggggagggatcatggctttcttttattttccatgtgcaatgtttaatttaggtgatgaactccaaagcttatcccattgttttctagcaagagctaagcaatactggatggagaacatttatctttttaataacgagtaaaagcataatggcatgcttgtgtttagttctctgtttgttgaccaatcgctatatttaatcttgattttttttatctataacttgaatttcaaagattcaatattttttattcagacattttctcttctctagatattcttttatgcaaataacgcggttacactagatcagccaacattctgggaaataagctatatggtcagagtaagaggttcaagagttgatagttcaacaactttaactgagagcaaatctacaagaaaaaggaaacaagcaacctggaacctacaactgcaggagcttgcttgaaagtgaacaatcaaggttgtgtgtatatattatgcccgacatttttgaaggatattgcgagggccattgtatctgctggaaaaatcatttcaacttgtcgaacatggtattaggatacgaattggagtggtcaacagaaattctggacagatatgtcaaatttcagaatccacgatggtcctccaagaaataaagatgctcttgatcatctattgagaagtggaatactaattttttgctgcagcgtgatggataaaggtttttgcgtattcttgggtttttttcctttcctttttggctacacacaactctttttaaatatacattcagtaggtggcaatgcctcctatttccctaaaaatatagcgccaaagagttcaaaattgaattctcataatctgctattaggaaaagaggtcaacttctatattttttacatcaggtaatttggctataatacaacggcatgctgaggtcaacttctgtatttttttctgcaagtaacttggctataatacagcggcatgctccattctgaagctggtcaagaaataaatatagcacttgcaatattttccagtagtcaaacctctccattacttcaattctcgttctcatttttgactatgttcttcatgtcagttcaacataataattaagaggtcgcttgcccctgagacggcttcatgatccatcgaagatggcgcttaatctcgagagctagggagatgaaatgccttttgtacatgatggaaggaaacaaattacgtacatgtatatgtggatcgaattgactgttgcattctgcctgtatttaagcaacggtttccacccaaaacgtctataatttggtccttcctagatgtgtcaaatgtgtttactgcactgcgtttgcttttgtggcagcgccctaatagttgtttataaagtctgatgttaacaaactattgtcatgctatgtaatatatagtcttaacatgttggtttgttgagtgttcgaatatcagttttatattattatgtcaggtgttattagtgttcaattttttaagttcttgttgtacatcctatcattacatgagacaatgttgtgatgtttacaatattgtgttatgtatgttatatcattttggtattatagtataatttaatttgtatcagtttagttctgtattggttgttgccaaaaaaaattatgagatattaaggtcgataataatgttcgtttttatataatcgttttgcactaatattttgttaatttttttgtataccgttgcaacgcacgggcacctaactagtatgagactatgagtacatcaagtgcattcccttagaactcttgttgtgtaaaaaaatgtgtaacatgtcttggtacagagattaatttggtttgtgttttttagactgcaattatatctgggttctcagccttgccatggttagtcaagcccctctatgattttatcagttgattcaggtggttgattatatggtggttcagagagctcgaggtgaatcacagagtacatatagatctctccactccagtcactatgttgggaatcctcagcctttggaggaatcatgagtgcatacttcagtggttctccagtcacttatggcgtaagatttgtctttggtgttacagcacttttgccactgttccgagtagcagagaaggacaactctggcaaactgtgaagaaaataaaagattttcacaagcggaatcttcagaatctgaataaaggagttcgtgggaatcagttgtaccaaaaactggttcagttttcgtattccaagcatactactggaagttcacactgatcggcgacaaactctcgcccaaggagaagttgaaggaggatcagcgtgaacacccactgaaagagagatggagttgaatgagaaatctgaaaagaatacgcaagaggtagatgagaagttccaaaacacaaacttgtatctcaagaacttagagatggagcttcgggagttacaagtgcttcataagcaatcagatagatctgaaagttttactgtgccaacacatgcacacactggtggtgcctgcatctagctattcagatcaaagcctgacaggtaccatagggcaaagtgaagaagaaacagaagagttgagcaagatcacgctagagaataaggatattcagcttgatatcaatataagagaagaatcttggagctcttcacaacaagtgaacttttacacagaaagtaccagctccagtgaggcttgtttgatggagccgaccctatggagctgcatgtttatgattttaaaggacctggtgtaaccttatcaatgtacaatagcgatgagtttattaggccttttgctaagtcctccatggatatggctctttcaaaaaagtcgtctcttcatctcagcaccaagaatacaatcatcaagaagtatgacgacaggcatggatcatctatgtttctacaagctcgcggtcacatttattaggccttttgctaagttcatggatatggctctttcaaaaaagtcgtctcttcatctcagcaccaagaatacaatcatcaagaagtatgacgacatgcatggatcatctatgtttctacaagctcgcgttacaatggaatgctaagagacaaatagttaaagaactgctttaacctaccttgatggagaggggagaatgcatcgtgttagcaagggagcaccagagcaggtgatcaacttgctattgggaaagaaactgcacgtcgtttgggaatgggtactaatatgtacccttcctctgctttactcagacagaataaggatgagtcaattgcttccttgccaattgatgaattgatcgagaaggctgatggctttgctggtgtctttccagaacacaagtatgagatcgtgaaaggcttgcaagcaagaaaacatatatgtggcatgactggggatggtgtaaatgatgccccagctttgaagaaggctgatattggtattgcagtagcagactctactgatgcaactcgtagtgcttctgacattgtcctaactgaacctggccttagtgtgattattagtgctgtgctgacgagtcgggcaattttccaaaggatgaagaattacacgatctatgctgtatcgattaccatccgtattgtgcttggttttatgcttcttgcgctgatatggaagtttgacttcccaccatttatggtcctgatcattgccatcctcaatgacggtaccattatgactatctcgaaggacagagtaaaaccatctccacaaccagacagttggaagttagctgagatttttgcaactggagtagttcttggtggttatttggccatgatgactgtcattttcttctgggctgcatacaagactgactttttcccgcggctgttccacgtcgaaagcctcgagaagaccgcccaggatgactttcagaagttcgcctctgccgtgtaccttcaagtcagcacggtcagtcaggcccttatcttcgtgacacggtcgcgcagctggtcgtttgtggagcgtcctgggttcttgctggtcttcgctttcttggtggctaagctgattgccactctgatcgctgtatatgccaactgggcgttcactgcgatcaagggcattggatggggctgggccggtgtcatctggctctataacatcgtcttctacttcccgctggacatcatcaagttcctcatccgctatgcgctgagtgggagggcatggaacctcgtccttgagcagaggattgcgttcacgagcaagaagaatttcggcacggaagaaagggagcgcaagtgggcgcatgcgcagaggactctccatgggctccagccgccagaagcatccatcttcgagaacaagacgacattcaatgagctgaaccagctcgcggaagaggcccgcaggagagccgagatggcgaggttgcgagaagtgagcaccctgaaggggaggatggagtcagtggtgaagcagaagggtctggacatctagaccatccagcagtcctacactgtgtgactgactgactgacgacgacggggtttatagaggtttcttcttatactatacaatctgtactaggtagcaataaggatcaaggaaggaacccctatatattggctgcggttcgcaggaaatgaatgatggtaatatttatgatgtcggtgtggtgcttctgtcgccaactctcgaccatactaccctcaactcacccccggcaccaccggcaggcattgatattcagagatgaggtttgttttttatttttgccgagtctt

SEQ ID NO: 66305 - DNA, 5877 bp, Zea Mays
atggcctcacccacggtcgcctccccgatccgggcgagccccgtcgacaaccccaccgtcgcgccctcactggcctcctgccgctgcgccttatcgctagatgctcgacatccccatccgcgcgctcgaggcagaggccagggacaccaagatgagcccgaccgcgaccgcctagccatcagctccaaagaagaagccaggggaccgatggacgtcagtgttccgtcgtggtggcccgctagatccatattcagcaagaaagatatctcgccatgccggcccagggccgcagcccgtcaccttcctccccccgcacccgccgtgacagccgcctccccacgcccgcttacccgactggccgcacaagatgcccacagtggcccccatcgcgcccacccgctccccccatccaccgcgacctcagccgccacgccgacgccatccccgtcctctagcgcgttgtcgccgtcgtcacaccgccaaaggtgcctgccccctgctaccgaggtcgacgaccagcagcggcaagctgccgagctcgacgacacgcacgccatgcttggccatatggacgagtccatcgcctgctacgagaaggggctccagatccagatgtccgcgctcgatgagcgcaatccctgcctccctgagacctgcaggtgattgacaaggtttaggaggaaacttccaaaagccggtcaagtatggagtgcttaacatcactttggcaacttatatttttttacatgtttgctttgtttgttaacaacataatttatgggctgacaatgtgatcatgtattctttctggtagtcttcgtgtcactgcttgcagttgcaggggagggatcatggctttcttttattttccatgtgcaatgtttaatttaggtgatgaactccaaagcttatcccattgttttctagcaagagctaagcaatactggatggagaacatttatctttttaataacgagtaaaagcataatggcatgcttgtgtttagttctctgtttgttgaccaatcgctatatttaatcttgattttttttatctataacttgaatttcaaagattcaatattttttattcagacattttctcttctctagatattcttttatgcaaataacgcggttacactagatcagccaacattctgggaaataagctatatggtcagagtaagaggttcaagagttgatagttcaacaactttaactgagagcaaatctacaagaaaaaggaaacaagcaacctggaacctacaactgcaggagcttgcttgaaagtgaacaatcaaggttgtgtgtatatattatgcccgacatttttgaaggatattgcgagggccattgtatctgctggaaaaatcatttcaacttgtcgaacatggtattaggatacgaattggagtggtcaacagaaattctggacagatatgtcaaatttcagaatccacgatggtcctccaagaaataaagatgctcttgatcatctattgagaagtggaatactaattttttgctgcagcgtgatggataaaggtttttgcgtattcttgggtttttttcctttcctttttggctacacacaactctttttaaatatacattcagtaggtggcaatgcctcctatttccctaaaaatatagcgccaaagagttcaaaattgaattctcataatctgctattaggaaaagaggtcaacttctatattttttacatcaggtaatttggctataatacaacggcatgctgaggtcaacttctgtatttttttctgcaagtaacttggctataatacagcggcatgctccattctgaagctggtcaagaaataaatatagcacttgcaatattttccagtagtcaaacctctccattacttcaattctcgttctcatttttgactatgttcttcatgtcagttcaacataataattaagaggtcgcttgcccctgagacggcttcatggtattttatttgttttttacaaagtattttttaagcgctaaacttacagtgcactttctctattcgttttggtgctgcttataagtcttttgtgttttagatccatcgaagatggcgcttaatctcgagagctagggagatgaaatgccttttgtacatgatggaaggaaacaaattacgtacatgtatatgtggatcgaattgactgttgcattctgcctgtatttaagcaacggtttccacccaaaacgtctataatttggtccttcctagatgtgtcaaatgtgtttactgcactgcgtttgcttttgtggcagcgccctaatagttgtttataaagtctgatgttaacaaactattgtcatgctatgtaatatatagtcttaacatgttggtttgttgagtgttcgaatatcagttttatattattatgtcaggtgttattagtgttcaattttttaagttcttgttgtacatcctatcattacatgagacaatgttgtgatgtttacaatattgtgttatgtatgttatatcattttggtattatagtataatttaatttgtatcagtttagttctgtattggttgttgccaaaaaaaattatgagatattaaggtcgataataatgttcgtttttatataatcgttttgcactaatattttgttaatttttttgtataccgttgcaacgcacgggcacctaactagtatgagactatgagtacatcaagtgcattcccttagaactcttgttgtgtaaaaaaatgtgtaacatgtcttggtacagagattaatttggtttgtgttttttagactgcaattatatctgggttctcagccttgccatggttagtcaagcccctctatgattttatcagttgattcaggtggttgattatatggtggttcagagagctcgaggtgaatcacagagtacatatagatctctccactccagtcactatgttgggaatcctcagcctttggaggaatcatgagtgcatacttcagtggttctccagtcacttatggcgtaagatttgtctttggtgttacagcacttttgccactgttccgagtagcagagaaggacaactctggcaaactgtgaagaaaataaaagattttcacaagcggaatcttcagaatctgaataaaggagttcgtgggaatcagttgtaccaaaaactggttcagttttcgtattccaagcatactactggaagttcacactgatcggcgacaaactctcgcccaaggagaagttgaaggaggatcagcgtgaacacccactgaaagagagatggagttgaatgagaaatctgaaaagaatacgcaagaggtagatgagaagttccaaaacacaaacttgtatctcaagaacttagagatggagcttcgggagttacaagtgcttcataagcaatcagatagatctgaaagttttactgtgccaacacatgcacacactggtggtgcctgcatctagctattcagatcaaagcctgacaggtaccatagggcaaagtgaagaagaaacagaagagttgagcaagatcacgctagagaataaggatattcagcttgatatcaatataagagaagaatcttggagctcttcacaacaagtgaacttttacacagaaagtaccagctccagtgaggcttgtttgatggagccgaccctatggagctgcatgtttatgattttaaaggacctggtgtaaccttatcaatgtacaatagcgatgaggccttttgctaagtcctccatggatatggctctttcaaaaaagtcgtctcttcatctcagcaccaagaatacaatcatcaagaagtatgacgacaggcatggatcatctatgtttctacaagctcgcggtcacatttattaggccttttgctaagttcatggatatggctctttcaaaaaagtcgtctcttcatctcagcaccaagaatacaatcatcaagaagtatgacgacatgcatggatcatctatgtttctacaagctcgcgttacaatggaatgctaagagacaaatagttaaagaactgctttaacctaccttgatggagaggggagaatgcatcgtgttagcaagggagcaccagagcaggtgatcaacttgctattgggaaagaaactgcacgtcgtttgggaatgggtactaatatgtacccttcctctgctttactcagacagaataaggatgagtcaattgcttccttgccaattgatgaattgatcgagaaggctgatggctttgctggtgtctttccagaacacaagtatgagatcgtgaaaggcttgcaagcaagaaaacatatatgtggcatgactggggatggtgtaaatgatgccccagctttgaagaaggctgatattggtattgcagtagcagactctactgatgcaactcgtagtgcttctgacattgtcctaactgaacctggccttagtgtgattattagtgctgtgctgacgagtcgggcaattttccaaaggatgaagaattacacgatctatgctgtatcgattaccatccgtattgtgcttggttttatgcttcttgcgctgatatggaagtttgacttcccaccatttatggtcctgatcattgccatcctcaatgacggtaccattatgactatctcgaaggacagagtaaaaccatctccacaaccagacagttggaagttagctgagatttttgcaactggagtagttcttggtggttatttggccatgatgactgtcattttcttctgggctgcatacaagactgactttttcccgcggctgttccacgtcgaaagcctcgagaagaccgcccaggatgactttcagaagttcgcctctgccgtgtaccttcaagtcagcacggtcagtcaggcccttatcttcgtgacacggtcgcgcagctggtcgtttgtggagcgtcctgggttcttgctggtcttcgctttcttggtggctaagctgattgccactctgatcgctgtatatgccaactgggcgttcactgcgatcaagggcattggatggggctgggccggtgtcatctggctctataacatcgtcttctacttcccgctggacatcatcaagttcctcatccgctatgcgctgagtgggagggcatggaacctcgtccttgagcagaggattgcgttcacgagcaagaagaatttcggcacggaagaaagggagcgcaagtgggcgcatgcgcagaggactctccatgggctccagccgccagaagcatccatcttcgagaacaagacgacattcaatgagctgaaccagctcgcggaagaggcccgcaggagagccgagatggcgaggttgcgagaagtgagcaccctgaaggggaggatggagtcagtggtgaagcagaagggtctggacatctagaccatccagcagtcctacactgtgtgactgactgactgacgacgacggggtttatagaggtttcttcttatactatacaatctgtactaggtagcaataaggatcaaggaaggaacccctatatattggctgcggttcgcaggaaatgaatgatggtaatatttatgatgtcggtgtggtgcttctgtcgccaactctcgaccatactaccctcaactcacccccggcaccaccggcaggcattgatattcagagatgagatcacaatgagtcgacgaagtctgccaatgcaattggtgctggattcatcttcagatgatgacgacgacgaattctttctctctagtactcatatgaccatgaatgcggatgagtcagataacgaaacaaaacaacgtggttctataaaggggcaccgagtacttcaatgagataggcaagcgggatatcagaggttgtatcaagattatttttca

SEQ ID NO: 66306 - DNA, 6183 bp, Zea Mays
atggcctcacccacggtcgcctccccgatccgggcgagccccgtcgacaaccccaccgtcgcgccctcactggcctcctgccgctgcgccttatcgctagatgctcgacatccccatccgcgcgctcgaggcagaggccagggacaccaagatgagcccgaccgcgaccgcctagccatcagctccaaagaagaagccaggggaccgatggacgtcagtgttccgtcgtggtggcccgctagatccatattcagcaagaaagatatctcgccatgccggcccagggccgcagcccgtcaccttcctccccccgcacccgccgtgacagccgcctccccacgcccgcttacccgactggccgcacaagatgcccacagtggcccccatcgcgcccacccgctccccccatccaccgcgacctcagccgccacgccgacgccatccccgtcctctagcgcgttgtcgccgtcgtcacaccgccaaaggtgcctgccccctgctaccgaggtcgacgaccagcagcggcaagctgccgagctcgacgacacgcacgccatgcttggccatatggacgagtccatcgcctgctacgagaaggggctccagatccagatgtccgcgctcgatgagcgcaatccctgcctccctgagacctgcaggtaggtgacaatgtcatcaagggcccctccccctttgtcgcttctcgatctagatctcgcctctccctaaagcacgggttgcacctccccccgtcacccactccttccttggcttctcccgggaaacgaccttcagtctttacaggtatgaggtcttattgtgtgccatcattttcttttgctattcattcccgaatccccactgtgccctccagtgatgatggggtatgagctctgaataacaaacaaggtaaatgtttactcttttgagtagctgaattttgctatgatgtagtaaattatactagtaaattatacttgtactgaatatgaatataagaaaaaaatactgcactaattatttttctacgctctatattgtaaaataataggaatataataaaaagctgacataaaagctaatttacaacatccctttattttactatgttttatgataaataccttgattttccttgtaagttgtatcttttagtgattttcaaagaaactcctatttgcttggtgctttttctgtaagcatatgttgattaaatctttgtgtattctttctgtacactaatttaacttatcattattctgtcatccagtatgttgtcttatttgaatggttcatttccttctttaggtgattgacaaggtttaggaggaaacttccaaaagccggtcaagtatggagtgcttaacatcactttggcaacttatatttttttacatgtttgctttgtttgttaacaacataatttatgggctgacaatgtgatcatgtattctttctggtagtcttcgtgtcactgcttgcagttgcaggggagggatcatggctttcttttattttccatgtgcaatgtttaatttaggtgatgaactccaaagcttatcccattgttttctagcaagagctaagcaatactggatggagaacatttatctttttaataacgagtaaaagcataatggcatgcttgtgtttagttctctgtttgttgaccaatcgctatatttaatcttgattttttttatctataacttgaatttcaaagattcaatattttttattcagacattttctcttctctagatattcttttatgcaaataacgcggttacactagatcagccaacattctgggaaataagctatatggtcagagtaagaggttcaagagttgatagttcaacaactttaactgagagcaaatctacaagaaaaaggaaacaagcaacctggaacctacaactgcaggagcttgcttgaaagtgaacaatcaaggttgtgtgtatatattatgcccgacatttttgaaggatattgcgagggccattgtatctgctggaaaaatcatttcaacttgtcgaacatggtattaggatacgaattggagtggtcaacagaaattctggacagatatgtcaaatttcagaatccacgatggtcctccaagaaataaagatgctcttgatcatctattgagaagtggaatactaattttttgctgcagcgtgatggataaaggtttttgcgtattcttgggtttttttcctttcctttttggctacacacaactctttttaaatatacattcagtaggtggcaatgcctcctatttccctaaaaatatagcgccaaagagttcaaaattgaattctcataatctgctattaggaaaagaggtcaacttctatattttttacatcaggtaatttggctataatacaacggcatgctgaggtcaacttctgtatttttttctgcaagtaacttggctataatacagcggcatgctccattctgaagctggtcaagaaataaatatagcacttgcaatattttccagtagtcaaacctctccattacttcaattctcgttctcatttttgactatgttcttcatgtcagttcaacataataattaagaggtcgcttgcccctgagacggcttcatgatccatcgaagatggcgcttaatctcgagagctagggagatgaaatgccttttgtacatgatggaaggaaacaaattacgtacatgtatatgtggatcgaattgactgttgcattctgcctgtatttaagcaacggtttccacccaaaacgtctataatttggtccttcctagatgtgtcaaatgtgtttactgcactgcgtttgcttttgtggcagcgccctaatagttgtttataaagtctgatgttaacaaactattgtcatgctatgtaatatatagtcttaacatgttggtttgttgagtgttcgaatatcagttttatattattatgtcaggtgttattagtgttcaattttttaagttcttgttgtacatcctatcattacatgagacaatgttgtgatgtttacaatattgtgttatgtatgttatatcattttggtattatagtataatttaatttgtatcagtttagttctgtattggttgttgccaaaaaaaattatgagatattaaggtcgataataatgttcgtttttatataatcgttttgcactaatattttgttaatttttttgtataccgttgcaacgcacgggcacctaactagtatgagactatgagtacatcaagtgcattcccttagaactcttgttgtgtaaaaaaatgtgtaacatgtcttggtacagagattaatttggtttgtgttttttagactgcaattatatctgggttctcagccttgccatggttagtcaagcccctctatgattttatcagttgattcaggtggttgattatatggtggttcagagagctcgaggtgaatcacagagtacatatagatctctccactccagtcactatgttgggaatcctcagcctttggaggaatcatgagtgcatacttcagtggttctccagtcacttatggcgtaagatttgtctttggtgttacagcacttttgccactgttccgagtagcagagaaggacaactctggcaaactgtgaagaaaataaaagattttcacaagcggaatcttcagaatctgaataaaggagttcgtgggaatcagttgtaccaaaaactggttcagttttcgtattccaagcatactactggaagttcacactgatcggcgacaaactctcgcccaaggagaagttgaaggaggatcagcgtgaacacccactgaaagagagatggagttgaatgagaaatctgaaaagaatacgcaagaggtagatgagaagttccaaaacacaaacttgtatctcaagaacttagagatggagcttcgggagttacaagtgcttcataagcaatcagatagatctgaaagttttactgtgccaacacatgcacacactggtggtgcctgcatctagctattcagatcaaagcctgacaggtaccatagggcaaagtgaagaagaaacagaagagttgagcaagatcacgctagagaataaggatattcagcttgatatcaatataagagtgtttgatggagccgaccctatggagctgcatgtttatgattttaaaggacctggtgtaaccttatcaatgtacaatagcgatgagtttattaggccttttgctaagtcctccatggatatggctctttcaaaaaagtcgtctcttcatctcagcaccaagaatacaatcatcaagaagtatgacgacaggcatggatcatctatgtttctacaagctcgcggtcacatttattaggccttttgctaagttcatggatatggctctttcaaaaaagtcgtctcttcatctcagcaccaagaatacaatcatcaagaagtatgacgacatgcatggatcatctatgtttctacaagctcgcggtgatcaacttgctattgggaaagaaactgcacgtcgtttgggaatgggtactaatatgtacccttcctctgctttactcagacagaataaggatgagtcaattgcttccttgccaattgatgaattgatcgagaaggctgatggctttgctggtgtctttccagaacacaagtatgagatcgtgaaaggcttgcaagcaagaaaacatatatgtggcatgactggggatggtgtaaatgatgccccagctttgaagaaggctgatattgtgctgtgctgacgagtcgggcaattttccaaaggatgaagaattacacgatctatgctgtatcgattaccatccgtattgtgcttggttttatgcttcttgcgctgatatggaagtttgacttcccaccatttatggtcctgatcattgccatcctcaatgacggtaccattatgactatctcgaaggacagagtaaaaccatctccacaaccagacagttggaagttagctgagatttttgcaactggagtagttcttggtggttatttggccatgatgactgtcattttcttctgggctgcatacaagactgactttttcccgcggctgttccacgtcgaaagcctcgagaagaccgcccaggatgactttcagaagttcgcctctgccgtgtaccttcaagtcagcacggtcagtcaggcccttatcttcgtgacacggtcgcgcagctggtcgtttgtggagcgtcctgggttcttgctggtcttcgctttcttggtggctaagctgattgccactctgatcgctgtatatgccaactgggcgttcactgcgatcaagggcattggatggggctgggccggtgtcatctggctctataacatcgtcttctacttcccgctggacatcatcaagttcctcatccgctatgcgctgagtgggagggcatggaacctcgtccttgagcagaggattgcgttcacgagcaagaagaatttcggcacggaagaaagggagcgcaagtgggcgcatgcgcagaggactctccatgggctccagccgccagaagcatccatcttcgagaacaagacgacattcaatgagctgaaccagctcgcggaagaggcccgcaggagagccgagatggcgaggttgcgagaagtgagcaccctgaaggggaggatggagtcagtggtgaagcagaagggtctggacatctagaccatccagcagtcctacactgtgtgactgactgactgacgacgacggggtttatagaggtttcttcttatactatacaatctgtactaggtagcaataaggatcaaggaaggaacccctatatattggctgcggttcgcaggaaatgaatgatggtaatatttatgatgtcggtgtggtgcttctgtcgccaactctcgaccatactaccctcaactcacccccggcaccaccggcaggcattgatattcagagatgagatcacaatgagtcgacgaagtctgccaatgcaattggtgctggattcatcttcagatgatgacgacgacgaattctttctctctagtactcatatgaccatgaatgcggatgagtcagataacgaaacaaaacaacgtggttctataaaggggcaccgagtacttcaatgagataggcaagcgggatatcagaggttgtatcaagattatttttca

SEQ ID NO: 66307 - DNA, 6466 bp, Zea Mays
atggcctcacccacggtcgcctccccgatccgggcgagccccgtcgacaaccccaccgtcgcgccctcactggcctcctgccgctgcgccttatcgctagatgctcgacatccccatccgcgcgctcgaggcagaggccagggacaccaagatgagcccgaccgcgaccgcctagccatcagctccaaagaagaagccaggggaccgatggacgtcagtgttccgtcgtggtggcccgctagatccatattcagcaagaaagatatctcgccatgccggcccagggccgcagcccgtcaccttcctccccccgcacccgccgtgacagccgcctccccacgcccgcttacccgactggccgcacaagatgcccacagtggcccccatcgcgcccacccgctccccccatccaccgcgacctcagccgccacgccgacgccatccccgtcctctagcgcgttgtcgccgtcgtcacaccgccaaaggtgcctgccccctgctaccgaggtcgacgaccagcagcggcaagctgccgagctcgacgacacgcacgccatgcttggccatatggacgagtccatcgcctgctacgagaaggggctccagatccagatgtccgcgctcgatgagcgcaatccctgcctccctgagacctgcaggtaggtgacaatgtcatcaagggcccctccccctttgtcgcttctcgatctagatctcgcctctccctaaagcacgggttgcacctccccccgtcacccactccttccttggcttctcccgggaaacgaccttcagtctttacaggtatgaggtcttattgtgtgccatcattttcttttgctattcattcccgaatccccactgtgccctccagtgatgatggggtatgagctctgaataacaaacaaggtaaatgtttactcttttgagtagctgaattttgctatgatgtagtaaattatactagtaaattatacttgtactgaatatgaatataagaaaaaaatactgcactaattatttttctacgctctatattgtaaaataataggaatataataaaaagctgacataaaagctaatttacaacatccctttattttactatgttttatgataaataccttgattttccttgtaagttgtatcttttagtgattttcaaagaaactcctatttgcttggtgctttttctgtaagcatatgttgattaaatctttgtgtattctttctgtacactaatttaacttatcattattctgtcatccagtatgttgtcttatttgaatggttcatttccttctttaggtgattgacaaggtttaggaggaaacttccaaaagccggtcaagtatggagtgcttaacatcactttggcaacttatatttttttacatgtttgctttgtttgttaacaacataatttatgggctgacaatgtgatcatgtattctttctggtagtcttcgtgtcactgcttgcagttgcaggggagggatcatggctttcttttattttccatgtgcaatgtttaatttaggtgatgaactccaaagcttatcccattgttttctagcaagagctaagcaatactggatggagaacatttatctttttaataacgagtaaaagcataatggcatgcttgtgtttagttctctgtttgttgaccaatcgctatatttaatcttgattttttttatctataacttgaatttcaaagattcaatattttttattcagacattttctcttctctagatattcttttatgcaaataacgcggttacactagatcagccaacattctgggaaataagctatatggtcagagtaagaggttcaagagttgatagttcaacaactttaactgagagcaaatctacaagaaaaaggaaacaagcaacctggaacctacaactgcaggagcttgcttgaaagtgaacaatcaaggttgtgtgtatatattatgcccgacatttttgaaggatattgcgagggccattgtatctgctggaaaaatcatttcaacttgtcgaacatggtattaggatacgaattggagtggtcaacagaaattctggacagatatgtcaaatttcagaatccacgatggtcctccaagaaataaagatgctcttgatcatctattgagaagtggaatactaattttttgctgcagcgtgatggataaaggtttttgcgtattcttgggtttttttcctttcctttttggctacacacaactctttttaaatatacattcagtaggtggcaatgcctcctatttccctaaaaatatagcgccaaagagttcaaaattgaattctcataatctgctattaggaaaagaggtcaacttctatattttttacatcaggtaatttggctataatacaacggcatgctgaggtcaacttctgtatttttttctgcaagtaacttggctataatacagcggcatgctccattctgaagctggtcaagaaataaatatagcacttgcaatattttccagtagtcaaacctctccattacttcaattctcgttctcatttttgactatgttcttcatgtcagttcaacataataattaagaggtcgcttgcccctgagacggcttcatgatccatcgaagatggcgcttaatctcgagagctagggagatgaaatgccttttgtacatgatggaaggaaacaaattacgtacatgtatatgtggatcgaattgactgttgcattctgcctgtatttaagcaacggtttccacccaaaacgtctataatttggtccttcctagatgtgtcaaatgtgtttactgcactgcgtttgcttttgtggcagcgccctaatagttgtttataaagtctgatgttaacaaactattgtcatgctatgtaatatatagtcttaacatgttggtttgttgagtgttcgaatatcagttttatattattatgtcaggtgttattagtgttcaattttttaagttcttgttgtacatcctatcattacatgagacaatgttgtgatgtttacaatattgtgttatgtatgttatatcattttggtattatagtataatttaatttgtatcagtttagttctgtattggttgttgccaaaaaaaattatgagatattaaggtcgataataatgttcgtttttatataatcgttttgcactaatattttgttaatttttttgtataccgttgcaacgcacgggcacctaactagtatgagactatgagtacatcaagtgcattcccttagaactcttgttgtgtaaaaaaatgtgtaacatgtcttggtacagagattaatttggtttgtgttttttagactgcaattatatctgggttctcagccttgccatggttagtcaagcccctctatgattttatcagttgattcaggtggttgattatatggtggttcagagagctcgaggtgaatcacagagtacatatagatctctccactccagtcactatgttgggaatcctcagcctttggaggaatcatgagtgcatacttcagtggttctccagtcacttatggcgtaagatttgtctttggtgttacagcacttttgccactgttccgagtagcagagaaggacaactctggcaaactgtgaagaaaataaaagattttcacaagcggaatcttcagaatctgaataaaggagttcgtgggaatcagttgtaccaaaaactggttcagttttcgtattccaagcatactactggaagttcacactgatcggcgacaaactctcgcccaaggagaagttgaaggaggatcagcgtgaacacccactgaaagagagatggagttgaatgagaaatctgaaaagaatacgcaagaggtagatgagaagttccaaaacacaaacttgtatctcaagaacttagagatggagcttcgggagttacaagtgcttcataagcaatcagatagatctgaaagttttactgtgccaacacatgcacacactggtggtgcctgcatctagctattcagatcaaagcctgacaggtaccatagggcaaagtgaagaagaaacagaagagttgagcaagatcacgctagagaataaggatattcagcttgatatcaatataagagtgtttgatggagccgaccctatggagctgcatgtttatgattttaaaggacctggtgtaaccttatcaatgtacaatagcgatgaggccttttgctaagtcctccatggatatggctctttcaaaaaagtcgtctcttcatctcagcaccaagaatacaatcatcaagaagtatgacgacaggcatggatcatctatgtttctacaagctcgcggtcacatttattaggccttttgctaagttcatggatatggctctttcaaaaaagtcgtctcttcatctcagcaccaagaatacaatcatcaagaagtatgacgacatgcatggatcatctatgtttctacaagctcgcgttacaatggaatgctaagagacaaatagttaaagaactgctttaacctaccttgatggagaggggagaatgcatcgtgttagcaagggagcaccagagcagatccttcatcttgcccacaacaagtcagatattgaaagaagggtcagagctgtgattgacaaatttgctgagcgtggtctgtgagcacttggtgtggcttaccaggtgatcaacttgctattgggaaagaaactgcacgtcgtttgggaatgggtactaatatgtacccttcctctgctttactcagacagaataaggatgagtcaattgcttccttgccaattgatgaattgatcgagaaggctgatggctttgctggtgtctttccagaacacaagtatgagatcgtgaaaggcttgcaagcaagaaaacatatatgtggcatgactggggatggtgtaaatgatgccccagctttgaagaaggctgatattggtattgcagtagcagactctactgatgcaactcgtagtgcttctgacattgtcctaactgaacctggccttagtgtgattattagtgctgtgctgacgagtcgggcaattttccaaaggatgaagaattacacgatctatgctgtatcgattaccatccgtattgtgcttggttttatgcttcttgcgctgatatggaagtttgacttcccaccatttatggtcctgatcattgccatcctcaatgacggtaccattatgactatctcgaaggacagagtaaaaccatctccacaaccagacagttggaagttagctgagatttttgcaactggagtagttcttggtggttatttggccatgatgactgtcattttcttctgggctgcatacaagactgactttttcccgcggctgttccacgtcgaaagcctcgagaagaccgcccaggatgactttcagaagttcgcctctgccgtgtaccttcaagtcagcacggtcagtcaggcccttatcttcgtgacacggtcgcgcagctggtcgtttgtggagcgtcctgggttcttgctggtcttcgctttcttggtggctaagctgattgccactctgatcgctgtatatgccaactgggcgttcactgcgatcaagggcattggatggggctgggccggtgtcatctggctctataacatcgtcttctacttcccgctggacatcatcaagttcctcatccgctatgcgctgagtgggagggcatggaacctcgtccttgagcagaggattgcgttcacgagcaagaagaatttcggcacggaagaaagggagcgcaagtgggcgcatgcgcagaggactctccatgggctccagccgccagaagcatccatcttcgagaacaagacgacattcaatgagctgaaccagctcgcggaagaggcccgcaggagagccgagatggcgaggttgcgagaagtgagcaccctgaaggggaggatggagtcagtggtgaagcagaagggtctggacatctagaccatccagcagtcctacactgtgtgactgactgactgacgacgacggggtttatagaggtttcttcttatactatacaatctgtactaggtagcaataaggatcaaggaaggaacccctatatattggctgcggttcgcaggaaatgaatgatggtaatatttatgatgtcggtgtggtgcttctgtcgccaactctcgaccatactaccctcaactcacccccggcaccaccggcaggcattgatattcagagatgagatcacaatgagtcgacgaagtctgccaatgcaattggtgctggattcatcttcagatgatgacgacgacgaattctttctctctagtactcatatgaccatgaatgcggatgagtcagataacgaaacaaaacaacgtggttctataaaggggcaccgagtacttcaatgagataggcaagcgggatatcagaggttgtatcaagattatttttca

SEQ ID NO: 66308 - DNA, 6344 bp, Zea Mays
atggcctcacccacggtcgcctccccgatccgggcgagccccgtcgacaaccccaccgtcgcgccctcactggcctcctgccgctgcgccttatcgctagatgctcgacatccccatccgcgcgctcgaggcagaggccagggacaccaagatgagcccgaccgcgaccgcctagccatcagctccaaagaagaagccaggggaccgatggacgtcagtgttccgtcgtggtggcccgctagatccatattcagcaagaaagatatctcgccatgccggcccagggccgcagcccgtcaccttcctccccccgcacccgccgtgacagccgcctccccacgcccgcttacccgactggccgcacaagatgcccacagtggcccccatcgcgcccacccgctccccccatccaccgcgacctcagccgccacgccgacgccatccccgtcctctagcgcgttgtcgccgtcgtcacaccgccaaaggtgcctgccccctgctaccgaggtcgacgaccagcagcggcaagctgccgagctcgacgacacgcacgccatgcttggccatatggacgagtccatcgcctgctacgagaaggggctccagatccagatgtccgcgctcgatgagcgcaatccctgcctccctgagacctgcaggtaggtgacaatgtcatcaagggcccctccccctttgtcgcttctcgatctagatctcgcctctccctaaagcacgggttgcacctccccccgtcacccactccttccttggcttctcccgggaaacgaccttcagtctttacaggtatgaggtcttattgtgtgccatcattttcttttgctattcattcccgaatccccactgtgccctccagtgatgatggggtatgagctctgaataacaaacaaggtaaatgtttactcttttgagtagctgaattttgctatgatgtagtaaattatactagtaaattatacttgtactgaatatgaatataagaaaaaaatactgcactaattatttttctacgctctatattgtaaaataataggaatataataaaaagctgacataaaagctaatttacaacatccctttattttactatgttttatgataaataccttgattttccttgtaagttgtatcttttagtgattttcaaagaaactcctatttgcttggtgctttttctgtaagcatatgttgattaaatctttgtgtattctttctgtacactaatttaacttatcattattctgtcatccagtatgttgtcttatttgaatggttcatttccttctttaggtgattgacaaggtttaggaggaaacttccaaaagccggtcaagtatggagtgcttaacatcactttggcaacttatatttttttacatgtttgctttgtttgttaacaacataatttatgggctgacaatgtgatcatgtattctttctggtagtcttcgtgtcactgcttgcagttgcaggggagggatcatggctttcttttattttccatgtgcaatgtttaatttaggtgatgaactccaaagcttatcccattgttttctagcaagagctaagcaatactggatggagaacatttatctttttaataacgagtaaaagcataatggcatgcttgtgtttagttctctgtttgttgaccaatcgctatatttaatcttgattttttttatctataacttgaatttcaaagattcaatattttttattcagacattttctcttctctagatattcttttatgcaaataacgcggttacactagatcagccaacattctgggaaataagctatatggtcagagtaagaggttcaagagttgatagttcaacaactttaactgagagcaaatctacaagaaaaaggaaacaagcaacctggaacctacaactgcaggagcttgcttgaaagtgaacaatcaaggttgtgtgtatatattatgcccgacatttttgaaggatattgcgagggccattgtatctgctggaaaaatcatttcaacttgtcgaacatggtattaggatacgaattggagtggtcaacagaaattctggacagatatgtcaaatttcagaatccacgatggtcctccaagaaataaagatgctcttgatcatctattgagaagtggaatactaattttttgctgcagcgtgatggataaaggtttttgcgtattcttgggtttttttcctttcctttttggctacacacaactctttttaaatatacattcagtaggtggcaatgcctcctatttccctaaaaatatagcgccaaagagttcaaaattgaattctcataatctgctattaggaaaagaggtcaacttctatattttttacatcaggtaatttggctataatacaacggcatgctgaggtcaacttctgtatttttttctgcaagtaacttggctataatacagcggcatgctccattctgaagctggtcaagaaataaatatagcacttgcaatattttccagtagtcaaacctctccattacttcaattctcgttctcatttttgactatgttcttcatgtcagttcaacataataattaagaggtcgcttgcccctgagacggcttcatgatccatcgaagatggcgcttaatctcgagagctagggagatgaaatgccttttgtacatgatggaaggaaacaaattacgtacatgtatatgtggatcgaattgactgttgcattctgcctgtatttaagcaacggtttccacccaaaacgtctataatttggtccttcctagatgtgtcaaatgtgtttactgcactgcgtttgcttttgtggcagcgccctaatagttgtttataaagtctgatgttaacaaactattgtcatgctatgtaatatatagtcttaacatgttggtttgttgagtgttcgaatatcagttttatattattatgtcaggtgttattagtgttcaattttttaagttcttgttgtacatcctatcattacatgagacaatgttgtgatgtttacaatattgtgttatgtatgttatatcattttggtattatagtataatttaatttgtatcagtttagttctgtattggttgttgccaaaaaaaattatgagatattaaggtcgataataatgttcgtttttatataatcgttttgcactaatattttgttaatttttttgtataccgttgcaacgcacgggcacctaactagtatgagactatgagtacatcaagtgcattcccttagaactcttgttgtgtaaaaaaatgtgtaacatgtcttggtacagagattaatttggtttgtgttttttagactgcaattatatctgggttctcagccttgccatggttagtcaagcccctctatgattttatcagttgattcaggtggttgattatatggtggttcagagagctcgaggtgaatcacagagtacatatagatctctccactccagtcactatgttgggaatcctcagcctttggaggaatcatgagtgcatacttcagtggttctccagtcacttatggcgtaagatttgtctttggtgttacagcacttttgccactgttccgagtagcagagaaggacaactctggcaaactgtgaagaaaataaaagattttcacaagcggaatcttcagaatctgaataaaggagttcgtgggaatcagttgtaccaaaaactggttcagttttcgtattccaagcatactactggaagttcacactgatcggcgacaaactctcgcccaaggagaagttgaaggaggatcagcgtgaacacccactgaaagagagatggagttgaatgagaaatctgaaaagaatacgcaagaggtagatgagaagttccaaaacacaaacttgtatctcaagaacttagagatggagcttcgggagttacaagtgcttcataagcaatcagatagatctgaaagttttactgtgccaacacatgcacacactggtggtgcctgcatctagctattcagatcaaagcctgacaggtaccatagggcaaagtgaagaagaaacagaagagttgagcaagatcacgctagagaataaggatattcagcttgatatcaatataagagtgtttgatggagccgaccctatggagctgcatgtttatgattttaaaggacctggtgtaaccttatcaatgtacaatagcgatgagtttattaggccttttgctaagtcctccatggatatggctctttcaaaaaagtcgtctcttcatctcagcaccaagaatacaatcatcaagaagtatgacgacaggcatggatcatctatgtttctacaagctcgcggtcacatttattaggccttttgctaagttcatggatatggctctttcaaaaaagtcgtctcttcatctcagcaccaagaatacaatcatcaagaagtatgacgacatgcatggatcatctatgtttctacaagctcgcggtgatcaacttgctattgggaaagaaactgcacgtcgtttgggaatgggtactaatatgtacccttcctctgctttactcagacagaataaggatgagtcaattgcttccttgccaattgatgaattgatcgagaaggctgatggctttgctggtgtctttccagaacacaagtatgagatcgtgaaaggcttgcaagcaagaaaacatatatgtggcatgactggggatggtgtaaatgatgccccagctttgaagaaggctgatattgtgtgattattagtgctgtgctgacgagtcgggcaattttccaaaggatgaagaattacacgatctatgctgtatcgattaccatccgtattgtgcttggttttatgcttcttgcgctgatatggaagtttgacttcccaccatttatggtcctgatcattgccatcctcaatgacggtaccattatgactatctcgaaggacagagtaaaaccatctccacaaccagacagttggaagttagctgagatttttgcaactggagtagttcttggtggttatttggccatgatgactgtcattttcttctgggctgcatacaagactgactttttcccgcggctgttccacgtcgaaagcctcgagaagaccgcccaggatgactttcagaagttcgcctctgccgtgtaccttcaagtcagcacggtcagtcaggcccttatcttcgtgacacggtcgcgcagctggtcgtttgtggagcgtcctgggttcttgctggtcttcgctttcttggtggctaagctgattgccactctgatcgctgtatatgccaactgggcgttcactgcgatcaagggcattggatggggctgggccggtgtcatctggctctataacatcgtcttctacttcccgctggacatcatcaagttcctcatccgctatgcgctgagtgggagggcatggaacctcgtccttgagcagaggattgcgttcacgagcaagaagaatttcggcacggaagaaagggagcgcaagtgggcgcatgcgcagaggactctccatgggctccagccgccagaagcatccatcttcgagaacaagacgacattcaatgagctgaaccagctcgcggaagaggcccgcaggagagccgagatggcgaggttgcgagaagtgagcaccctgaaggggaggatggagtcagtggtgaagcagaagggtctggacatctagaccatccagcagtcctacactgtgtgactgactgactgacgacgacggggtttatagaggtttcttcttatactatacaatctgtactaggtagcaataaggatcaaggaaggaacccctatatattggctgcggttcgcaggaaatgaatgatggtaatatttatgatgtcggtgtggtgcttctgtcgccaactctcgaccatactaccctcaactcacccccggcaccaccggcaggcattgatattcagagatgaggttttgaatgagacgttcattatttgtacgtatttggaaagtcgtagaacaacatgatcaatactttgttcagaaaaggaacgcagctggcactctagccctttctagtctgcaaaaaattactgcagcatttcgaatgttatcttatggggtagttgctgatgctactattgattcacccctagaagtattcacaaacatgaaatgcagttctcttcttcaagtttgatgatgaagatgtttagtactacatcctgatgaagatgttctgcatgcacatgtactatattggtcccctttcagatagcatcataaaccaggaaacaaaataaagtagtacatatgtagtgaaaggaatcaataac

SEQ ID NO: 66309 - DNA, 6152 bp, Zea Mays
atggcctcacccacggtcgcctccccgatccgggcgagccccgtcgacaaccccaccgtcgcgccctcactggcctcctgccgctgcgccttatcgctagatgctcgacatccccatccgcgcgctcgaggcagaggccagggacaccaagatgagcccgaccgcgaccgcctagccatcagctccaaagaagaagccaggggaccgatggacgtcagtgttccgtcgtggtggcccgctagatccatattcagcaagaaagatatctcgccatgccggcccagggccgcagcccgtcaccttcctccccccgcacccgccgtgacagccgcctccccacgcccgcttacccgactggccgcacaagatgcccacagtggcccccatcgcgcccacccgctccccccatccaccgcgacctcagccgccacgccgacgccatccccgtcctctagcgcgttgtcgccgtcgtcacaccgccaaaggtgcctgccccctgctaccgaggtcgacgaccagcagcggcaagctgccgagctcgacgacacgcacgccatgcttggccatatggacgagtccatcgcctgctacgagaaggggctccagatccagatgtccgcgctcgatgagcgcaatccctgcctccctgagacctgcaggtgattgacaaggtttaggaggaaacttccaaaagccggtcaagtatggagtgcttaacatcactttggcaacttatatttttttacatgtttgctttgtttgttaacaacataatttatgggctgacaatgtgatcatgtattctttctggtagtcttcgtgtcactgcttgcagttgcaggggagggatcatggctttcttttattttccatgtgcaatgtttaatttaggtgatgaactccaaagcttatcccattgttttctagcaagagctaagcaatactggatggagaacatttatctttttaataacgagtaaaagcataatggcatgcttgtgtttagttctctgtttgttgaccaatcgctatatttaatcttgattttttttatctataacttgaatttcaaagattcaatattttttattcagacattttctcttctctagatattcttttatgcaaataacgcggttacactagatcagccaacattctgggaaataagctatatggtcagagtaagaggttcaagagttgatagttcaacaactttaactgagagcaaatctacaagaaaaaggaaacaagcaacctggaacctacaactgcaggagcttgcttgaaagtgaacaatcaaggttgtgtgtatatattatgcccgacatttttgaaggatattgcgagggccattgtatctgctggaaaaatcatttcaacttgtcgaacatggtattaggatacgaattggagtggtcaacagaaattctggacagatatgtcaaatttcagaatccacgatggtcctccaagaaataaagatgctcttgatcatctattgagaagtggaatactaattttttgctgcagcgtgatggataaaggtttttgcgtattcttgggtttttttcctttcctttttggctacacacaactctttttaaatatacattcagtaggtggcaatgcctcctatttccctaaaaatatagcgccaaagagttcaaaattgaattctcataatctgctattaggaaaagaggtcaacttctatattttttacatcaggtaatttggctataatacaacggcatgctgaggtcaacttctgtatttttttctgcaagtaacttggctataatacagcggcatgctccattctgaagctggtcaagaaataaatatagcacttgcaatattttccagtagtcaaacctctccattacttcaattctcgttctcatttttgactatgttcttcatgtcagttcaacataataattaagaggtcgcttgcccctgagacggcttcatggtattttatttgttttttacaaagtattttttaagcgctaaacttacagtgcactttctctattcgttttggtgctgcttataagtcttttgtgttttagatccatcgaagatggcgcttaatctcgagagctagggagatgaaatgccttttgtacatgatggaaggaaacaaattacgtacatgtatatgtggatcgaattgactgttgcattctgcctgtatttaagcaacggtttccacccaaaacgtctataatttggtccttcctagatgtgtcaaatgtgtttactgcactgcgtttgcttttgtggcagcgccctaatagttgtttataaagtctgatgttaacaaactattgtcatgctatgtaatatatagtcttaacatgttggtttgttgagtgttcgaatatcagttttatattattatgtcaggtgttattagtgttcaattttttaagttcttgttgtacatcctatcattacatgagacaatgttgtgatgtttacaatattgtgttatgtatgttatatcattttggtattatagtataatttaatttgtatcagtttagttctgtattggttgttgccaaaaaaaattatgagatattaaggtcgataataatgttcgtttttatataatcgttttgcactaatattttgttaatttttttgtataccgttgcaacgcacgggcacctaactagtatgagactatgagtacatcaagtgcattcccttagaactcttgttgtgtaaaaaaatgtgtaacatgtcttggtacagagattaatttggtttgtgttttttagactgcaattatatctgggttctcagccttgccatggttagtcaagcccctctatgattttatcagttgattcaggtggttgattatatggtggttcagagagctcgaggtgaatcacagagtacatatagatctctccactccagtcactatgttgggaatcctcagcctttggaggaatcatgagtgcatacttcagtggttctccagtcacttatggcgtaagatttgtctttggtgttacagcacttttgccactgttccgagtagcagagaaggacaactctggcaaactgtgaagaaaataaaagattttcacaagcggaatcttcagaatctgaataaaggagttcgtgggaatcagttgtaccaaaaactggttcagttttcgtattccaagcatactactggaagttcacactgatcggcgacaaactctcgcccaaggagaagttgaaggaggatcagcgtgaacacccactgaaagagagatggagttgaatgagaaatctgaaaagaatacgcaagaggtagatgagaagttccaaaacacaaacttgtatctcaagaacttagagatggagcttcgggagttacaagtgcttcataagcaatcagatagatctgaaagttttactgtgccaacacatgcacacactggtggtgcctgcatctagctattcagatcaaagcctgacaggtaccatagggcaaagtgaagaagaaacagaagagttgagcaagatcacgctagagaataaggatattcagcttgatatcaatataagagaagaatcttggagctcttcacaacaagtgaacttttacacagaaagtaccagctccagtgaggcttgtttgatggagccgaccctatggagctgcatgtttatgattttaaaggacctggtgtaaccttatcaatgtacaatagcgatgagtttattaggccttttgctaagtcctccatggatatggctctttcaaaaaagtcgtctcttcatctcagcaccaagaatacaatcatcaagaagtatgacgacaggcatggatcatctatgtttctacaagctcgcggtcacatttattaggccttttgctaagttcatggatatggctctttcaaaaaagtcgtctcttcatctcagcaccaagaatacaatcatcaagaagtatgacgacatgcatggatcatctatgtttctacaagctcgcgttacaatggaatgctaagagacaaatagttaaagaactgctttaacctaccttgatggagaggggagaatgcatcgtgttagcaagggagcaccagagcagatccttcatcttgcccacaacaagtcagatattgaaagaagggtcagagctgtgattgacaaatttgctgagcgtggtctgtgagcacttggtgtggcttaccaggtgatcaacttgctattgggaaagaaactgcacgtcgtttgggaatgggtactaatatgtacccttcctctgctttactcagacagaataaggatgagtcaattgcttccttgccaattgatgaattgatcgagaaggctgatggctttgctggtgtctttccagaacacaagtatgagatcgtgaaaggcttgcaagcaagaaaacatatatgtggcatgactggggatggtgtaaatgatgccccagctttgaagaaggctgatattggtattgcagtagcagactctactgatgcaactcgtagtgcttctgacattgtcctaactgaacctggccttagtgtgattattagtgctgtgctgacgagtcgggcaattttccaaaggatgaagaattacacgatctatgctgtatcgattaccatccgtattgtggtatgtatgtacttctgcttcatttttagaaaataatgctcggttgactgattggacaaataatatatctgacccctagatactttgttgtaacagcttggttttatgcttcttgcgctgatatggaagtttgacttcccaccatttatggtcctgatcattgccatcctcaatgacggtaccattatgactatctcgaaggacagagtaaaaccatctccacaaccagacagttggaagttagctgagatttttgcaactggagtagttcttggtggttatttggccatgatgactgtcattttcttctgggctgcatacaagactgactttttcccgcggctgttccacgtcgaaagcctcgagaagaccgcccaggatgactttcagaagttcgcctctgccgtgtaccttcaagtcagcacggtcagtcaggcccttatcttcgtgacacggtcgcgcagctggtcgtttgtggagcgtcctgggttcttgctggtcttcgctttcttggtggctaagctgattgccactctgatcgctgtatatgccaactgggcgttcactgcgatcaagggcattggatggggctgggccggtgtcatctggctctataacatcgtcttctacttcccgctggacatcatcaagttcctcatccgctatgcgctgagtgggagggcatggaacctcgtccttgagcagaggattgcgttcacgagcaagaagaatttcggcacggaagaaagggagcgcaagtgggcgcatgcgcagaggactctccatgggctccagccgccagaagcatccatcttcgagaacaagacgacattcaatgagctgaaccagctcgcggaagaggcccgcaggagagccgagatggcgaggttgcgagaagtgagcaccctgaaggggaggatggagtcagtggtgaagcagaagggtctggacatctagaccatccagcagtcctacactgtgtgactgactgactgacgacgacggggtttatagaggaaatgaatgatggtaatatttatgatgtcggtgtggtgcttctgtcgccaactctcgaccatactaccctcaactcacccccggcaccaccggcaggcattgatattcagagatgaggttttgaatgagacgttcattatttgtacgtatttggaaagtcgtagaacaacatgatcaatactttgttcagaaaaggaacgcagctggcactctagccctttctagtctgcaaaaaattactgcagcatttcgaatgttatcttatggggtagttgctgatgctactattgattcacccctagaagtattcacaaacatgaaatgcagttctcttcttcaagtttgatgatgaagatgtttagtactacatcctgatgaagatgttctgcatgcacatgtactatattggtcccctttcagatagcatcataaaccaggaaacaaaataaagtagtacatatgtagtgaaaggaatcaataac

SEQ ID NO: 66310 - DNA, 6582 bp, Zea Mays
atggcctcacccacggtcgcctccccgatccgggcgagccccgtcgacaaccccaccgtcgcgccctcactggcctcctgccgctgcgccttatcgctagatgctcgacatccccatccgcgcgctcgaggcagaggccagggacaccaagatgagcccgaccgcgaccgcctagccatcagctccaaagaagaagccaggggaccgatggacgtcagtgttccgtcgtggtggcccgctagatccatattcagcaagaaagatatctcgccatgccggcccagggccgcagcccgtcaccttcctccccccgcacccgccgtgacagccgcctccccacgcccgcttacccgactggccgcacaagatgcccacagtggcccccatcgcgcccacccgctccccccatccaccgcgacctcagccgccacgccgacgccatccccgtcctctagcgcgttgtcgccgtcgtcacaccgccaaaggtgcctgccccctgctaccgaggtcgacgaccagcagcggcaagctgccgagctcgacgacacgcacgccatgcttggccatatggacgagtccatcgcctgctacgagaaggggctccagatccagatgtccgcgctcgatgagcgcaatccctgcctccctgagacctgcaggtaggtgacaatgtcatcaagggcccctccccctttgtcgcttctcgatctagatctcgcctctccctaaagcacgggttgcacctccccccgtcacccactccttccttggcttctcccgggaaacgaccttcagtctttacaggtatgaggtcttattgtgtgccatcattttcttttgctattcattcccgaatccccactgtgccctccagtgatgatggggtatgagctctgaataacaaacaaggtaaatgtttactcttttgagtagctgaattttgctatgatgtagtaaattatactagtaaattatacttgtactgaatatgaatataagaaaaaaatactgcactaattatttttctacgctctatattgtaaaataataggaatataataaaaagctgacataaaagctaatttacaacatccctttattttactatgttttatgataaataccttgattttccttgtaagttgtatcttttagtgattttcaaagaaactcctatttgcttggtgctttttctgtaagcatatgttgattaaatctttgtgtattctttctgtacactaatttaacttatcattattctgtcatccagtatgttgtcttatttgaatggttcatttccttctttaggtgattgacaaggtttaggaggaaacttccaaaagccggtcaagtatggagtgcttaacatcactttggcaacttatatttttttacatgtttgctttgtttgttaacaacataatttatgggctgacaatgtgatcatgtattctttctggtagtcttcgtgtcactgcttgcagttgcaggggagggatcatggctttcttttattttccatgtgcaatgtttaatttaggtgatgaactccaaagcttatcccattgttttctagcaagagctaagcaatactggatggagaacatttatctttttaataacgagtaaaagcataatggcatgcttgtgtttagttctctgtttgttgaccaatcgctatatttaatcttgattttttttatctataacttgaatttcaaagattcaatattttttattcagacattttctcttctctagatattcttttatgcaaataacgcggttacactagatcagccaacattctgggaaataagctatatggtcagagtaagaggttcaagagttgatagttcaacaactttaactgagagcaaatctacaagaaaaaggaaacaagcaacctggaacctacaactgcaggagcttgcttgaaagtgaacaatcaaggttgtgtgtatatattatgcccgacatttttgaaggatattgcgagggccattgtatctgctggaaaaatcatttcaacttgtcgaacatggtattaggatacgaattggagtggtcaacagaaattctggacagatatgtcaaatttcagaatccacgatggtcctccaagaaataaagatgctcttgatcatctattgagaagtggaatactaattttttgctgcagcgtgatggataaaggtttttgcgtattcttgggtttttttcctttcctttttggctacacacaactctttttaaatatacattcagtaggtggcaatgcctcctatttccctaaaaatatagcgccaaagagttcaaaattgaattctcataatctgctattaggaaaagaggtcaacttctatattttttacatcaggtaatttggctataatacaacggcatgctgaggtcaacttctgtatttttttctgcaagtaacttggctataatacagcggcatgctccattctgaagctggtcaagaaataaatatagcacttgcaatattttccagtagtcaaacctctccattacttcaattctcgttctcatttttgactatgttcttcatgtcagttcaacataataattaagaggtcgcttgcccctgagacggcttcatggtattttatttgttttttacaaagtattttttaagcgctaaacttacagtgcactttctctattcgttttggtgctgcttataagtcttttgtgttttagatccatcgaagatggcgcttaatctcgagagctagggagatgaaatgccttttgtacatgatggaaggaaacaaattacgtacatgtatatgtggatcgaattgactgttgcattctgcctgtatttaagcaacggtttccacccaaaacgtctataatttggtccttcctagatgtgtcaaatgtgtttactgcactgcgtttgcttttgtggcagcgccctaatagttgtttataaagtctgatgttaacaaactattgtcatgctatgtaatatatagtcttaacatgttggtttgttgagtgttcgaatatcagttttatattattatgtcaggtgttattagtgttcaattttttaagttcttgttgtacatcctatcattacatgagacaatgttgtgatgtttacaatattgtgttatgtatgttatatcattttggtattatagtataatttaatttgtatcagtttagttctgtattggttgttgccaaaaaaaattatgagatattaaggtcgataataatgttcgtttttatataatcgttttgcactaatattttgttaatttttttgtataccgttgcaacgcacgggcacctaactagtatgagactatgagtacatcaagtgcattcccttagaactcttgttgtgtaaaaaaatgtgtaacatgtcttggtacagagattaatttggtttgtgttttttagactgcaattatatctgggttctcagccttgccatggttagtcaagcccctctatgattttatcagttgattcaggtggttgattatatggtggttcagagagctcgaggtgaatcacagagtacatatagatctctccactccagtcactatgttgggaatcctcagcctttggaggaatcatgagtgcatacttcagtggttctccagtcacttatggcgtaagatttgtctttggtgttacagcacttttgccactgttccgagtagcagagaaggacaactctggcaaactgtgaagaaaataaaagattttcacaagcggaatcttcagaatctgaataaaggagttcgtgggaatcagttgtaccaaaaactggttcagttttcgtattccaagcatactactggaagttcacactgatcggcgacaaactctcgcccaaggagaagttgaaggaggatcagcgtgaacacccactgaaagagagatggagttgaatgagaaatctgaaaagaatacgcaagaggtagatgagaagttccaaaacacaaacttgtatctcaagaacttagagatggagcttcgggagttacaagtgcttcataagcaatcagatagatctgaaagttttactgtgccaacacatgcacacactggtggtgcctgcatctagctattcagatcaaagcctgacaggtaccatagggcaaagtgaagaagaaacagaagagttgagcaagatcacgctagagaataaggatattcagcttgatatcaatataagagaagaatcttggagctcttcacaacaagtgaacttttacacagaaagtaccagctccagtgaggcttgtttgatggagccgaccctatggagctgcatgtttatgattttaaaggacctggtgtaaccttatcaatgtacaatagcgatgagtttattaggccttttgctaagtcctccatggatatggctctttcaaaaaagtcgtctcttcatctcagcaccaagaatacaatcatcaagaagtatgacgacaggcatggatcatctatgtttctacaagctcgcggtcacatttattaggccttttgctaagttcatggatatggctctttcaaaaaagtcgtctcttcatctcagcaccaagaatacaatcatcaagaagtatgacgacatgcatggatcatctatgtttctacaagctcgcggtgatcaacttgctattgggaaagaaactgcacgtcgtttgggaatgggtactaatatgtacccttcctctgctttactcagacagaataaggatgagtcaattgcttccttgccaattgatgaattgatcgagaaggctgatggctttgctggtgtctttccagaacacaagtatgagatcgtgaaaggcttgcaagcaagaaaacatatatgtggcatgactggggatggtgtaaatgatgccccagctttgaagaaggctgatattggtattgcagtagcagactctactgatgcaactcgtagtgcttctgacattgtcctaactgaacctggccttagtgtgattattagtgctgtgctgacgagtcgggcaattttccaaaggatgaagaattacacgatctatgctgtatcgattaccatccgtattgtgcttggttttatgcttcttgcgctgatatggaagtttgacttcccaccatttatggtcctgatcattgccatcctcaatgacggtaccattatgactatctcgaaggacagagtaaaaccatctccacaaccagacagttggaagttagctgagatttttgcaactggagtagttcttggtggttatttggccatgatgactgtcattttcttctgggctgcatacaagactgactttttcccgcggctgttccacgtcgaaagcctcgagaagaccgcccaggatgactttcagaagttcgcctctgccgtgtaccttcaagtcagcacggtcagtcaggcccttatcttcgtgacacggtcgcgcagctggtcgtttgtggagcgtcctgggttcttgctggtcttcgctttcttggtggctaagctgattgccactctgatcgctgtatatgccaactgggcgttcactgcgatcaagggcattggatggggctgggccggtgtcatctggctctataacatcgtcttctacttcccgctggacatcatcaagttcctcatccgctatgcgctgagtgggagggcatggaacctcgtccttgagcagaggattgcgttcacgagcaagaagaatttcggcacggaagaaagggagcgcaagtgggcgcatgcgcagaggactctccatgggctccagccgccagaagcatccatcttcgagaacaagacgacattcaatgagctgaaccagctcgcggaagaggcccgcaggagagccgagatggcgaggttgcgagaagtgagcaccctgaaggggaggatggagtcagtggtgaagcagaagggtctggacatctagaccatccagcagtcctacactgtgtgactgactgactgacgacgacggggtttatagaggtttcttcttatactatacaatctgtactaggtagcaataaggatcaaggaaggaacccctatatattggctgcggttcgcaggaaatgaatgatggtaatatttatgatgtcggtgtggtgcttctgtcgccaactctcgaccatactaccctcaactcacccccggcaccaccggcaggcattgatattcagagatgaggttttgaatgagacgttcattatttgtacgtatttggaaagtcgtagaacaacatgatcaatactttgttcagaaaaggaacgcagctggcactctagccctttctagtctgcaaaaaattactgcagcatttcgaatgttatcttatggggtagttgctgatgctactattgattcacccctagaagtattcacaaacatgaaatgcagttctcttcttcaagtttgatgatgaagatgtttagtactacatcctgatgaagatgttctgcatgcacatgtactatattggtcccctttcagatagcatcataaaccaggaaacaaaataaagtagtacatatgtagtgaaaggaatcaataac

SEQ ID NO: 66311 - DNA, 6435 bp, Zea Mays
atggcctcacccacggtcgcctccccgatccgggcgagccccgtcgacaaccccaccgtcgcgccctcactggcctcctgccgctgcgccttatcgctagatgctcgacatccccatccgcgcgctcgaggcagaggccagggacaccaagatgagcccgaccgcgaccgcctagccatcagctccaaagaagaagccaggggaccgatggacgtcagtgttccgtcgtggtggcccgctagatccatattcagcaagaaagatatctcgccatgccggcccagggccgcagcccgtcaccttcctccccccgcacccgccgtgacagccgcctccccacgcccgcttacccgactggccgcacaagatgcccacagtggcccccatcgcgcccacccgctccccccatccaccgcgacctcagccgccacgccgacgccatccccgtcctctagcgcgttgtcgccgtcgtcacaccgccaaaggtgcctgccccctgctaccgaggtcgacgaccagcagcggcaagctgccgagctcgacgacacgcacgccatgcttggccatatggacgagtccatcgcctgctacgagaaggggctccagatccagatgtccgcgctcgatgagcgcaatccctgcctccctgagacctgcaggtaggtgacaatgtcatcaagggcccctccccctttgtcgcttctcgatctagatctcgcctctccctaaagcacgggttgcacctccccccgtcacccactccttccttggcttctcccgggaaacgaccttcagtctttacaggtatgaggtcttattgtgtgccatcattttcttttgctattcattcccgaatccccactgtgccctccagtgatgatggggtatgagctctgaataacaaacaaggtaaatgtttactcttttgagtagctgaattttgctatgatgtagtaaattatactagtaaattatacttgtactgaatatgaatataagaaaaaaatactgcactaattatttttctacgctctatattgtaaaataataggaatataataaaaagctgacataaaagctaatttacaacatccctttattttactatgttttatgataaataccttgattttccttgtaagttgtatcttttagtgattttcaaagaaactcctatttgcttggtgctttttctgtaagcatatgttgattaaatctttgtgtattctttctgtacactaatttaacttatcattattctgtcatccagtatgttgtcttatttgaatggttcatttccttctttaggtgattgacaaggtttaggaggaaacttccaaaagccggtcaagtatggagtgcttaacatcactttggcaacttatatttttttacatgtttgctttgtttgttaacaacataatttatgggctgacaatgtgatcatgtattctttctggtagtcttcgtgtcactgcttgcagttgcaggggagggatcatggctttcttttattttccatgtgcaatgtttaatttaggtgatgaactccaaagcttatcccattgttttctagcaagagctaagcaatactggatggagaacatttatctttttaataacgagtaaaagcataatggcatgcttgtgtttagttctctgtttgttgaccaatcgctatatttaatcttgattttttttatctataacttgaatttcaaagattcaatattttttattcagacattttctcttctctagatattcttttatgcaaataacgcggttacactagatcagccaacattctgggaaataagctatatggtcagagtaagaggttcaagagttgatagttcaacaactttaactgagagcaaatctacaagaaaaaggaaacaagcaacctggaacctacaactgcaggagcttgcttgaaagtgaacaatcaaggttgtgtgtatatattatgcccgacatttttgaaggatattgcgagggccattgtatctgctggaaaaatcatttcaacttgtcgaacatggtattaggatacgaattggagtggtcaacagaaattctggacagatatgtcaaatttcagaatccacgatggtcctccaagaaataaagatgctcttgatcatctattgagaagtggaatactaattttttgctgcagcgtgatggataaaggtttttgcgtattcttgggtttttttcctttcctttttggctacacacaactctttttaaatatacattcagtaggtggcaatgcctcctatttccctaaaaatatagcgccaaagagttcaaaattgaattctcataatctgctattaggaaaagaggtcaacttctatattttttacatcaggtaatttggctataatacaacggcatgctgaggtcaacttctgtatttttttctgcaagtaacttggctataatacagcggcatgctccattctgaagctggtcaagaaataaatatagcacttgcaatattttccagtagtcaaacctctccattacttcaattctcgttctcatttttgactatgttcttcatgtcagttcaacataataattaagaggtcgcttgcccctgagacggcttcatgatccatcgaagatggcgcttaatctcgagagctagggagatgaaatgccttttgtacatgatggaaggaaacaaattacgtacatgtatatgtggatcgaattgactgttgcattctgcctgtatttaagcaacggtttccacccaaaacgtctataatttggtccttcctagatgtgtcaaatgtgtttactgcactgcgtttgcttttgtggcagcgccctaatagttgtttataaagtctgatgttaacaaactattgtcatgctatgtaatatatagtcttaacatgttggtttgttgagtgttcgaatatcagttttatattattatgtcaggtgttattagtgttcaattttttaagttcttgttgtacatcctatcattacatgagacaatgttgtgatgtttacaatattgtgttatgtatgttatatcattttggtattatagtataatttaatttgtatcagtttagttctgtattggttgttgccaaaaaaaattatgagatattaaggtcgataataatgttcgtttttatataatcgttttgcactaatattttgttaatttttttgtataccgttgcaacgcacgggcacctaactagtatgagactatgagtacatcaagtgcattcccttagaactcttgttgtgtaaaaaaatgtgtaacatgtcttggtacagagattaatttggtttgtgttttttagactgcaattatatctgggttctcagccttgccatggttagtcaagcccctctatgattttatcagttgattcaggtggttgattatatggtggttcagagagctcgaggtgaatcacagagtacatatagatctctccactccagtcactatgttgggaatcctcagcctttggaggaatcatgagtgcatacttcagtggttctccagtcacttatggcgtaagatttgtctttggtgttacagcacttttgccactgttccgagtagcagagaaggacaactctggcaaactgtgaagaaaataaaagattttcacaagcggaatcttcagaatctgaataaaggagttcgtgggaatcagttgtaccaaaaactggttcagttttcgtattccaagcatactactggaagttcacactgatcggcgacaaactctcgcccaaggagaagttgaaggaggatcagcgtgaacacccactgaaagagagatggagttgaatgagaaatctgaaaagaatacgcaagaggtagatgagaagttccaaaacacaaacttgtatctcaagaacttagagatggagcttcgggagttacaagtgcttcataagcaatcagatagatctgaaagttttactgtgccaacacatgcacacactggtggtgcctgcatctagctattcagatcaaagcctgacaggtaccatagggcaaagtgaagaagaaacagaagagttgagcaagatcacgctagagaataaggatattcagcttgatatcaatataagagtgtttgatggagccgaccctatggagctgcatgtttatgattttaaaggacctggtgtaaccttatcaatgtacaatagcgatgagtttattaggccttttgctaagtcctccatggatatggctctttcaaaaaagtcgtctcttcatctcagcaccaagaatacaatcatcaagaagtatgacgacaggcatggatcatctatgtttctacaagctcgcggtcacatttattaggccttttgctaagttcatggatatggctctttcaaaaaagtcgtctcttcatctcagcaccaagaatacaatcatcaagaagtatgacgacatgcatggatcatctatgtttctacaagctcgcgttacaatggaatgctaagagacaaatagttaaagaactgctttaacctaccttgatggagaggggagaatgcatcgtgttagcaagggagcaccagagcaggtgatcaacttgctattgggaaagaaactgcacgtcgtttgggaatgggtactaatatgtacccttcctctgctttactcagacagaataaggatgagtcaattgcttccttgccaattgatgaattgatcgagaaggctgatggctttgctggtgtctttccagaacacaagtatgagatcgtgaaaggcttgcaagcaagaaaacatatatgtggcatgactggggatggtgtaaatgatgccccagctttgaagaaggctgatattggtattgcagtagcagactctactgatgcaactcgtagtgcttctgacattgtcctaactgaacctggccttagtgtgattattagtgctgtgctgacgagtcgggcaattttccaaaggatgaagaattacacgatctatgctgtatcgattaccatccgtattgtgcttggttttatgcttcttgcgctgatatggaagtttgacttcccaccatttatggtcctgatcattgccatcctcaatgacggtaccattatgactatctcgaaggacagagtaaaaccatctccacaaccagacagttggaagttagctgagatttttgcaactggagtagttcttggtggttatttggccatgatgactgtcattttcttctgggctgcatacaagactgactttttcccgcggctgttccacgtcgaaagcctcgagaagaccgcccaggatgactttcagaagttcgcctctgccgtgtaccttcaagtcagcacggtcagtcaggcccttatcttcgtgacacggtcgcgcagctggtcgtttgtggagcgtcctgggttcttgctggtcttcgctttcttggtggctaagctgattgccactctgatcgctgtatatgccaactgggcgttcactgcgatcaagggcattggatggggctgggccggtgtcatctggctctataacatcgtcttctacttcccgctggacatcatcaagttcctcatccgctatgcgctgagtgggagggcatggaacctcgtccttgagcagaggattgcgttcacgagcaagaagaatttcggcacggaagaaagggagcgcaagtgggcgcatgcgcagaggactctccatgggctccagccgccagaagcatccatcttcgagaacaagacgacattcaatgagctgaaccagctcgcggaagaggcccgcaggagagccgagatggcgaggttgcgagaagtgagcaccctgaaggggaggatggagtcagtggtgaagcagaagggtctggacatctagaccatccagcagtcctacactgtgtgactgactgactgacgacgacggggtttatagaggaaatgaatgatggtaatatttatgatgtcggtgtggtgcttctgtcgccaactctcgaccatactaccctcaactcacccccggcaccaccggcaggcattgatattcagagatgaggttttgaatgagacgttcattatttgtacgtatttggaaagtcgtagaacaacatgatcaatactttgttcagaaaaggaacgcagctggcactctagccctttctagtctgcaaaaaattactgcagcatttcgaatgttatcttatggggtagttgctgatgctactattgattcacccctagaagtattcacaaacatgaaatgcagttctcttcttcaagtttgatgatgaagatgtttagtactacatcctgatgaagatgttctgcatgcacatgtactatattggtcccctttcagatagcatcataaaccaggaaacaaaataaagtagtacatatgtagtgaaaggaatcaataac

SEQ ID NO: 66312 - DNA, 5726 bp, Zea Mays
atggcctcacccacggtcgcctccccgatccgggcgagccccgtcgacaaccccaccgtcgcgccctcactggcctcctgccgctgcgccttatcgctagatgctcgacatccccatccgcgcgctcgaggcagaggccagggacaccaagatgagcccgaccgcgaccgcctagccatcagctccaaagaagaagccaggggaccgatggacgtcagtgttccgtcgtggtggcccgctagatccatattcagcaagaaagatatctcgccatgccggcccagggccgcagcccgtcaccttcctccccccgcacccgccgtgacagccgcctccccacgcccgcttacccgactggccgcacaagatgcccacagtggcccccatcgcgcccacccgctccccccatccaccgcgacctcagccgccacgccgacgccatccccgtcctctagcgcgttgtcgccgtcgtcacaccgccaaaggtgcctgccccctgctaccgaggtcgacgaccagcagcggcaagctgccgagctcgacgacacgcacgccatgcttggccatatggacgagtccatcgcctgctacgagaaggggctccagatccagatgtccgcgctcgatgagcgcaatccctgcctccctgagacctgcaggtgattgacaaggtttaggaggaaacttccaaaagccggtcaaatattcttttatgcaaataacgcggttacactagatcagccaacattctgggaaataagctatatggtcagagtaagaggttcaagagttgatagttcaacaactttaactgagagcaaatctacaagaaaaaggaaacaagcaacctggaacctacaactgcaggagcttgcttgaaagtgaacaatcaaggttgtgtgtatatattatgcccgacatttttgaaggatattgcgagggccattgtatctgctggaaaaatcatttcaacttgtcgaacatggtattaggatacgaattggagtggtcaacagaaattctggacagatatgtcaaatttcagaatccacgatggtcctccaagaaataaagatgctcttgatcatctattgagaagtggaatactaattttttgctgcagcgtgatggataaaggtttttgcgtattcttgggtttttttcctttcctttttggctacacacaactctttttaaatatacattcagtaggtggcaatgcctcctatttccctaaaaatatagcgccaaagagttcaaaattgaattctcataatctgctattaggaaaagaggtcaacttctatattttttacatcaggtaatttggctataatacaacggcatgctgaggtcaacttctgtatttttttctgcaagtaacttggctataatacagcggcatgctccattctgaagctggtcaagaaataaatatagcacttgcaatattttccagtagtcaaacctctccattacttcaattctcgttctcatttttgactatgttcttcatgtcagttcaacataataattaagaggtcgcttgcccctgagacggcttcatggtattttatttgttttttacaaagtattttttaagcgctaaacttacagtgcactttctctattcgttttggtgctgcttataagtcttttgtgttttagatccatcgaagatggcgcttaatctcgagagctagggagatgaaatgccttttgtacatgatggaaggaaacaaattacgtacatgtatatgtggatcgaattgactgttgcattctgcctgtatttaagcaacggtttccacccaaaacgtctataatttggtccttcctagatgtgtcaaatgtgtttactgcactgcgtttgcttttgtggcagcgccctaatagttgtttataaagtctgatgttaacaaactattgtcatgctatgtaatatatagtcttaacatgttggtttgttgagtgttcgaatatcagttttatattattatgtcaggtgttattagtgttcaattttttaagttcttgttgtacatcctatcattacatgagacaatgttgtgatgtttacaatattgtgttatgtatgttatatcattttggtattatagtataatttaatttgtatcagtttagttctgtattggttgttgccaaaaaaaattatgagatattaaggtcgataataatgttcgtttttatataatcgttttgcactaatattttgttaatttttttgtataccgttgcaacgcacgggcacctaactagtatgagactatgagtacatcaagtgcattcccttagaactcttgttgtgtaaaaaaatgtgtaacatgtcttggtacagagattaatttggtttgtgttttttagactgcaattatatctgggttctcagccttgccatggttagtcaagcccctctatgattttatcaggtttcaccaaaatactgaatagccttcctatcatccctttctttctgtatatgatatatgcatttaattgcaatgatgtactgttgctatttccgtacacagttgattcaggtggttgattatatggtggttcagagagctcgaggtgaatcacagagtacatatagatctctccactccagtcactatgttgggaatcctcagcctttggaggaatcatgagtgcatacttcagtggttctccagtcacttatggcgtaagatttgtctttggtgttacagcacttttgccactgttccgagtagcagagaaggacaactctggcaaactgtgaagaaaataaaagattttcacaagcggaatcttcagaatctgaataaaggagttcgtgggaatcagttgtaccaaaaactggttcagttttcgtattccaagcatactactggaagttcacactgatcggcgacaaactctcgcccaaggagaagttgaaggaggatcagcgtgaacacccactgaaagagagatggagttgaatgagaaatctgaaaagaatacgcaagaggtagatgagaagttccaaaacacaaacttgtatctcaagaacttagagatggagcttcgggagttacaagtgcttcataagcaatcagatagatctgaaagttttactgtgccaacacatgcacacactggtggtgcctgcatctagctattcagatcaaagcctgacaggtaccatagggcaaagtgaagaagaaacagaagagttgagcaagatcacgctagagaataaggatattcagcttgatatcaatataagagaagaatcttggagctcttcacaacaagtgaacttttacacagaaagtaccagctccagtgaggcttgtttgatggagccgaccctatggagctgcatgtttatgattttaaaggacctggtgtaaccttatcaatgtacaatagcgatgagtttattaggccttttgctaagtcctccatggatatggctctttcaaaaaagtcgtctcttcatctcagcaccaagaatacaatcatcaagaagtatgacgacaggcatggatcatctatgtttctacaagctcgcggtcacatttattaggccttttgctaagttcatggatatggctctttcaaaaaagtcgtctcttcatctcagcaccaagaatacaatcatcaagaagtatgacgacatgcatggatcatctatgtttctacaagctcgcgttacaatggaatgctaagagacaaatagttaaagaactgctttaacctaccttgatggagaggggagaatgcatcgtgttagcaagggagcaccagagcaggtgatcaacttgctattgggaaagaaactgcacgtcgtttgggaatgggtactaatatgtacccttcctctgctttactcagacagaataaggatgagtcaattgcttccttgccaattgatgaattgatcgagaaggctgatggctttgctggtgtctttccagaacacaagtatgagatcgtgaaaggcttgcaagcaagaaaacatatatgtggcatgactggggatggtgtaaatgatgccccagctttgaagaaggctgatattggtattgcagtagcagactctactgatgcaactcgtagtgcttctgacattgtcctaactgaacctggccttagtgtgattattagtgctgtgctgacgagtcgggcaattttccaaaggatgaagaattacacgatctatgctgtatcgattaccatccgtattgtgcttggttttatgcttcttgcgctgatatggaagtttgacttcccaccatttatggtcctgatcattgccatcctcaatgacggtaccattatgactatctcgaaggacagagtaaaaccatctccacaaccagacagttggaagttagctgagatttttgcaactggagtagttcttggtggttatttggccatgatgactgtcattttcttctgggctgcatacaagactgactttttcccgcggctgttccacgtcgaaagcctcgagaagaccgcccaggatgactttcagaagttcgcctctgccgtgtaccttcaagtcagcacggtcagtcaggcccttatcttcgtgacacggtcgcgcagctggtcgtttgtggagcgtcctgggttcttgctggtcttcgctttcttggtggctaagctgattgccactctgatcgctgtatatgccaactgggcgttcactgcgatcaagggcattggatggggctgggccggtgtcatctggctctataacatcgtcttctacttcccgctggacatcatcaagttcctcatccgctatgcgctgagtgggagggcatggaacctcgtccttgagcagaggattgcgttcacgagcaagaagaatttcggcacggaagaaagggagcgcaagtgggcgcatgcgcagaggactctccatgggctccagccgccagaagcatccatcttcgagaacaagacgacattcaatgagctgaaccagctcgcggaagaggcccgcaggagagccgagatggcgaggttgcgagaagtgagcaccctgaaggggaggatggagtcagtggtgaagcagaagggtctggacatctagaccatccagcagtcctacactgtgtgactgactgactgacgacgacggggtttatagaggtttcttcttatactatacaatctgtactaggtagcaataaggatcaaggaaggaacccctatatattggctgcggttcgcaggaaatgaatgatggtaatatttatgatgtcggtgtggtgcttctgtcgccaactctcgaccatactaccctcaactcacccccggcaccaccggcaggcattgatattcagagatgaggttttgaatgagacgttcattatttgtacgtatttggaaagtcgtagaacaacatgatcaatactttgttcagaaaaggaacgcagctggcactctagccctttctagtctgcaaaaaattactgcagcatttcgaatgttatcttatggggtagttgctgatgctactattgattcacccctagaagtattcacaaacatgaaatgcagttctcttcttcaagtttgatgatgaagatgtttagtactacatcctgatgaagatgttctgcatgcacatgtactatattggtcccctttcagatagcatcataaaccaggaaacaaaataaagtagtacatatgtagtgaaaggaatcaataac

SEQ ID NO: 66313 - DNA, 5962 bp, Zea Mays
atggcctcacccacggtcgcctccccgatccgggcgagccccgtcgacaaccccaccgtcgcgccctcactggcctcctgccgctgcgccttatcgctagatgctcgacatccccatccgcgcgctcgaggcagaggccagggacaccaagatgagcccgaccgcgaccgcctagccatcagctccaaagaagaagccaggggaccgatggacgtcagtgttccgtcgtggtggcccgctagatccatattcagcaagaaagatatctcgccatgccggcccagggccgcagcccgtcaccttcctccccccgcacccgccgtgacagccgcctccccacgcccgcttacccgactggccgcacaagatgcccacagtggcccccatcgcgcccacccgctccccccatccaccgcgacctcagccgccacgccgacgccatccccgtcctctagcgcgttgtcgccgtcgtcacaccgccaaaggtgcctgccccctgctaccgaggtcgacgaccagcagcggcaagctgccgagctcgacgacacgcacgccatgcttggccatatggacgagtccatcgcctgctacgagaaggggctccagatccagatgtccgcgctcgatgagcgcaatccctgcctccctgagacctgcaggtgattgacaaggtttaggaggaaacttccaaaagccggtcaagtatggagtgcttaacatcactttggcaacttatatttttttacatgtttgctttgtttgttaacaacataatttatgggctgacaatgtgatcatgtattctttctggtagtcttcgtgtcactgcttgcagttgcaggggagggatcatggctttcttttattttccatgtgcaatgtttaatttaggtgatgaactccaaagcttatcccattgttttctagcaagagctaagcaatactggatggagaacatttatctttttaataacgagtaaaagcataatggcatgcttgtgtttagttctctgtttgttgaccaatcgctatatttaatcttgattttttttatctataacttgaatttcaaagattcaatattttttattcagacattttctcttctctagatattcttttatgcaaataacgcggttacactagatcagccaacattctgggaaataagctatatggtcagagtaagaggttcaagagttgatagttcaacaactttaactgagagcaaatctacaagaaaaaggaaacaagcaacctggaacctacaactgcaggagcttgcttgaaagtgaacaatcaaggttgtgtgtatatattatgcccgacatttttgaaggatattgcgagggccattgtatctgctggaaaaatcatttcaacttgtcgaacatggtattaggatacgaattggagtggtcaacagaaattctggacagatatgtcaaatttcagaatccacgatggtcctccaagaaataaagatgctcttgatcatctattgagaagtggaatactaattttttgctgcagcgtgatggataaaggtttttgcgtattcttgggtttttttcctttcctttttggctacacacaactctttttaaatatacattcagtaggtggcaatgcctcctatttccctaaaaatatagcgccaaagagttcaaaattgaattctcataatctgctattaggaaaagaggtcaacttctatattttttacatcaggtaatttggctataatacaacggcatgctgaggtcaacttctgtatttttttctgcaagtaacttggctataatacagcggcatgctccattctgaagctggtcaagaaataaatatagcacttgcaatattttccagtagtcaaacctctccattacttcaattctcgttctcatttttgactatgttcttcatgtcagttcaacataataattaagaggtcgcttgcccctgagacggcttcatggtattttatttgttttttacaaagtattttttaagcgctaaacttacagtgcactttctctattcgttttggtgctgcttataagtcttttgtgttttagatccatcgaagatggcgcttaatctcgagagctagggagatgaaatgccttttgtacatgatggaaggaaacaaattacgtacatgtatatgtggatcgaattgactgttgcattctgcctgtatttaagcaacggtttccacccaaaacgtctataatttggtccttcctagatgtgtcaaatgtgtttactgcactgcgtttgcttttgtggcagcgccctaatagttgtttataaagtctgatgttaacaaactattgtcatgctatgtaatatatagtcttaacatgttggtttgttgagtgttcgaatatcagttttatattattatgtcaggtgttattagtgttcaattttttaagttcttgttgtacatcctatcattacatgagacaatgttgtgatgtttacaatattgtgttatgtatgttatatcattttggtattatagtataatttaatttgtatcagtttagttctgtattggttgttgccaaaaaaaattatgagatattaaggtcgataataatgttcgtttttatataatcgttttgcactaatattttgttaatttttttgtataccgttgcaacgcacgggcacctaactagtatgagactatgagtacatcaagtgcattcccttagaactcttgttgtgtaaaaaaatgtgtaacatgtcttggtacagagattaatttggtttgtgttttttagactgcaattatatctgggttctcagccttgccatggttagtcaagcccctctatgattttatcaggtttcaccaaaatactgaatagccttcctatcatccctttctttctgtatatgatatatgcatttaattgcaatgatgtactgttgctatttccgtacacagttgattcaggtggttgattatatggtggttcagagagctcgaggtgaatcacagagtacatatagatctctccactccagtcactatgttgggaatcctcagcctttggaggaatcatgagtgcatacttcagtggttctccagtcacttatggcgtaagatttgtctttggtgttacagcacttttgccactgttccgagtagcagagaaggacaactctggcaaactgtgaagaaaataaaagattttcacaagcggaatcttcagaatctgaataaaggagttcgtgggaatcagttgtaccaaaaactggttcagttttcgtattccaagcatactactggaagttcacactgatcggcgacaaactctcgcccaaggagaagttgaaggaggatcagcgtgaacacccactgaaagagagatggagttgaatgagaaatctgaaaagaatacgcaagaggtagatgagaagttccaaaacacaaacttgtatctcaagaacttagagatggagcttcgggagttacaagtgcttcataagcaatcagatagatctgaaagttttactgtgccaacacatgcacacactggtggtgcctgcatctagctattcagatcaaagcctgacaggtaccatagggcaaagtgaagaagaaacagaagagttgagcaagatcacgctagagaataaggatattcagcttgatatcaatataagagtgtttgatggagccgaccctatggagctgcatgtttatgattttaaaggacctggtgtaaccttatcaatgtacaatagcgatgaggccttttgctaagtcctccatggatatggctctttcaaaaaagtcgtctcttcatctcagcaccaagaatacaatcatcaagaagtatgacgacaggcatggatcatctatgtttctacaagctcgcggtcacatttattaggccttttgctaagttcatggatatggctctttcaaaaaagtcgtctcttcatctcagcaccaagaatacaatcatcaagaagtatgacgacatgcatggatcatctatgtttctacaagctcgcggtgatcaacttgctattgggaaagaaactgcacgtcgtttgggaatgggtactaatatgtacccttcctctgctttactcagacagaataaggatgagtcaattgcttccttgccaattgatgaattgatcgagaaggctgatggctttgctggtgtctttccagaacacaagtatgagatcgtgaaaggcttgcaagcaagaaaacatatatgtggcatgactggggatggtgtaaatgatgccccagctttgaagaaggctgatattggtattgcagtagcagactctactgatgcaactcgtagtgcttctgacattgtcctaactgaacctggccttagtgtgattattagtgctgtgctgacgagtcgggcaattttccaaaggatgaagaattacacgatctatgctgtatcgattaccatccgtattgtgcttggttttatgcttcttgcgctgatatggaagtttgacttcccaccatttatggtcctgatcattgccatcctcaatgacggtaccattatgactatctcgaaggacagagtaaaaccatctccacaaccagacagttggaagttagctgagatttttgcaactggagtagttcttggtggttatttggccatgatgactgtcattttcttctgggctgcatacaagactgactttttcccgcggctgttccacgtcgaaagcctcgagaagaccgcccaggatgactttcagaagttcgcctctgccgtgtaccttcaagtcagcacggtcagtcaggcccttatcttcgtgacacggtcgcgcagctggtcgtttgtggagcgtcctgggttcttgctggtcttcgctttcttggtggctaagctgattgccactctgatcgctgtatatgccaactgggcgttcactgcgatcaagggcattggatggggctgggccggtgtcatctggctctataacatcgtcttctacttcccgctggacatcatcaagttcctcatccgctatgcgctgagtgggagggcatggaacctcgtccttgagcagaggattgcgttcacgagcaagaagaatttcggcacggaagaaagggagcgcaagtgggcgcatgcgcagaggactctccatgggctccagccgccagaagcatccatcttcgagaacaagacgacattcaatgagctgaaccagctcgcggaagaggcccgcaggagagccgagatggcgaggttgcgagaagtgagcaccctgaaggggaggatggagtcagtggtgaagcagaagggtctggacatctagaccatccagcagtcctacactgtgtgactgactgactgacgacgacggggtttatagaggtttcttcttatactatacaatctgtactaggtagcaataaggatcaaggaaggaacccctatatattggctgcggttcgcaggaaatgaatgatggtaatatttatgatgtcggtgtggtgcttctgtcgccaactctcgaccatactaccctcaactcacccccggcaccaccggcaggcattgatattcagagatgaggttttgaatgagacgttcattatttgtacgtatttggaaagtcgtagaacaacatgatcaatactttgttcagaaaaggaacgcagctggcactctagccctttctagtctgcaaaaaattactgcagcatttcgaatgttatcttatggggtagttgctgatgctactattgattcacccctagaagtattcacaaacatgaaatgcagttctcttcttcaagtttgatgatgaagatgtttagtactacatcctgatgaagatgttctgcatgcacatgtactatattggtcccctttcagatagcatcataaaccaggaaacaaaataaagtagtacatatgtagtgaaaggaatcaataac

SEQ ID NO: 66314 - DNA, 5785 bp, Zea Mays
atggcctcacccacggtcgcctccccgatccgggcgagccccgtcgacaaccccaccgtcgcgccctcactggcctcctgccgctgcgccttatcgctagatgctcgacatccccatccgcgcgctcgaggcagaggccagggacaccaagatgagcccgaccgcgaccgcctagccatcagctccaaagaagaagccaggggaccgatggacgtcagtgttccgtcgtggtggcccgctagatccatattcagcaagaaagatatctcgccatgccggcccagggccgcagcccgtcaccttcctccccccgcacccgccgtgacagccgcctccccacgcccgcttacccgactggccgcacaagatgcccacagtggcccccatcgcgcccacccgctccccccatccaccgcgacctcagccgccacgccgacgccatccccgtcctctagcgcgttgtcgccgtcgtcacaccgccaaaggtgcctgccccctgctaccgaggtcgacgaccagcagcggcaagctgccgagctcgacgacacgcacgccatgcttggccatatggacgagtccatcgcctgctacgagaaggggctccagatccagatgtccgcgctcgatgagcgcaatccctgcctccctgagacctgcaggtaggtgacaatgtcatcaagggcccctccccctttgtcgcttctcgatctagatctcgcctctccctaaagcacgggttgcacctccccccgtcacccactccttccttggcttctcccgggaaacgaccttcagtctttacaggtatgaggtcttattgtgtgccatcattttcttttgctattcattcccgaatccccactgtgccctccagtgatgatggggtatgagctctgaataacaaacaaggtaaatgtttactcttttgagtagctgaattttgctatgatgtagtaaattatactagtaaattatacttgtactgaatatgaatataagaaaaaaatactgcactaattatttttctacgctctatattgtaaaataataggaatataataaaaagctgacataaaagctaatttacaacatccctttattttactatgttttatgataaataccttgattttccttgtaagttgtatcttttagtgattttcaaagaaactcctatttgcttggtgctttttctgtaagcatatgttgattaaatctttgtgtattctttctgtacactaatttaacttatcattattctgtcatccagtatgttgtcttatttgaatggttcatttccttctttaggtgattgacaaggtttaggaggaaacttccaaaagccggtcaagtatggagtgcttaacatcactttggcaacttatatttttttacatgtttgctttgtttgttaacaacataatttatgggctgacaatgtgatcatgtattctttctggtagtcttcgtgtcactgcttgcagttgcaggggagggatcatggctttcttttattttccatgtgcaatgtttaatttaggtgatgaactccaaagcttatcccattgttttctagcaagagctaagcaatactggatggagaacatttatctttttaataacgagtaaaagcataatggcatgcttgtgtttagttctctgtttgttgaccaatcgctatatttaatcttgattttttttatctataacttgaatttcaaagattcaatattttttattcagacattttctcttctctagatattcttttatgcaaataacgcggttacactagatcagccaacattctgggaaataagctatatggtcagagtaagaggttcaagagttgatagttcaacaactttaactgagagcaaatctacaagaaaaaggaaacaagcaacctggaacctacaactgcaggagcttgcttgaaagtgaacaatcaaggttgtgtgtatatattatgcccgacatttttgaaggatattgcgagggccattgtatctgctggaaaaatcatttcaacttgtcgaacatggtattaggatacgaattggagtggtcaacagaaattctggacagatatgtcaaatttcagaatccacgatggtcctccaagaaataaagatgctcttgatcatctattgagaagtggaatactaattttttgctgcagcgtgatggataaaggtttttgcgtattcttgggtttttttcctttcctttttggctacacacaactctttttaaatatacattcagtaggtggcaatgcctcctatttccctaaaaatatagcgccaaagagttcaaaattgaattctcataatctgctattaggaaaagaggtcaacttctatattttttacatcaggtaatttggctataatacaacggcatgctgaggtcaacttctgtatttttttctgcaagtaacttggctataatacagcggcatgctccattctgaagctggtcaagaaataaatatagcacttgcaatattttccagtagtcaaacctctccattacttcaattctcgttctcatttttgactatgttcttcatgtcagttcaacataataattaagaggtcgcttgcccctgagacggcttcatgatccatcgaagatggcgcttaatctcgagagctagggagatgaaatgccttttgtacatgatggaaggaaacaaattacgtacatactgcaattatatctgggttctcagccttgccatggttagtcaagcccctctatgattttatcagttgattcaggtggttgattatatggtggttcagagagctcgaggtgaatcacagagtacatatagatctctccactccagtcactatgttgggaatcctcagcctttggaggaatcatgagtgcatacttcagtggttctccagtcacttatggcgtaagatttgtctttggtgttacagcacttttgccactgttccgagtagcagagaaggacaactctggcaaactgtgaagaaaataaaagattttcacaagcggaatcttcagaatctgaataaaggagttcgtgggaatcagttgtaccaaaaactggttcagttttcgtattccaagcatactactggaagttcacactgatcggcgacaaactctcgcccaaggagaagttgaaggaggatcagcgtgaacacccactgaaagagagatggagttgaatgagaaatctgaaaagaatacgcaagaggtagatgagaagttccaaaacacaaacttgtatctcaagaacttagagatggagcttcgggagttacaagtgcttcataagcaatcagatagatctgaaagttttactgtgccaacacatgcacacactggtggtgcctgcatctagctattcagatcaaagcctgacaggtaccatagggcaaagtgaagaagaaacagaagagttgagcaagatcacgctagagaataaggatattcagcttgatatcaatataagagtgtttgatggagccgaccctatggagctgcatgtttatgattttaaaggacctggtgtaaccttatcaatgtacaatagcgatgagtttattaggccttttgctaagtcctccatggatatggctctttcaaaaaagtcgtctcttcatctcagcaccaagaatacaatcatcaagaagtatgacgacaggcatggatcatctatgtttctacaagctcgcggtcacatttattaggccttttgctaagttcatggatatggctctttcaaaaaagtcgtctcttcatctcagcaccaagaatacaatcatcaagaagtatgacgacatgcatggatcatctatgtttctacaagctcgcggtgatcaacttgctattgggaaagaaactgcacgtcgtttgggaatgggtactaatatgtacccttcctctgctttactcagacagaataaggatgagtcaattgcttccttgccaattgatgaattgatcgagaaggctgatggctttgctggtgtctttccagaacacaagtatgagatcgtgaaaggcttgcaagcaagaaaacatatatgtggcatgactggggatggtgtaaatgatgccccagctttgaagaaggctgatattggtattgcagtagcagactctactgatgcaactcgtagtgcttctgacattgtcctaactgaacctggccttagtgtgattattagtgctgtgctgacgagtcgggcaattttccaaaggatgaagaattacacgatctatgctgtatcgattaccatccgtattgtgcttggttttatgcttcttgcgctgatatggaagtttgacttcccaccatttatggtcctgatcattgccatcctcaatgacggtaccattatgactatctcgaaggacagagtaaaaccatctccacaaccagacagttggaagttagctgagatttttgcaactggagtagttcttggtggttatttggccatgatgactgtcattttcttctgggctgcatacaagactgactttttcccgcggctgttccacgtcgaaagcctcgagaagaccgcccaggatgactttcagaagttcgcctctgccgtgtaccttcaagtcagcacggtcagtcaggcccttatcttcgtgacacggtcgcgcagctggtcgtttgtggagcgtcctgggttcttgctggtcttcgctttcttggtggctaagctgattgccactctgatcgctgtatatgccaactgggcgttcactgcgatcaagggcattggatggggctgggccggtgtcatctggctctataacatcgtcttctacttcccgctggacatcatcaagttcctcatccgctatgcgctgagtgggagggcatggaacctcgtccttgagcagaggattgcgttcacgagcaagaagaatttcggcacggaagaaagggagcgcaagtgggcgcatgcgcagaggactctccatgggctccagccgccagaagcatccatcttcgagaacaagacgacattcaatgagctgaaccagctcgcggaagaggcccgcaggagagccgagatggcgaggttgcgagaagtgagcaccctgaaggggaggatggagtcagtggtgaagcagaagggtctggacatctagaccatccagcagtcctacactgtgtgactgactgactgacgacgacggggtttatagaggtttcttcttatactatacaatctgtactaggtagcaataaggatcaaggaaggaacccctatatattggctgcggttcgcaggaaatgaatgatggtaatatttatgatgtcggtgtggtgcttctgtcgccaactctcgaccatactaccctcaactcacccccggcaccaccggcaggcattgatattcagagatgaggttttgaatgagacgttcattatttgtacgtatttggaaagtcgtagaacaacatgatcaatactttgttcagaaaaggaacgcagctggcactctagccctttctagtctgcaaaaaattactgcagcatttcgaatgttatcttatggggtagttgctgatgctactattgattcacccctagaagtattcacaaacatgaaatgcagttctcttcttcaagtttgatgatgaagatgtttagtactacatcctgatgaagatgttctgcatgcacatgtactatattggtcccctttcagatagcatcataaaccaggaaacaaaataaagtagtacatatgtagtgaaaggaatcaataac

SEQ ID NO: 66315 - DNA, 5951 bp, Zea Mays
atggcctcacccacggtcgcctccccgatccgggcgagccccgtcgacaaccccaccgtcgcgccctcactggcctcctgccgctgcgccttatcgctagatgctcgacatccccatccgcgcgctcgaggcagaggccagggacaccaagatgagcccgaccgcgaccgcctagccatcagctccaaagaagaagccaggggaccgatggacgtcagtgttccgtcgtggtggcccgctagatccatattcagcaagaaagatatctcgccatgccggcccagggccgcagcccgtcaccttcctccccccgcacccgccgtgacagccgcctccccacgcccgcttacccgactggccgcacaagatgcccacagtggcccccatcgcgcccacccgctccccccatccaccgcgacctcagccgccacgccgacgccatccccgtcctctagcgcgttgtcgccgtcgtcacaccgccaaaggtgcctgccccctgctaccgaggtcgacgaccagcagcggcaagctgccgagctcgacgacacgcacgccatgcttggccatatggacgagtccatcgcctgctacgagaaggggctccagatccagatgtccgcgctcgatgagcgcaatccctgcctccctgagacctgcaggtgattgacaaggtttaggaggaaacttccaaaagccggtcaagtatggagtgcttaacatcactttggcaacttatatttttttacatgtttgctttgtttgttaacaacataatttatgggctgacaatgtgatcatgtattctttctggtagtcttcgtgtcactgcttgcagttgcaggggagggatcatggctttcttttattttccatgtgcaatgtttaatttaggtgatgaactccaaagcttatcccattgttttctagcaagagctaagcaatactggatggagaacatttatctttttaataacgagtaaaagcataatggcatgcttgtgtttagttctctgtttgttgaccaatcgctatatttaatcttgattttttttatctataacttgaatttcaaagattcaatattttttattcagacattttctcttctctagatattcttttatgcaaataacgcggttacactagatcagccaacattctgggaaataagctatatggtcagagtaagaggttcaagagttgatagttcaacaactttaactgagagcaaatctacaagaaaaaggaaacaagcaacctggaacctacaactgcaggagcttgcttgaaagtgaacaatcaaggttgtgtgtatatattatgcccgacatttttgaaggatattgcgagggccattgtatctgctggaaaaatcatttcaacttgtcgaacatggtattaggatacgaattggagtggtcaacagaaattctggacagatatgtcaaatttcagaatccacgatggtcctccaagaaataaagatgctcttgatcatctattgagaagtggaatactaattttttgctgcagcgtgatggataaaggtttttgcgtattcttgggtttttttcctttcctttttggctacacacaactctttttaaatatacattcagtaggtggcaatgcctcctatttccctaaaaatatagcgccaaagagttcaaaattgaattctcataatctgctattaggaaaagaggtcaacttctatattttttacatcaggtaatttggctataatacaacggcatgctgaggtcaacttctgtatttttttctgcaagtaacttggctataatacagcggcatgctccattctgaagctggtcaagaaataaatatagcacttgcaatattttccagtagtcaaacctctccattacttcaattctcgttctcatttttgactatgttcttcatgtcagttcaacataataattaagaggtcgcttgcccctgagacggcttcatggtattttatttgttttttacaaagtattttttaagcgctaaacttacagtgcactttctctattcgttttggtgctgcttataagtcttttgtgttttagatccatcgaagatggcgcttaatctcgagagctagggagatgaaatgccttttgtacatgatggaaggaaacaaattacgtacatgtatatgtggatcgaattgactgttgcattctgcctgtatttaagcaacggtttccacccaaaacgtctataatttggtccttcctagatgtgtcaaatgtgtttactgcactgcgtttgcttttgtggcagcgccctaatagttgtttataaagtctgatgttaacaaactattgtcatgctatgtaatatatagtcttaacatgttggtttgttgagtgttcgaatatcagttttatattattatgtcaggtgttattagtgttcaattttttaagttcttgttgtacatcctatcattacatgagacaatgttgtgatgtttacaatattgtgttatgtatgttatatcattttggtattatagtataatttaatttgtatcagtttagttctgtattggttgttgccaaaaaaaattatgagatattaaggtcgataataatgttcgtttttatataatcgttttgcactaatattttgttaatttttttgtataccgttgcaacgcacgggcacctaactagtatgagactatgagtacatcaagtgcattcccttagaactcttgttgtgtaaaaaaatgtgtaacatgtcttggtacagagattaatttggtttgtgttttttagactgcaattatatctgggttctcagccttgccatggttagtcaagcccctctatgattttatcagttgattcaggtggttgattatatggtggttcagagagctcgaggtgaatcacagagtacatatagatctctccactccagtcactatgttgggaatcctcagcctttggaggaatcatgagtgcatacttcagtggttctccagtcacttatggcgtaagatttgtctttggtgttacagcacttttgccactgttccgagtagcagagaaggacaactctggcaaactgtgaagaaaataaaagattttcacaagcggaatcttcagaatctgaataaaggagttcgtgggaatcagttgtaccaaaaactggttcagttttcgtattccaagcatactactggaagttcacactgatcggcgacaaactctcgcccaaggagaagttgaaggaggatcagcgtgaacacccactgaaagagagatggagttgaatgagaaatctgaaaagaatacgcaagaggtagatgagaagttccaaaacacaaacttgtatctcaagaacttagagatggagcttcgggagttacaagtgcttcataagcaatcagatagatctgaaagttttactgtgccaacacatgcacacactggtggtgcctgcatctagctattcagatcaaagcctgacaggtaccatagggcaaagtgaagaagaaacagaagagttgagcaagatcacgctagagaataaggatattcagcttgatatcaatataagagaagaatcttggagctcttcacaacaagtgaacttttacacagaaagtaccagctccagtgaggcttgtttgatggagccgaccctatggagctgcatgtttatgattttaaaggacctggtgtaaccttatcaatgtacaatagcgatgagtttattaggccttttgctaagtcctccatggatatggctctttcaaaaaagtcgtctcttcatctcagcaccaagaatacaatcatcaagaagtatgacgacaggcatggatcatctatgtttctacaagctcgcggtcacatttattaggccttttgctaagttcatggatatggctctttcaaaaaagtcgtctcttcatctcagcaccaagaatacaatcatcaagaagtatgacgacatgcatggatcatctatgtttctacaagctcgcgttacaatggaatgctaagagacaaatagttaaagaactgctttaacctaccttgatggagaggggagaatgcatcgtgttagcaagggagcaccagagcaggtgatcaacttgctattgggaaagaaactgcacgtcgtttgggaatgggtactaatatgtacccttcctctgctttactcagacagaataaggatgagtcaattgcttccttgccaattgatgaattgatcgagaaggctgatggctttgctggtgtctttccagaacacaagtatgagatcgtgaaaggcttgcaagcaagaaaacatatatgtggcatgactggggatggtgtaaatgatgccccagctttgaagaaggctgatattggtattgcagtagcagactctactgatgcaactcgtagtgcttctgacattgtcctaactgaacctggccttagtgtgattattagtgctgtgctgacgagtcgggcaattttccaaaggatgaagaattacacgatctatgctgtatcgattaccatccgtattgtgcttggttttatgcttcttgcgctgatatggaagtttgacttcccaccatttatggtcctgatcattgccatcctcaatgacggtaccattatgactatctcgaaggacagagtaaaaccatctccacaaccagacagttggaagttagctgagatttttgcaactggagtagttcttggtggttatttggccatgatgactgtcattttcttctgggctgcatacaagactgactttttcccgcggctgttccacgtcgaaagcctcgagaagaccgcccaggatgactttcagaagttcgcctctgccgtgtaccttcaagtcagcacggtcagtcaggcccttatcttcgtgacacggtcgcgcagctggtcgtttgtggagcgtcctgggttcttgctggtcttcgctttcttggtggctaagctgattgccactctgatcgctgtatatgccaactgggcgttcactgcgatcaagggcattggatggggctgggccggtgtcatctggctctataacatcgtcttctacttcccgctggacatcatcaagttcctcatccgctatgcgctgagtgggagggcatggaacctcgtccttgagcagaggattgcgttcacgagcaagaagaatttcggcacggaagaaagggagcgcaagtgggcgcatgcgcagaggactctccatgggctccagccgccagaagcatccatcttcgagaacaagacgacattcaatgagctgaaccagctcgcggaagaggcccgcaggagagccgagatggcgaggttgcgagaagtgagcaccctgaaggggaggatggagtcagtggtgaagcagaagggtctggacatctagaccatccagcagtcctacactgtgtgactgactgactgacgacgacggggtttatagaggaaatgaatgatggtaatatttatgatgtcggtgtggtgcttctgtcgccaactctcgaccatactaccctcaactcacccccggcaccaccggcaggcattgatattcagagatgaggttttgaatgagacgttcattatttgtacgtatttggaaagtcgtagaacaacatgatcaatactttgttcagaaaaggaacgcagctggcactctagccctttctagtctgcaaaaaattactgcagcatttcgaatgttatcttatggggtagttgctgatgctactattgattcacccctagaagtattcacaaacatgaaatgcagttctcttcttcaagtttgatgatgaagatgtttagtactacatcctgatgaagatgttctgcatgcacatgtactatattggtcccctttcagatagcatcataaaccaggaaacaaaataaagtagtacatatgtagtgaaaggaatcaataac

SEQ ID NO: 66316 - DNA, 2307 bp, Zea Mays
agattgagattttttttgcttgtatacgaggtgtttgatggagccgaccctatggagctgcatgtttatgattttaaaggacctggtgtaaccttatcaatgtacaatagcgatgaggccttttgctaagtcctccatggatatggctctttcaaaaaagtcgtctcttcatctcagcaccaagaatacaatcatcaagaagtatgacgacaggcatggatcatctatgtttctacaagctcgcggtcacatttattaggccttttgctaagttcatggatatggctctttcaaaaaagtcgtctcttcatctcagcaccaagaatacaatcatcaagaagtatgacgacatgcatggatcatctatgtttctacaagctcgcggtgatcaacttgctattgggaaagaaactgcacgtcgtttgggaatgggtactaatatgtacccttcctctgctttactcagacagaataaggatgagtcaattgcttccttgccaattgatgaattgatcgagaaggctgatggctttgctggtgtctttccagaacacaagtatgagatcgtgaaaggcttgcaagcaagaaaacatatatgtggcatgactggggatggtgtaaatgatgccccagctttgaagaaggctgatattggtattgcagtagcagactctactgatgcaactcgtagtgcttctgacattgtcctaactgaacctggccttagtgtgattattagtgctgtgctgacgagtcgggcaattttccaaaggatgaagaattacacgatctatgctgtatcgattaccatccgtattgtgcttggttttatgcttcttgcgctgatatggaagtttgacttcccaccatttatggtcctgatcattgccatcctcaatgacggtaccattatgactatctcgaaggacagagtaaaaccatctccacaaccagacagttggaagttagctgagatttttgcaactggagtagttcttggtggttatttggccatgatgactgtcattttcttctgggctgcatacaagactgactttttcccgcggctgttccacgtcgaaagcctcgagaagaccgcccaggatgactttcagaagttcgcctctgccgtgtaccttcaagtcagcacggtcagtcaggcccttatcttcgtgacacggtcgcgcagctggtcgtttgtggagcgtcctgggttcttgctggtcttcgctttcttggtggctaagctgattgccactctgatcgctgtatatgccaactgggcgttcactgcgatcaagggcattggatggggctgggccggtgtcatctggctctataacatcgtcttctacttcccgctggacatcatcaagttcctcatccgctatgcgctgagtgggagggcatggaacctcgtccttgagcagaggattgcgttcacgagcaagaagaatttcggcacggaagaaagggagcgcaagtgggcgcatgcgcagaggactctccatgggctccagccgccagaagcatccatcttcgagaacaagacgacattcaatgagctgaaccagctcgcggaagaggcccgcaggagagccgagatggcgaggttgcgagaagtgagcaccctgaaggggaggatggagtcagtggtgaagcagaagggtctggacatctagaccatccagcagtcctacactgtgtgactgactgactgacgacgacggggtttatagaggtttcttcttatactatacaatctgtactaggtagcaataaggatcaaggaaggaacccctatatattggctgcggttcgcaggaaatgaatgatggtaatatttatgatgtcggtgtggtgcttctgtcgccaactctcgaccatactaccctcaactcacccccggcaccaccggcaggcattgatattcagagatgaggttttgaatgagacgttcattatttgtacgtatttggaaagtcgtagaacaacatgatcaatactttgttcagaaaaggaacgcagctggcactctagccctttctagtctgcaaaaaattactgcagcatttcgaatgttatcttatggggtagttgctgatgctactattgattcacccctagaagtattcacaaacatgaaatgcagttctcttcttcaagtttgatgatgaagatgtttagtactacatcctgatgaagatgttctgcatgcacatgtactatattggtcccctttcagatagcatcataaaccaggaaacaaaataaagtagtacatatgtagtgaaaggaatcaataac

SEQ ID NO: 66317 - DNA, 958 bp, Zea Mays
caacgccacccgagccttcccgtcccgaaaccaaagttcccgtggtcgtcccacactcccacccctaccaacgctctgcgccaacgaacgcgtccgcaagtcaaaccaggcccggagccaccagcaaccaaccgagcgcatggaggccgcggcggcgaccgcgctcccgttcgcggcggccgtccccactgcctggagggtgcgcgcgagcccgcggacgcggcggcgctccgtggcggcgaagctggagcgcgggctcggcaagggggttcccaccaccaactacgtggtgccgctcgacaaggccaccgggatgacgcgcccgctcgtcgagatcctgcgggacctcaacaagcgcgtccccgacaagatcatcgaccccgacactaacaccgtcaactggtaccatgccaacagaatgcttagcttttacgcaccaggttggtgtggagaagttcgtgatgttatctattctgagaatggaactgtaaccgtggtatatcgagtgatacttaaaggaactgatggagagagatgccacgggcacagcacagttacatgaggggcgcagggaagatgctgttgcagccgcagaggaagctgcattctgcaaagcctgcgcacggttcggttttggcctgtacctgtaccaccaggatgattctcattacgacgaccacttccattgaggctcagtctgcaaaagagctgttcataagctgcaacatgcgttggatatgcctctcgaaaaacttcgcatctagaatcaatttttgctctttgcgtagtatcatactcataacacaaagaagtgaacctatgtagatgctattcgaaaccttctttttattaatattagaattcttattaatattattgtataattatttttttaatgtatatgtgtcggacacaatctattgattgatctatattctggcagtctactatatcatag

SEQ ID NO: 66318 - DNA, 1368 bp, Zea Mays
aaatactccactaatatgtcagtaactagggccacattaggtttttaataaagtggtatagattctgtaatcagtcatcgtcttttgtcgacaagcccacaagcgttttcctctccgagtcctccctggcctctcaaccactcatcatcgccttcgcaggcatcgccctctcgccgggccgtccgattccgccatggcttccgatgagagcaaaaattcaaaaccagagaagccatcttcagcagctggacccatcgataagagagatggctgagcaaattgcaagtgaccctgtgttcaaccagatggctgaacagcttcagaaaagtgctcagggtgctggagaacagggtattcctgcattggatcctcaacagtatatggaaacaatgcaacaagtcatgcaaaaccctcagtttgtgtcaatggcagagcgtcttgggaatgcccttatgcaggatcctgctatgtccagtatgcttgagaacttgaccagtccagctcataaggagcagcttgaggagaggatggcccgtatcaaggaagatccatccttgaagccaattcttgatgagatagagaatgggggtccatctgcaatggtgaagtattggaatgaccctgaggttcttcaaaagattggccaggcaatgggtgttaaccttcccggagattctagtgtgtccactgtgctctctggacctgaagagactgaggaggaaggaggggatgacgatgagtccattgttcatcacactgcaagtgttggtgatgaagagggtttgaagaaagctttagaaggtggagcagacaaggatgaagaagatgccgagggaagacgggctttacattttgcatgtggctatggtgagttgaagtgtgcagaaattctccttgaggcgggggccgcagttgatgccctagataagaacaagaacactccgttgcactatgctgctgggtatggtcggaaggaatgtgtggatcttctgttgaagtatggtgctgctgtcacgctccagaatctggacgggaaaacccccatcgaggttgccaaactcaacagtcaagatgaggttctcaagttgctagagaaggacgctttcctatagagaagagaaccgccgaataaagtgtatcaagccgtcaaactattggttttgcattggtttatttatctcggtctggtatggttgtctgtagcttgtgaatttgatgttcttttcatagcgaatgccgtttttgaaccagtacttgtgtaagaagtacctaggcttgttcttgtcctccatatatgaatctttcacacttgtcaagaattgattacagttattttcaaggctatttcctccgttcccattctaaatt

SEQ ID NO: 66319 - DNA, 1230 bp, Zea Mays
ttctgtaatcagtcatcgtcttttgtcgacaagcccacaagcgttttcctctccgagtcctccctggcctctcaaccactcatcatcgccttcgcaggcatcgccctctcgccgggccgtccgattccgccatggcttccggacccatcgataagagagatggctgagcaaattgcaagtgaccctgtgttcaaccagatggctgaacagcttcagaaaagtgctcagggtgctggagaacagggtattcctgcattggatcctcaacagtatatggaaacaatgcaacaagtcatgcaaaaccctcagtttgtgtcaatggcagagcgtcttgggaatgcccttatgcaggatcctgctatgtccagtatgcttgagaacttgaccagtccagctcataaggagcagcttgaggagaggatggcccgtatcaaggaagatccatccttgaagccaattcttgatgagatagagaatgggggtccatctgcaatggtgaaattggccaggcaatgggtgttaaccttcccggagattctagtgtgtccactgtgctctctggacctgaagagactgaggaggaaggaggggatgacgatgagtccattgttcatcacactgcaagtgttggtgatgaagagggtttgaagaaagctttagaaggtggagcagacaaggatgaagaagatgccgagggaagacgggctttacattttgcatgtggctatggtgagttgaagtgtgcagaaattctccttgaggcgggggccgcagttgatgccctagataagaacaagaacactccgttgcactatgctgctgggtatggtcggaaggaatgtgtggatcttctgttgaagtatggtgctgctgtcacgctccagaatctggacgggaaaacccccatcgaggttgccaaactcaacagtcaagatgaggttctcaagttgctagagaaggacgctttcctatagagaagagaaccgccgaataaagtgtatcaagccgtcaaactattggttttgcattggtttatttatctcggtctggtatggttgtctgtagcttgtgaatttgatgttcttttcatagcgaatgccgtttttgaaccagtacttgtgtaagaagtacctaggcttgttcttgtcctccatatatgaatctttcacacttgtcaagaattgattacagttattttcaaggctatttcctccgttcccattctaaatt

SEQ ID NO: 66320 - DNA, 1302 bp, Zea Mays
ttctgtaatcagtcatcgtcttttgtcgacaagcccacaagcgttttcctctccgagtcctccctggcctctcaaccactcatcatcgccttcgcaggcatcgccctctcgccgggccgtccgattccgccatggcttccgatgagagcaaaaattcaaaaccagagaagccatcttcagcagacccatcgataagagagatggctgagcaaattgcaagtgaccctgtgttcaaccagatggctgaacagcttcagaaaagtgctcagggtgctggagaacagggtattcctgcattggatcctcaacagtatatggaaacaatgcaacaagtcatgcaaaaccctcagtttgtgtcaatggcagagcgtcttgggaatgcccttatgcaggatcctgctatgtccagtatgcttgagaacttgaccagtccagctcataaggagcagcttgaggagaggatggcccgtatcaaggaagatccatccttgaagccaattcttgatgagatagagaatgggggtccatctgcaatggtgaagtattggaatgaccctgaggttcttcaaaagattggccaggcaatgggtgttaaccttcccggagattctagtgtgtccactgtgctctctggacctgaagagactgaggaggaaggaggggatgacgatgagtccattgttcatcacactgcaagtgttggtgatgaagagggtttgaagaaagctttagaaggtggagcagacaaggatgaagaagatgccgagggaagacgggctttacattttgcatgtggctatggtgagttgaagtgtgcagaaattctccttgaggcgggggccgcagttgatgccctagataagaacaagaacactccgttgcactatgctgctgggtatggtcggaaggaatgtgtggatcttctgttgaagtatggtgctgctgtcacgctccagaatctggacgggaaaacccccatcgaggttgccaaactcaacagtcaagatgaggttctcaagttgctagagaaggacgctttcctatagagaagagaaccgccgaataaagtgtatcaagccgtcaaactattggttttgcattggtttatttatctcggtctggtatggttgtctgtagcttgtgaatttgatgttcttttcatagcgaatgccgtttttgaaccagtacttgtgtaagaagtacctaggcttgttcttgtcctccatatatgaatctttcacacttgtcaagaattgattacagttattttcaaggctatttcctccgttcccattctaaatt

SEQ ID NO: 66321 - DNA, 1355 bp, Zea Mays
ttctgtaatcagtcatcgtcttttgtcgacaagcccacaagcgttttcctctccgagtcctccctggcctctcaaccactcatcatcgccttcgcaggcatcgccctctcgccgggccgtccgattccgccatggcttccgatgagagcaaaaattcaaaaccagagaagccatcttcagcagctggtgcaggcctccccaatccgtttgatttttcttctatgagcaacttgctcaatgacccatcgataagagagatggctgagcaaattgcaagtgaccctgtgttcaaccagatggctgaacagcttcagaaaagtgctcagggtgctggagaacagggtattcctgcattggatcctcaacagtatatggaaacaatgcaacaagtcatgcaaaaccctcagtttgtgtcaatggcagagcgtcttgggaatgcccttatgatcctgctatgtccagtatgcttgagaacttgaccagtccagctcataaggagcagcttgaggagaggatggcccgtatcaaggaagatccatccttgaagccaattcttgatgagatagagaatgggggtccatctgcaatggtgaagtattggaatgaccctgaggttcttcaaaagattggccaggcaatgggtgttaaccttcccggagattctagtgtgtccactgtgctctctggacctgaagagactgaggaggaaggaggggatgacgatgagtccattgttcatcacactgcaagtgttggtgatgaagagggtttgaagaaagctttagaaggtggagcagacaaggatgaagaagatgccgagggaagacgggctttacattttgcatgtggctatggtgagttgaagtgtgcagaaattctccttgaggcgggggccgcagttgatgccctagataagaacaagaacactccgttgcactatgctgctgggtatggtcggaaggaatgtgtggatcttctgttgaagtatggtgctgctgtcacgctccagaatctggacgggaaaacccccatcgaggttgccaaactcaacagtcaagatgaggttctcaagttgctagagaaggacgctttcctatagagaagagaaccgccgaataaagtgtatcaagccgtcaaactattggttttgcattggtttatttatctcggtctggtatggttgtctgtagcttgtgaatttgatgttcttttcatagcgaatgccgtttttgaaccagtacttgtgtaagaagtacctaggcttgttcttgtcctccatatatgaatctttcacacttgtcaagaattgattacagttattttcaaggctatttcctccgttcccattctaaatt

SEQ ID NO: 66322 - DNA, 1297 bp, Zea Mays
gctgttctttctattgtggtgttttgcttggttgtgcgtgtggttccttggcgtgctacctgcaacatagatccgcacgatgagagcaaaaattcaaaaccagagaagccatcttcagcagctggtgcaggcctccccaatccgtttgatttttcttctatgagcaacttgctcaatgacccatcgataagagagatggctgagcaaattgcaagtgaccctgtgttcaaccagatggctgaacagcttcagaaaagtgctcagggtgctggagaacagggtattcctgcattggatcctcaacagtatatggaaacaatgcaacaagtcatgcaaaaccctcagtttgtgtcaatggcagagcgtcttgggaatgcccttatgcaggatcctgctatgtccagtatgcttgagaacttgaccagtccagctcataaggagcagcttgaggagaggatggcccgtatcaaggaagatccatccttgaagccaattcttgatgagatagagaatgggggtccatctgcaatggtgaagtattggaatgaccctgaggttcttcaaaagattggccaggcaatgggtgttaaccttcccggagattctagtgtgtccactgtgctctctggacctgaagagactgaggaggaaggaggggatgacgatgagtccattgttcatcacactgcaagtgttggtgatgaagagggtttgaagaaagctttagaaggtggagcagacaaggatgaagaagatgccgagggaagacgggctttacattttgcatgtggctatggtgagttgaagtgtgcagaaattctccttgaggcgggggccgcagttgatgccctagataagaacaagaacactccgttgcactatgctgctgggtatggtcggaaggaatgtgtggatcttctgttgaagtatggtgctgctgtcacgctccagaatctggacgggaaaacccccatcgaggttgccaaactcaacagtcaagatgaggttctcaagttgctagagaaggacgctttcctatagagaagagaaccgccgaataaagtgtatcaagccgtcaaactattggttttgcattggtttatttatctcggtctggtatggttgtctgtagcttgtgaatttgatgttcttttcatagcgaatgccgtttttgaaccagtacttgtgtaagaagtacctaggcttgttcttgtcctccatatatgaatctttcacacttgtcaagaattgattacagttattttcaaggctatttcctccgttcccattctaaatt

SEQ ID NO: 66323 - DNA, 1203 bp, Zea Mays
cgtgtggttccttggcgtgctacctgcaacatagatccgcacgatgagagcaaaaattcaaaaccagagaagccatcttcagcagctggacccatcgataagagagatggctgagcaaattgcaagtgaccctgtgttcaaccagatggctgaacagcttcagaaaagtgctcagggtgctggagaacagggtattcctgcattggatcctcaacagtatatggaaacaatgcaacaagtcatgcaaaaccctcagtttgtgtcaatggcagagcgtcttgggaatgcccttatgcaggatcctgctatgtccagtatgcttgagaacttgaccagtccagctcataaggagcagcttgaggagaggatggcccgtatcaaggaagatccatccttgaagccaattcttgatgagatagagaatgggggtccatctgcaatggtgaagtattggaatgaccctgaggttcttcaaaagattggccaggcaatgggtgttaaccttcccggagattctagtgtgtccactgtgctctctggacctgaagagactgaggaggaaggaggggatgacgatgagtccattgttcatcacactgcaagtgttggtgatgaagagggtttgaagaaagctttagaaggtggagcagacaaggatgaagaagatgccgagggaagacgggctttacattttgcatgtggctatgttgaagtgtgcagaaattctccttgaggcgggggccgcagttgatgccctagataagaacaagaacactccgttgcactatgctgctgggtatggtcggaaggaatgtgtggatcttctgttgaagtatggtgctgctgtcacgctccagaatctggacgggaaaacccccatcgaggttgccaaactcaacagtcaagatgaggttctcaagttgctagagaaggacgctttcctatagagaagagaaccgccgaataaagtgtatcaagccgtcaaactattggttttgcattggtttatttatctcggtctggtatggttgtctgtagcttgtgaatttgatgttcttttcatagcgaatgccgtttttgaaccagtacttgtgtaagaagtacctaggcttgttcttgtcctccatatatgaatctttcacacttgtcaagaattgattacagttattttcaaggctatttcctccgttcccattctaaatt

SEQ ID NO: 66324 - DNA, 1199 bp, Zea Mays
ggttccttggcgtgctacctgcaacatagatccgcacgatgagagcaaaaattcaaaaccagagaagccatcttcagcagacccatcgataagagagatggctgagcaaattgcaagtgaccctgtgttcaaccagatggctgaacagcttcagaaaagtgctcagggtgctggagaacagggtattcctgcattggatcctcaacagtatatggaaacaatgcaacaagtcatgcaaaaccctcagtttgtgtcaatggcagagcgtcttgggaatgcccttatgcaggatcctgctatgtccagtatgcttgagaacttgaccagtccagctcataaggagcagcttgaggagaggatggcccgtatcaaggaagatccatccttgaagccaattcttgatgagatagagaatgggggtccatctgcaatggtgaagtattggaatgaccctgaggttcttcaaaagattggccaggcaatgggtgttaaccttcccggagattctagtgtgtccactgtgctctctggacctgaagagactgaggaggaaggaggggatgacgatgagtccattgttcatcacactgcaagtgttggtgatgaagagggtttgaagaaagctttagaaggtggagcagacaaggatgaagaagatgccgagggaagacgggctttacattttgcatgtggctatggtgagttgaagtgtgcagaaattctccttgaggcgggggccgcagttgatgccctagataagaacaagaacactccgttgcactatgctgctgggtatggtcggaaggaatgtgtggatcttctgttgaagtatggtgctgctgtcacgctccagaatctggacgggaaaacccccatcgaggttgccaaactcaacagtcaagatgaggttctcaagttgctagagaaggacgctttcctatagagaagagaaccgccgaataaagtgtatcaagccgtcaaactattggttttgcattggtttatttatctcggtctggtatggttgtctgtagcttgtgaatttgatgttcttttcatagcgaatgccgtttttgaaccagtacttgtgtaagaagtacctaggcttgttcttgtcctccatatatgaatctttcacacttgtcaagaattgattacagttattttcaaggctatttcctccgttcccattctaaatt

SEQ ID NO: 66325 - DNA, 1158 bp, Zea Mays
ctacctgcaacatagatccgcacgatgagagcaaaaattcaaaaccagagaagccatcttcagcagctggacccatcgataagagagatggctgagcaaattgcaagtgaccctgtgttcaaccagatggctgaacagcttcagaaaagtgctcagggtgctggagaacagggtattcctgcattggatcctcaacagtatatggaaacaatgcaacaagtcatgcaaaaccctcagtttgtgtcaatggcagagcgtcttgggaatgcccttatgcaggatcctgctatgtccagtatgcttgagaacttgaccagtccagctcataaggagcagcttgaggagaggatggcccgtatcaaggaagatccatccttgaagccaattcttgatgagatagagaatgggggtccatctgcaatggtgaaattggccaggcaatgggtgttaaccttcccggagattctagtgtgtccactgtgctctctggacctgaagagactgaggaggaaggaggggatgacgatgagtccattgttcatcacactgcaagtgttggtgatgaagagggtttgaagaaagctttagaaggtggagcagacaaggatgaagaagatgccgagggaagacgggctttacattttgcatgtggctatggtgagttgaagtgtgcagaaattctccttgaggcgggggccgcagttgatgccctagataagaacaagaacactccgttgcactatgctgctgggtatggtcggaaggaatgtgtggatcttctgttgaagtatggtgctgctgtcacgctccagaatctggacgggaaaacccccatcgaggttgccaaactcaacagtcaagatgaggttctcaagttgctagagaaggacgctttcctatagagaagagaaccgccgaataaagtgtatcaagccgtcaaactattggttttgcattggtttatttatctcggtctggtatggttgtctgtagcttgtgaatttgatgttcttttcatagcgaatgccgtttttgaaccagtacttgtgtaagaagtacctaggcttgttcttgtcctccatatatgaatctttcacacttgtcaagaattgattacagttattttcaaggctatttcctccgttcccattctaaatt

SEQ ID NO: 66326 - DNA, 2951 bp, Zea Mays
ccgactaagcccctatcgaatgaccttgagaaaaataaactagatttattccatttgtatttgcatatttcttgtttgggccatatccaacccgcacaacaccgtcctcaggaccaaattaagacccagcccagcctgtcgctcggatgcttgtccatgactcgaaaccctgactaaaccatcgtccctccattcttctccctcccggcgccggaaaaacgagtttattcacagaccgcgtatctccctcccactcttcgccatggaccccagcttccggttcgacccggacagctccgacgatgaggcgtcgggtgccccagcccggggtcgcctggcgcagtcgccgtgggagttctccttgtacgcggagtccgtggcggcggagcacgcgcggcgccgcaccacctctatcgacgagaagatcttgcacctgcgccagggatgcgggaagccggtcctctccgatggctcggagagcgacgtgagcggcagcggggaggatgacagcaacgagaaggagatagaggaggagagcggtgacgaggaggacgagcgggagatcgagggggttggcgacgaggaggagagcggagatcgggaggggggtgaggagggaggaagcgagctgggagaagagaaagatgcccatgaggaagaagatacggtcgagcagaatgaaacgagtggaccagttgatccttctaattttttcgcttcttcagagggggcaacttttcatgcaaattcgttccttgagcttaacttgtctcgtccgctagttcgagcttgtgaagcacttggctaccagaagccaactccgattcaggctgcttgtatacctctggcattaactggaagggacatctgtggtagtgctattacaggatctggaaagacagctgctttctctttgcctgtgctggaacgtctactttttcgtccaaaacgtgtacctgcaattagggtgcttattcttactccaactagagagctggctgctcaggttcatagtatgatcgagaagttagcccaattcactgatatcagatgttgtctcatcgttggtggtctttcaactaaggttcaagaagttgctctaagatcaatgcctgacatcgttgtagcaacccctgggcgtataatagaccatttacgcaactctctttctgttgggcttgaagatctagctgttgtgatccttgatgaggctgatcgcttgctagaattgggtttcagtgctgaaattcaagaactgattcgtatgtgtcctaaaaggaggcagactatgcttttctctgctacaatgacagaagaaattgatgaacttataaaactttcactaaacaaacctgtacgtcttgaagctgatccttctctgaagcggcctgcaacgttgactgaagaggttgttaggatacgacgagcacgtgagtcaaatcaagaagcggttcttcttgcgctctgtttgaagactttcaagcgaagtgttatcatttttagtggcacaaagcaatccgcacacaggttaaaaataatatttggtctctctggcatgaaagcagctgaacttcatggcaaccttacacaggcccagcggcttgaggctctggaacttttcaggaaacaagaagtagattttctgattgcaactgatgtcgctgctcgtgggattgatattgttggtgttcagactgtaataaattttgcatgcccaagagatgtgaaaacttatcttcatcgtgttggccgcacagcacgggcaggaagagaaggctatgccgtaacatttgtaaccgatgatgatagatccctcttgaaagcaattgcaaagaaggctggttcacaactgaaaagccgcattgttgcagagaaacctgtggctgagtgtgcacaactgattgagcaactagaagatcagatttccatcatcattcgagaagaaaaggtggaaagagaagcgagaaaagctgaaatggaaattgcaaagaaaatatgatagctcataaggatgagatatactcacggccaaagagaacctggtttgctactgaaagggaaaagaagcttttggtagcagctgctaaagaatctttgggtcaaggtaagagtacctctggaattattagtgctaagcaggctgaagacctccgtctgaaggagaaaaagagacgagagcatgagaaggacctaccaaggaagaaacgccgaagattagaggcccagcgagagatgctggaagatgaggatgaagatgacgaggaagcaaaggaaagtgatagagggaagaaactgaagaaaggccagtctctagtggatgctgcttaccgaaaggcaaagtcattgaaggcggctagcaaacggggtcctggtgcaagcaaaggaaagaaagagaagaatgcaagacaatattctgagaagactcctaacaggcatgaggagatgcgtgagctgttccagaatgatatgagtgaatggaaacagggacgctcctcaaagaaaaacaacaatttcgcgcacaaaaaatcaaaagcttttaatagcaaagcaagatacaagcgccgcaaatagaagactcggccatccccggatttatttacattctcgtctcagttttgactgactgaccctgaagaaatctctgggatccagatgtttccagttaccatgcgtttgcttgttgtaaacttcgtcatatcatgtattgaaacttaccgttttctgatgtctcattgatcttgggagagctatcctcagtttcgacatgtgccgttgctggtttcgtaggtcgtacttatctcaaaacttacttgccagacgttgttgtgtggaaacgtcgaccagcttgttatgttcctacgcctcgaatgcaatgacaagcttgcacccagtattccagattttgtggatgtgtgatgttggtcttttcgaaagcagattctcatttcaag

SEQ ID NO: 66327 - DNA, 2615 bp, Zea Mays
cgaaaccctgactaaaccatcgtccctccattcttctccctcccggcgccggaaaaacgagtttattcacagaccgcgtatctccctcccactcttcgccatggaccccagcttccggttcgacccggacagctccgacgatgaggcgtcgggtgccccagcccggggtcgcctggcgcagtcgccgtgggagttctccttgtacgcggagtccgtggcggcggagcacgcgcggcgccgcaccacctctatcgacgagaagatcttgcacctgcgccagggatgcgggaagccggtcctctccgatggctcggagagcgacgtgagcggcagcggggaggatgacagcaacgagaaggagatagaggaggagagcggtgacgaggaggacgagcgggagatcgagggggttggcgacgaggaggagagcggagatcgggaggggggtgaggagggaggaagcgagctgggagaagagaaagatgcccatgaggctgcttgtatacctctggcattaactggaagggacatctgtggtagtgctattacaggatctggaaagctgctttctctttgcctgtgctggaacgtctactttttcgtccaaaacgtgtacctgcaattagggtgcttattcttactccaactagagagctggctgctcaggttcatagtatgatcgagaagttagcccaattcactgatatcagatgttgtctcatcgttggtggtctttcaactaaggttcaagaagttgctctaagatcaatgcctgacatcgttgtagcaacccctgggcgtataatagaccatttacgcaactctctttctgttgggcttgaagatctagctgttgtgatccttgatgaggctgatcgcttgctagaattgggtttcagtgctgaaattcaagaactgattcgtatgtgtcctaaaaggaggcagactatgcttttctctgctacaatgacagaagaaattgatgaacttataaaactttcactaaacaaacctgtacgtcttgaagctgatccttctctgaagcggcctgcaacgttgactgaagaggttgttaggatacgacgagcacgtgagtcaaatcaagaagcggttcttcttgcgctctgtttgaagactttcaagcgaagtgttatcatttttagtggcacaaagcaatccgcacacaggttaaaaataatatttggtctctctggcatgaaagcagctgaacttcatggcaaccttacacaggcccagcggcttgaggctctggaacttttcaggaaacaagaagtagattttctgattgcaactgatgtcgctgctcgtgggattgatattgttggtgttcagactgtaataaattttgcatgcccaagagatgtgaaaacttatcttcatcgtgttggccgcacagcacgggcaggaagagaaggctatgccgtaacatttgtaaccgatgatgatagatccctcttgaaagcaattgcaaagaaggctggttcacaactgaaaagccgcattgttgcagagaaacctgtggctgagtgtgcacaactgattgagcaactagaagatcagatttccatcatcattcgagaagaaaaggtggaaagagaagcgagaaaagctgaaatggaaattgcaaaggcagaaaatatgatagctcataaggatgagatatactcacggccaaagagaacctggtttgctactgaaagggaaaagaagcttttggtagcagctgctaaagaatctttgggtcaaggtaagagtacctctggaattattagtgctaagcaggctgaagacctccgtctgaaggagaaaaagagacgagagcatgagaaggacctaccaaggaagaaacgccgaagattagaggcccagcgagagatgctggaagatgaggatgaagatgacgaggaagcaaaggaaagtgatagagggaagaaactgaagaaaggccagtctctagtggatgctgcttaccgaaaggcaaagtcattgaaggcggctagcaaacggggtcctggtgcaagcaaaggaaagaaagagaagaatgcaagacaatattctgagaagactcctaacaggcatgaggagatgcgtgagctgttccagaatgatatgagtgaatggaaacagggacgctcctcaaagaaaaacaacaatttcgcgcacaaaaaatcaaaagcttttaatagcaaagcaagatacaagcgccgcaaatagaagactcggccatccccggatttatttacattctcgtctcagttttgactgactgaccctgaagaaatctctgggatccagatgtttccagttaccatgcgtttgcttgttgtaaacttcgtcatatcatgtattgaaacttaccgttttctgatgtctcattgatcttgggagagctatcctcagtttcgacatgtgccgttgctggtttcgtaggtcgtacttatctcaaaacttacttgccagacgttgttgtgtggaaacgtcgaccagcttgttatgttcctacgcctcgaatgcaatgacaagcttgcacccagtattccagattttgtggatgtgtgatgttggtcttttcgaaagcagattctcatttcaag

SEQ ID NO: 66328 - DNA, 2686 bp, Zea Mays
cgaaaccctgactaaaccatcgtccctccattcttctccctcccggcgccggaaaaacgagtttattcacagaccgcgtatctccctcccactcttcgccatggaccccagcttccggttcgacccggacagctccgacgatgaggcgtcgggtgccccagcccggggtcgcctggcgcagtcgccgtgggagttctccttgtacgcggagtccgtggcggcggagcacgcgcggcgccgcaccacctctatcgacgagaagatcttgcacctgcgccagggatgcgggaagccggtcctctccgatggctcggagagcgacgtgagcggcagcggggaggatgacagcaacgagaaggagatagaggaggagagcggtgacgaggaggacgagcgggagatcgagggggttggcgacgaggaggagagcggagatcgggaggggggtgaggagggaggaagcgagctgggagaagagaaagatgcccatgaggaagaagatacggtcgagcagaatgaaacgagtggaccagttgatccttctaattttttcgcttcttcagagggggcaacttttcatgcaaattcgttccttgagcttaacttgtctcgtccgctagttcgagcttgtgaagcacttggctaccagaagccaactccgattcaggctgcttgtatacctctggcattaactggaagggacatctgtggtagtgctattacaggatctggaaagggttcatagtatgatcgagaagttagcccaattcactgatatcagatgttgtctcatcgttggtggtctttcaactaaggttcaagaagttgctctaagatcaatgcctgacatcgttgtagcaacccctgggcgtataatagaccatttacgcaactctctttctgttgggcttgaagatctagctgttgtgatccttgatgaggctgatcgcttgctagaattgggtttcagtgctgaaattcaagaactgattcgtatgtgtcctaaaaggaggcagactatgcttttctctgctacaatgacagaagaaattgatgaacttataaaactttcactaaacaaacctgtacgtcttgaagctgatccttctctgaagcggcctgcaacgttgactgaagaggttgttaggatacgacgagcacgtgagtcaaatcaagaagcggttcttcttgcgctctgtttgaagactttcaagcgaagtgttatcatttttagtggcacaaagcaatccgcacacaggttaaaaataatatttggtctctctggcatgaaagcagctgaacttcatggcaaccttacacaggcccagcggcttgaggctctggaacttttcaggaaacaagaagtagattttctgattgcaactgatgtcgctgctcgtgggattgatattgttggtgttcagactgtaataaattttgcatgcccaagagatgtgaaaacttatcttcatcgtgttggccgcacagcacgggcaggaagagaaggctatgccgtaacatttgtaaccgatgatgatagatccctcttgaaagcaattgcaaagaaggctggttcacaactgaaaagccgcattgttgcagagaaacctgtggctgagtgtgcacaactgattgagcaactagaagatcagatttccatcatcattcgagaagaaaaggtggaaagagaagcgagaaaagctgaaatggaaattgcaaaggcagaaaatatgatagctcataaggatgagatatactcacggccaaagagaacctggtttgctactgaaagggaaaagaagcttttggtagcagctgctaaagaatctttgggtcaaggtaagagtacctctggaattattagtgctaagcaggctgaagacctccgtctgaaggagaaaaagagacgagagcatgagaaggacctaccaaggaagaaacgccgaagattagaggcccagcgagagatgctggaagatgaggatgaagatgacgaggaagcaaaggaaagtgatagagggaagaaactgaagaaaggccagtctctagtggatgctgcttaccgaaaggcaaagtcattgaaggcggctagcaaacggggtcctggtgcaagcaaaggaaagaaagagaagaatgcaagacaatattctgagaagactcctaacaggcatgaggagatgcgtgagctgttccagaatgatatgagtgaatggaaacagggacgctcctcaaagaaaaacaacaatttcgcgcacaaaaaatcaaaagcttttaatagcaaagcaagatacaagcgccgcaaatagaagactcggccatccccggatttatttacattctcgtctcagttttgactgactgaccctgaagaaatctctgggatccagatgtttccagttaccatgcgtttgcttgttgtaaacttcgtcatatcatgtattgaaacttaccgttttctgatgtctcattgatcttgggagagctatcctcagtttcgacatgtgccgttgctggtttcgtaggtcgtacttatctcaaaacttacttgccagacgttgttgtgtggaaacgtcgaccagcttgttatgttcctacgcctcgaatgcaatgacaagcttgcacccagtattccagattttgtggatgtgtgatgttggtcttttcgaaagcagattctcatttcaag

SEQ ID NO: 66329 - DNA, 2789 bp, Zea Mays
cgaaaccctgactaaaccatcgtccctccattcttctccctcccggcgccggaaaaacgagtttattcacagaccgcgtatctccctcccactcttcgccatggaccccagcttccggttcgacccggacagctccgacgatgaggcgtcgggtgccccagcccggggtcgcctggcgcagtcgccgtgggagttctccttgtacgcggagtccgtggcggcggagcacgcgcggcgccgcaccacctctatcgacgagaagatcttgcacctgcgccagggatgcgggaagccggtcctctccgatggctcggagagcgacgtgagcggcagcggggaggatgacagcaacgagaaggagatagaggaggagagcggtgacgaggaggacgagcgggagatcgagggggttggcgacgaggaggagagcggagatcgggaggggggtgaggagggaggaagcgagctgggagaagagaaagatgcccatgaggaagaagatacggtcgagcagaatgaaacgagtggaccagttgatccttctaattttttcgcttcttcagagggggcaacttttcatgcaaattcgttccttgagcttaacttgtctcgtccgctagttcgagcttgtgaagcacttggctaccagaagccaactccgattcaggctgcttgtatacctctggcattaactggaagggacatctgtggtagtgctattacaggatctggaaagctgctttctctttgcctgtgctggaacgtctactttttcgtccaaaacgtgtacctgcaattagggtgcttattcttactccaactagagagctggctgctcaggttcatagtatgatcgagaagttagcccaattcactgatatcagatgttgtctcatcgttggtggtctttcaactaaggttcaagaagttgctctaagatcaatgcctgacatcgttgtagcaacccctgggcgtataatagaccatttacgcaactctctttctgttgggcttgaagatctagctgttgtgatccttgatgaggctgatcgcttgctagaattgggtttcagtgctgaaattcaagaactgattcgtatgtgtcctaaaaggaggcagactatgcttttctctgctacaatgacagaagaaattgatgaacttataaaactttcactaaacaaacctgtacgtcttgaagctgatccttctctgaagcggcctgcaacgttgactgaagaggttgttaggatacgacgagcacgtgagtcaaatcaagaagcggttcttcttgcgctctgtttgaagactttcaagcgaagtgttatcatttttagtggcacaaagcaatccgcacacaggttaaaaataatatttggtctctctggcatgaaagcagctgaacttcatggcaaccttacacaggcccagcggcttgaggctctggaacttttcaggaaacaagaagtagattttctgattgcaactgatgtcgctgctcgtgggattgatattgttggtgttcagactgtaataaattttgcatgcccaagagatgtgaaaacttatcttcatcgtgttggccgcacagcacgggcaggaagagaaggctatgccgtaacatttgtaaccgatgatgatagatccctcttgaaagcaattgcaaagaaggctggttcacaactgaaaagccgcattgttgcagagaaacctgtggctgagtgtgcacaactgattgagcaactagaagatcagatttccatcatcattcgagaagaaaaggtggaaagagaagcgagaaaagctgaaatggaaattgcaaaggcagaaaatatgatagctcataaggatgagatatactcacggccaaagagaacctggtttgctactgaaagggaaaagaagcttttggtagcagctgctaaagaatctttgggtcaaggtaagagtacctctggaattattagtgctaagcaggctgaagacctccgtctgaaggagaaaaagagacgagagcatgagaaggacctaccaaggaagaaacgccgaagattagaggcccagcgagagatgctggaagatgaggatgaagatgacgaggaagcaaaggaaagtgatagagggaagaaactgaagaaaggccagtctctagtggatgctgcttaccgaaaggcaaagtcattgaaggcggctagcaaacggggtcctggtgcaagcaaaggaaagaaagagaagaatgcaagacaatattctgagaagactcctaacaggcatgaggagatgcgtgagctgttccagaatgatatgagtgaatggaaacagggacgctcctcaaagaaaaacaacaatttcgcgcacaaaaaatcaaaagcttttaatagcaaagcaagatacaagcgccgcaaatagaagactcggccatccccggatttatttacattctcgtctcagttttgactgactgaccctgaagaaatctctgggatccagatgtttccagttaccatgcgtttgcttgttgtaaacttcgtcatatcatgtattgaaacttaccgttttctgatgtctcattgatcttgggagagctatcctcagtttcgacatgtgccgttgctggtttcgtaggtcgtacttatctcaaaacttacttgccagacgttgttgtgtggaaacgtcgaccagcttgttatgttcctacgcctcgaatgcaatgacaagcttgcacccagtattccagattttgtggatgtgtgatgttggtcttttcgaaagcagattctcatttcaag

SEQ ID NO: 66330 - DNA, 2764 bp, Zea Mays
ccctgactaaaccatcgtccctccattcttctccctcccggcgccggaaaaacgagtttattcacagaccgcgtatctccctcccactcttcgccatggaccccagcttccggttcgacccggacagctccgacgatgaggcgtcgggtgccccagcccggggtcgcctggcgcagtcgccgtgggagttctccttgtacgcggagtccgtggcggcggagcacgcgcggcgccgcaccacctctatcgacgagaagatcttgcacctgcgccagggatgcgggaagccggtcctctccgatggctcggagagcgacgtgagcggcagcggggaggatgacagcaacgagaaggagatagaggaggagagcggtgacgaggaggacgagcgggagatcgagggggttggcgacgaggaggagagcggagatcgggaggggggtgaggagggaggaagcgagctgggagaagagaaagatgcccatgaggaagaagatacggtcgagcagaatgaaacgagtggaccagttgatccttctaattttttcgcttcttcagagggggcaacttttcatgcaaattcgttccttgagcttaacttgtctcgtccgctagttcgagcttgtgaagcacttggctaccagaagccaactccgattcaggctgcttgtatacctctggcattaactggaagggacatctgtggtagtgctattacaggatctggaaagacagctgctttctctttgcctgtgctggaacgtctactttttcgtccaaaacgtgtacctgcaattagggtgcttattcttactccaactagagagctggctgctcaggttcatagtatgatcgagaagttagcccaattcactgatatcagatgttgtctcatcgttggtggtctttcaactaaggttcaagaagttgctctaagatcaatgcctgacatcgttgtagcaacccctgggcgtataatagaccatttacgcaactctctttctgttgggcttgaagatctagctgttgtgatccttgatgaggctgatcgcttgctagaattgggtttcagtgctgaaattcaagaactgattcgtatgtgtcctaaaaggaggcagactatgcttttctctgctacaatgacagaagaaattgatgaacttataaaactttcactaaacaaacctgtacgtcttgaagctgatccttctctgaagcggcctgcaacgttgactgaagaggttgttaggatacgacgagcacgtgagtcaaatcaagaagcggttcttcttgcgctctgtttgaagactttcaagcgaagtgttatcatttttagtggcacaaagcaatccgcacacaggttaaaaataatatttggtctctctggcatgaaagcagctgaacttcatggcaaccttacacaggcccagcggcttgaggctctggaacttttcaggaaacaagaagtagattttctgattgcaactgatgtcgctgctcgtactgtaataaattttgcatgcccaagagatgtgaaaacttatcttcatcgtgttggccgcacagcacgggcaggaagagaaggctatgccgtaacatttgtaaccgatgatgatagatccctcttgaaagcaattgcaaagaaggctggttcacaactgaaaagccgcattgttgcagagaaacctgtggctgagtgtgcacaactgattgagcaactagaagatcagatttccatcatcattcgagaagaaaaggtggaaagagaagcgagaaaagctgaaatggaaattgcaaaggcagaaaatatgatagctcataaggatgagatatactcacggccaaagagaacctggtttgctactgaaagggaaaagaagcttttggtagcagctgctaaagaatctttgggtcaaggtaagagtacctctggaattattagtgctaagcaggctgaagacctccgtctgaaggagaaaaagagacgagagcatgagaaggacctaccaaggaagaaacgccgaagattagaggcccagcgagagatgctggaagatgaggatgaagatgacgaggaagcaaaggaaagtgatagagggaagaaactgaagaaaggccagtctctagtggatgctgcttaccgaaaggcaaagtcattgaaggcggctagcaaacggggtcctggtgcaagcaaaggaaagaaagagaagaatgcaagacaatattctgagaagactcctaacaggcatgaggagatgcgtgagctgttccagaatgatatgagtgaatggaaacagggacgctcctcaaagaaaaacaacaatttcgcgcacaaaaaatcaaaagcttttaatagcaaagcaagatacaagcgccgcaaatagaagactcggccatccccggatttatttacattctcgtctcagttttgactgactgaccctgaagaaatctctgggatccagatgtttccagttaccatgcgtttgcttgttgtaaacttcgtcatatcatgtattgaaacttaccgttttctgatgtctcattgatcttgggagagctatcctcagtttcgacatgtgccgttgctggtttcgtaggtcgtacttatctcaaaacttacttgccagacgttgttgtgtggaaacgtcgaccagcttgttatgttcctacgcctcgaatgcaatgacaagcttgcacccagtattccagattttgtggatgtgtgatgttggtcttttcgaaagcagattctcatttcaag

SEQ ID NO: 66331 - DNA, 2766 bp, Zea Mays
aaccatcgtccctccattcttctccctcccggcgccggaaaaacgagtttattcacagaccgcgtatctccctcccactcttcgccatggaccccagcttccggttcgacccggacagctccgacgatgaggcgtcgggtgccccagcccggggtcgcctggcgcagtcgccgtgggagttctccttgtacgcggagtccgtggcggcggagcacgcgcggcgccgcaccacctctatcgacgagaagatcttgcacctgcgccagggatgcgggaagccggtcctctccgatggctcggagagcgacgtgagcggcagcggggaggatgacagcaacgagaaggagatagaggaggagagcggtgacgaggaggacgagcgggagatcgagggggttggcgacgaggaggagagcggagatcgggaggggggtgaggagggaggaagcgagctgggagaagagaaagatgcccatgaggaagaagatacggtcgagcagaatgaaacgagtggaccagttgatccttctaattttttcgcttcttcagagggggcaacttttcatgcaaattcgttccttgagcttaacttgtctcgtccgctagttcgagcttgtgaagcacttggctaccagaagccaactccgattcaggctgcttgtatacctctggcattaactggaagggacatctgtggtagtgctattacaggatctggaaagacagctgctttctctttgcctgtgctggaacgtctactttttcgtccaaaacgtgtacctgcaattagggtgcttattcttactccaactagagagctggctgctcaggttcatagtatgatcgagaagttagcccaattcactgatatcagatgttgtctcatcgttggtggtctttcaactaaggttcaagaagttgctctaagatcaatgcctgacatcgttgtagcaacccctgggcgtataatagaccatttacgcaactctctttctgttgggcttgaagatctagctgttgtgatccttgatgaggctgatcgcttgctagaattgggtttcagtgctgaaattcaagaactgattcgtatgtgtcctaaaaggaggcagactatgcttttctctgctacaatgacagaagaaattgatgaacttataaaactttcactaaacaaacctgtacgtcttgaagctgatccttctctgaagcggcctgcaacgttgactgaagaggttgttaggatacgacgagcacgtgagtcaaatcaagaagcggttcttcttgcgctctgtttgaagactttcaagcgaagtgttatcatttttagtggcacaaagcaatccgcacacaggttaaaaataatatttggtctctctggcatgaaagcagctgaacttcatggcaaccttacacaggcccagcggcttgaggctctggaacttttcaggaaacaagaagtagattttctgattgcaactgatgtcgctgctcgtgggattgatattgttggtgttcagactgtaataaattttgcatgcccaagagatgtgaaaacttatcttcatcgtgttggccgcacagcacgggcaggaagagaaggctatgccgtaacatttgtaaccgatgatgatagatccctcttgaaagcaattgcaaagaaggctggttcacaactgaaaagccgcattgttgcagagaaacctgtggctgagtgtgcacaactgattgagcaactagaagatcagatttccatcatcattcgagaagaaaaagaagcgagaaaagctgaaatggaaattgcaaagaaaatatgatagctcataaggatgagatatactcacggccaaagagaacctggtttgctactgaaagggaaaagaagcttttggtagcagctgctaaagaatctttgggtcaaggtaagagtacctctggaattattagtgctaagcaggctgaagacctccgtctgaaggagaaaaagagacgagagcatgagaaggacctaccaaggaagaaacgccgaagattagaggcccagcgagagatgctggaagatgaggatgaagatgacgaggaagcaaaggaaagtgatagagggaagaaactgaagaaaggccagtctctagtggatgctgcttaccgaaaggcaaagtcattgaaggcggctagcaaacggggtcctggtgcaagcaaaggaaagaaagagaagaatgcaagacaatattctgagaagactcctaacaggcatgaggagatgcgtgagctgttccagaatgatatgagtgaatggaaacagggacgctcctcaaagaaaaacaacaatttcgcgcacaaaaaatcaaaagcttttaatagcaaagcaagatacaagcgccgcaaatagaagactcggccatccccggatttatttacattctcgtctcagttttgactgactgaccctgaagaaatctctgggatccagatgtttccagttaccatgcgtttgcttgttgtaaacttcgtcatatcatgtattgaaacttaccgttttctgatgtctcattgatcttgggagagctatcctcagtttcgacatgtgccgttgctggtttcgtaggtcgtacttatctcaaaacttacttgccagacgttgttgtgtggaaacgtcgaccagcttgttatgttcctacgcctcgaatgcaatgacaagcttgcacccagtattccagattttgtggatgtgtgatgttggtcttttcgaaagcagattctcatttcaag

SEQ ID NO: 66332 - DNA, 2746 bp, Zea Mays
gtccctccattcttctccctcccggcgccggaaaaacgagtttattcacagaccgcgtatctccctcccactcttcgccatggaccccagcttccggttcgacccggacagctccgacgatgaggcgtcgggtgccccagcccggggtcgcctggcgcagtcgccgtgggagttctccttgtacgcggagtccgtggcggcggagcacgcgcggcgccgcaccacctctatcgacgagaagatcttgcacctgcgccagggatgcgggaagccggtcctctccgatggctcggagagcgacgtgagcggcagcggggaggatgacagcaacgagaaggagatagaggaggagagcggtgacgaggaggacgagcgggagatcgagggggttggcgacgaggaggagagcggagatcgggaggggggtgaggagggaggaagcgagctgggagaagagaaagatgcccatgaggaagaagatacggtcgagcagaatgaaacgagtggaccagttgatccttctaattttttcgcttcttcagagggggcaacttttcatgcaaattcgttccttgagcttaacttgtctcgtccgctagttcgagcttgtgaagcacttggctaccagaagccaactccgattcaggctgcttgtatacctctggcattaactggaagggacatctgtggtagtgctattacaggatctggaaagacagctgctttctctttgcctgtgctggaacgtctactttttcgtccaaaacgtgtacctgcaattagggtgcttattcttactccaactagagagctggctgctcaggttcatagtatgatcgagaagttagcccaattcactgatatcagatgttgtctcatcgttggtggtctttcaactaaggttcaagaagttgctctaagatcaatgcctgacatcgttgtagcaacccctgggcgtataatagaccatttacgcaactctctttctgttgggcttgaagatctagctgttgtgatccttgatgaggctgatcgcttgctagaattgggtttcagtgctgaaattcaagaactgattcgtatgtgtcctaaaaggaggcagactatgcttttctctgctacaatgacagaagaaattgatgaacttataaaactttcactaaacaaacctgtacgtcttgaagctgatccttctctgaagcggcctgcaacgttgactgaagaggttgttaggatacgacgagcacgtgagtcaaatcaagaagcggttcttcttgcgctctgtttgaagactttcaagcgaagtgttatcatttttagtggcacaaagcaatccgcacacaggttaaaaataatatttggtctctctggcatgaaagcagctgaacttcatggcaaccttacacaggcccagcggcttgaggctctggaacttttcaggaaacaagaagtagattttctgattgcaactgatgtcgctgctcgtgggattgatattgttggtgttcagactgtaataaattttgcatgcccaagagatgtgaaaaccacgggcaggaagagaaggctatgccgtaacatttgtaaccgatgatgatagatccctcttgaaagcaattgcaaagaaggctggttcacaactgaaaagccgcattgttgcagagaaacctgtggctgagtgtgcacaactgattgagcaactagaagatcagatttccatcatcattcgagaagaaaaggtggaaagagaagcgagaaaagctgaaatggaaattgcaaaggcagaaaatatgatagctcataaggatgagatatactcacggccaaagagaacctggtttgctactgaaagggaaaagaagcttttggtagcagctgctaaagaatctttgggtcaaggtaagagtacctctggaattattagtgctaagcaggctgaagacctccgtctgaaggagaaaaagagacgagagcatgagaaggacctaccaaggaagaaacgccgaagattagaggcccagcgagagatgctggaagatgaggatgaagatgacgaggaagcaaaggaaagtgatagagggaagaaactgaagaaaggccagtctctagtggatgctgcttaccgaaaggcaaagtcattgaaggcggctagcaaacggggtcctggtgcaagcaaaggaaagaaagagaagaatgcaagacaatattctgagaagactcctaacaggcatgaggagatgcgtgagctgttccagaatgatatgagtgaatggaaacagggacgctcctcaaagaaaaacaacaatttcgcgcacaaaaaatcaaaagcttttaatagcaaagcaagatacaagcgccgcaaatagaagactcggccatccccggatttatttacattctcgtctcagttttgactgactgaccctgaagaaatctctgggatccagatgtttccagttaccatgcgtttgcttgttgtaaacttcgtcatatcatgtattgaaacttaccgttttctgatgtctcattgatcttgggagagctatcctcagtttcgacatgtgccgttgctggtttcgtaggtcgtacttatctcaaaacttacttgccagacgttgttgtgtggaaacgtcgaccagcttgttatgttcctacgcctcgaatgcaatgacaagcttgcacccagtattccagattttgtggatgtgtgatgttggtcttttcgaaagcagattctcatttcaag

SEQ ID NO: 66333 - DNA, 2695 bp, Zea Mays
cttctccctcccggcgccggaaaaacgagtttattcacagaccgcgtatctccctcccactcttcgccatggaccccagcttccggttcgacccggacagctccgacgatgaggcgtcgggtgccccagcccggggtcgcctggcgcagtcgccgtgggagttctccttgtacgcggagtccgtggcggcggagcacgcgcggcgccgcaccacctctatcgacgagaagatcttgcacctgcgccagggatgcgggaagccggtcctctccgatggctcggagagcgacgtgagcggcagcggggaggatgacagcaacgagaaggagatagaggaggagagcggtgacgaggaggacgagcgggagatcgagggggttggcgacgaggaggagagcggagatcgggaggggggtgaggagggaggaagcgagctgggagaagagaaagatgcccatgaggaagaagatacggtcgagcagaatgaaacgagtggaccagttgatccttctaattttttcgcttcttcagagggggcaacttttcatgcaaattcgttccttgagcttaacttgtctcgtccgctagttcgagcttgtgaagcacttggctaccagaagccaactccgattcaggctgcttgtatacctctggcattaactggaagggacatctgtggtagtgctattacaggatctggaaagacagctgctttctctttgcctgtgctggaacgtctactttttcgtccaaaacgtgtacctgcaattagggtgcttattcttactccaactagagagctggctgctcaggttcatagtatgatcgagaagttagcccaattcactgatatcagatgttgtctcatcgttggtggtctttcaactaaggttcaagaagttgctctaagatcaatgcctgacatcgttgtagcaacccctgggcgtataatagaccatttacgcaactctctttctgttgggcttgaagatctagctgttgtgatccttgatgaggctgatcgcttgctagaattgggtttcagtgctgaaattcaagaactgattcgtatgtgtcctaaaaggaggcagactatgcttttctctgctacaatgacagaagaaattgatgaacttataaaactttcactaaacaaacctgtacgtcttgaagctgatccttctctgaagcggcctgcaacgttgactgaagaggttgttaggatacgacgagcacgtgagtcaaatcaagaagcggttcttcttgcgctctgtttgaagactttcaagcgaagtgttatcatttttagtggcacaaagcaatccgcacacaggttaaaaataatatttggtctctctggcatgaaagcagctgaacttcatggcaaccttacacaggcccagcggcttgaggctctggaacttttcaggaaacaagaagtagattttctgattgcaactgatgtcgctgctcgtttatcttcatcgtgttggccgcacagcacgggcaggaagagaaggctatgccgtaacatttgtaaccgatgatgatagatccctcttgaaagcaattgcaaagaaggctggttcacaactgaaaagccgcattgttgcagagaaacctgtggctgagtgtgcacaactgattgagcaactagaagatcagatttccatcatcattcgagaagaaaaggtggaaagagaagcgagaaaagctgaaatggaaattgcaaagaaaatatgatagctcataaggatgagatatactcacggccaaagagaacctggtttgctactgaaagggaaaagaagcttttggtagcagctgctaaagaatctttgggtcaaggtaagagtacctctggaattattagtgctaagcaggctgaagacctccgtctgaaggagaaaaagagacgagagcatgagaaggacctaccaaggaagaaacgccgaagattagaggcccagcgagagatgctggaagatgaggatgaagatgacgaggaagcaaaggaaagtgatagagggaagaaactgaagaaaggccagtctctagtggatgctgcttaccgaaaggcaaagtcattgaaggcggctagcaaacggggtcctggtgcaagcaaaggaaagaaagagaagaatgcaagacaatattctgagaagactcctaacaggcatgaggagatgcgtgagctgttccagaatgatatgagtgaatggaaacagggacgctcctcaaagaaaaacaacaatttcgcgcacaaaaaatcaaaagcttttaatagcaaagcaagatacaagcgccgcaaatagaagactcggccatccccggatttatttacattctcgtctcagttttgactgactgaccctgaagaaatctctgggatccagatgtttccagttaccatgcgtttgcttgttgtaaacttcgtcatatcatgtattgaaacttaccgttttctgatgtctcattgatcttgggagagctatcctcagtttcgacatgtgccgttgctggtttcgtaggtcgtacttatctcaaaacttacttgccagacgttgttgtgtggaaacgtcgaccagcttgttatgttcctacgcctcgaatgcaatgacaagcttgcacccagtattccagattttgtggatgtgtgatgttggtcttttcgaaagcagattctcatttcaag

SEQ ID NO: 66334 - DNA, 2688 bp, Zea Mays
cggcgccggaaaaacgagtttattcacagaccgcgtatctccctcccactcttcgccatggaccccagcttccggttcgacccggacagctccgacgatgaggcgtcgggtgccccagcccggggtcgcctggcgcagtcgccgtgggagttctccttgtacgcggagtccgtggcggcggagcacgcgcggcgccgcaccacctctatcgacgagaagatcttgcacctgcgccagggatgcgggaagccggtcctctccgatggctcggagagcgacgtgagcggcagcggggaggatgacagcaacgagaaggagatagaggaggagagcggtgacgaggaggacgagcgggagatcgagggggttggcgacgaggaggagagcggagatcgggaggggggtgaggagggaggaagcgagctgggagaagagaaagatgcccatgaggaagaagatacggtcgagcagaatgaaacgagtggaccagttgatccttctaattttttcgcttcttcagagggggcaacttttcatgcaaattcgttccttgagcttaacttgtctcgtccgctagttcgagcttgtgaagcacttggctaccagaagccaactccgattcaggctgcttgtatacctctggcattaactggaagggacatctgtggtagtgctattacaggatctggaaagacagctgctttctctttgcctgtgctggaacgtctactttttcgtccaaaacgtgtacctgcaattagggtgcttattcttactccaactagagagctggctgctcaggttcatagtatgatcgagaagttagcccaattcactgatatcagatgttgtctcatcgttggtggtctttcaactaaggttcaagaagttgctctaagatcaatgcctgacatcgttgtagcaacccctgggcgtataatagaccatttacgcaactctctttctgttgggcttgaagatctagctgttgtgatccttgatgaggctgatcgcttgctagaattgggtttcagtgctgaaattcaagaactgattcgtatgtgtcctaaaaggaggcagactatgcttttctctgctacaatgacagaagaaattgatgaacttataaaactttcactaaacaaacctgtacgtcttgaagctgatccttctctgaagcggcctgcaacgttgactgaagaggttgttaggatacgacgagcacgtgagtcaaatcaagaagcggttcttcttgcgctctgtttgaagactttcaagcgaagtgttatcatttttagtggcacaaagcaatccgcacacaggttaaaaataatatttggtctctctggcatgaaagcagctgaacttcatggcaaccttacacaggcccagcggcttgaggctctggaacttttcaggaaacaagaagtagattttctgattgcaactgatgtcgctgctcgtttatcttcatcgtgttggccgcacagcacgggcaggaagagaaggctatgccgtaacatttgtaaccgatgatgatagatccctcttgaaagcaattgcaaagaaggctggttcacaactgaaaagccgcattgttgcagagaaacctgtggctgagtgtgcacaactgattgagcaactagaagatcagatttccatcatcattcgagaagaaaaggtggaaagagaagcgagaaaagctgaaatggaaattgcaaaggcagaaaatatgatagctcataaggatgagatatactcacggccaaagagaacctggtttgctactgaaagggaaaagaagcttttggtagcagctgctaaagaatctttgggtcaaggtaagagtacctctggaattattagtgctaagcaggctgaagacctccgtctgaaggagaaaaagagacgagagcatgagaaggacctaccaaggaagaaacgccgaagattagaggcccagcgagagatgctggaagatgaggatgaagatgacgaggaagcaaaggaaagtgatagagggaagaaactgaagaaaggccagtctctagtggatgctgcttaccgaaaggcaaagtcattgaaggcggctagcaaacggggtcctggtgcaagcaaaggaaagaaagagaagaatgcaagacaatattctgagaagactcctaacaggcatgaggagatgcgtgagctgttccagaatgatatgagtgaatggaaacagggacgctcctcaaagaaaaacaacaatttcgcgcacaaaaaatcaaaagcttttaatagcaaagcaagatacaagcgccgcaaatagaagactcggccatccccggatttatttacattctcgtctcagttttgactgactgaccctgaagaaatctctgggatccagatgtttccagttaccatgcgtttgcttgttgtaaacttcgtcatatcatgtattgaaacttaccgttttctgatgtctcattgatcttgggagagctatcctcagtttcgacatgtgccgttgctggtttcgtaggtcgtacttatctcaaaacttacttgccagacgttgttgtgtggaaacgtcgaccagcttgttatgttcctacgcctcgaatgcaatgacaagcttgcacccagtattccagattttgtggatgtgtgatgttggtcttttcgaaagcagattctcatttcaag

SEQ ID NO: 66335 - DNA, 2927 bp, Zea Mays
aaaacgagtttattcacagaccgcgtatctccctcccactcttcgccatggaccccagcttccggttcgacccggacagctccgacgatgaggcgtcgggtgccccagcccggggtcgcctggcgcagtcgccgtgggagttctccttgtacgcggagtccgtggcggcggagcacgcgcggcgccgcaccacctctatcgacgagaagatcttgcacctgcgccagggatgcgggaagccggtcctctccgatggctcggagagcgacgtgagcggcagcggggaggatgacagcaacgagaaggagatagaggaggagagcggtgacgaggaggacgagcgggagatcgagggggttggcgacgaggaggagagcggagatcgggaggggggtgaggagggaggaagcgagctgggagaagagaaagatgcccatgaggaagaagatacggtcgagcagaatgaaacgagtggaccagttgatccttctaattttttcgcttcttcagagggggcaacttttcatgcaaattcgttccttgagcttaacttgtctcgtccgctagttcgagcttgtgaagcacttggctaccagaagccaactccgattcaggctgcttgtatacctctggcattaactggaagggacatctgtggtagtgctattacaggatctggaaagacagctgctttctctttgcctgtgctggaacgtctactttttcgtccaaaacgtgtacctgcaattagggtgcttattcttactccaactagagagctggctgctcacgcaagagaactgcgcatctttgtatattaagaagaaaaggttgaaagggccttagaaatgcccagatacaaaagaaccccattacgggggccaggaacaagcatacaagaaataacccataaggaaaaaaaccactcctagaaggtcgctctcacagcagccatcaagaatctggcagcggggcaacaagggttcatagtatgatcgagaagttagcccaattcactgatatcagatgttgtctcatcgttggtggtctttcaactaaggttcaagaagttgctctaagatcaatgcctgacatcgttgtagcaacccctgggcgtataatagaccatttacgcaactctctttctgttgggcttgaagatctagctgttgtgatccttgatgaggctgatcgcttgctagaattgggtttcagtgctgaaattcaagaactgattcgtatgtgtcctaaaaggaggcagactatgcttttctctgctacaatgacagaagaaattgatgaacttataaaactttcactaaacaaacctgtacgtcttgaagctgatccttctctgaagcggcctgcaacgttgactgaagaggttgttaggatacgacgagcacgtgagtcaaatcaagaagcggttcttcttgcgctctgtttgaagactttcaagcgaagtgttatcatttttagtggcacaaagcaatccgcacacaggttaaaaataatatttggtctctctggcatgaaagcagctgaacttcatggcaaccttacacaggcccagcggcttgaggctctggaacttttcaggaaacaagaagtagattttctgattgcaactgatgtcgctgctcgtgggattgatattgttggtgttcagactgtaataaattttgcatgcccaagagatgtgaaaacttatcttcatcgtgttggccgcacagcacgggcaggaagagaaggctatgccgtaacatttgtaaccgatgatgatagatccctcttgaaagcaattgcaaagaaggctggttcacaactgaaaagccgcattgttgcagagaaacctgtggctgagtgtgcacaactgattgagcaactagaagatcagatttccatcatcattcgagaagaaaaggtggaaagagaagcgagaaaagctgaaatggaaattgcaaagaaaatatgatagctcataaggatgagatatactcacggccaaagagaacctggtttgctactgaaagggaaaagaagcttttggtagcagctgctaaagaatctttgggtcaaggtaagagtacctctggaattattagtgctaagcaggctgaagacctccgtctgaaggagaaaaagagacgagagcatgagaaggacctaccaaggaagaaacgccgaagattagaggcccagcgagagatgctggaagatgaggatgaagatgacgaggaagcaaaggaaagtgatagagggaagaaactgaagaaaggccagtctctagtggatgctgcttaccgaaaggcaaagtcattgaaggcggctagcaaacggggtcctggtgcaagcaaaggaaagaaagagaagaatgcaagacaatattctgagaagactcctaacaggcatgaggagatgcgtgagctgttccagaatgatatgagtgaatggaaacagggacgctcctcaaagaaaaacaacaatttcgcgcacaaaaaatcaaaagcttttaatagcaaagcaagatacaagcgccgcaaatagaagactcggccatccccggatttatttacattctcgtctcagttttgactgactgaccctgaagaaatctctgggatccagatgtttccagttaccatgcgtttgcttgttgtaaacttcgtcatatcatgtattgaaacttaccgttttctgatgtctcattgatcttgggagagctatcctcagtttcgacatgtgccgttgctggtttcgtaggtcgtacttatctcaaaacttacttgccagacgttgttgtgtggaaacgtcgaccagcttgttatgttcctacgcctcgaatgcaatgacaagcttgcacccagtattccagattttgtggatgtgtgatgttggtcttttcgaaagcagattctcatttcaag

SEQ ID NO: 66336 - DNA, 2106 bp, Zea Mays
aaaaggttgaaagggccttagaaatgcccagatacaaaagaaccccattacgggggccaggaacaagcatacaagaaataacccataaggaaaaaaaccactcctagaaggtcgctctcacagcagccatcaagaatctggcagcggggcaacaagggttcatagtatgatcgagaagttagcccaattcactgatatcagatgttgtctcatcgttggtggtctttcaactaaggttcaagaagttgctctaagatcaatgcctgacatcgttgtagcaacccctgggcgtataatagaccatttacgcaactctctttctgttgggcttgaagatctagctgttgtgatccttgatgaggctgatcgcttgctagaattgggtttcagtgctgaaattcaagaactgattcgtatgtgtcctaaaaggaggcagactatgcttttctctgctacaatgacagaagaaattgatgaacttataaaactttcactaaacaaacctgtacgtcttgaagctgatccttctctgaagcggcctgcaacgttgactgaagaggttgttaggatacgacgagcacgtgagtcaaatcaagaagcggttcttcttgcgctctgtttgaagactttcaagcgaagtgttatcatttttagtggcacaaagcaatccgcacacaggttaaaaataatatttggtctctctggcatgaaagcagctgaacttcatggcaaccttacacaggcccagcggcttgaggctctggaacttttcaggaaacaagaagtagattttctgattgcaactgatgtcgctgctcgtgggattgatattgttggtgttcagactgtaataaattttgcatgcccaagagatgtgaaaacttatcttcatcgtgttggccgcacagcacgggcaggaagagaaggctatgccgtaacatttgtaaccgatgatgatagatccctcttgaaagcaattgcaaagaaggctggttcacaactgaaaagccgcattgttgcagagaaacctgtggctgagtgtgcacaactgattgagcaactagaagatcagatttccatcatcattcgagaagaaaaggtggaaagagaagcgagaaaagctgaaatggaaattgcaaaggcagaaaatatgatagctcataaggatgagatatactcacggccaaagagaacctggtttgctactgaaagggaaaagaagcttttggtagcagctgctaaagaatctttgggtcaaggtaagagtacctctggaattattagtgctaagcaggctgaagacctccgtctgaaggagaaaaagagacgagagcatgagaaggacctaccaaggaagaaacgccgaagattagaggcccagcgagagatgctggaagatgaggatgaagatgacgaggaagcaaaggaaagtgatagagggaagaaactgaagaaaggccagtctctagtggatgctgcttaccgaaaggcaaagtcattgaaggcggctagcaaacggggtcctggtgcaagcaaaggaaagaaagagaagaatgcaagacaatattctgagaagactcctaacaggcatgaggagatgcgtgagctgttccagaatgatatgagtgaatggaaacagggacgctcctcaaagaaaaacaacaatttcgcgcacaaaaaatcaaaagcttttaatagcaaagcaagatacaagcgccgcaaatagaagactcggccatccccggatttatttacattctcgtctcagttttgactgactgaccctgaagaaatctctgggatccagatgtttccagttaccatgcgtttgcttgttgtaaacttcgtcatatcatgtattgaaacttaccgttttctgatgtctcattgatcttgggagagctatcctcagtttcgacatgtgccgttgctggtttcgtaggtcgtacttatctcaaaacttacttgccagacgttgttgtgtggaaacgtcgaccagcttgttatgttcctacgcctcgaatgcaatgacaagcttgcacccagtattccagattttgtggatgtgtgatgttggtcttttcgaaagcagattctcatttcaag

SEQ ID NO: 66337 - DNA, 2027 bp, Zea Mays
ggccttagaaatgcccagatacaaaagaaccccattacgggggccaggaacaagcatacaagaaataacccataaggaaaaaaaccactcctagaaggtcgctctcacagcagccatcaagaatctggcagcggggcaacaagggttcatagtatgatcgagaagttagcccaattcactgatatcagatgttgtctcatcgttggtggtctttcaactaaggttcaagaagttgctctaagatcaatgcctgacatcgttgtagcaacccctgggcgtataatagaccatttacgcaactctctttctgttgggcttgaagatctagctgttgtgatccttgatgaggctgatcgcttgctagaattgggtttcagtgctgaaattcaagaactgattcgtatgtgtcctaaaaggaggcagactatgcttttctctgctacaatgacagaagaaattgatgaacttataaaactttcactaaacaaacctgtacgtcttgaagctgatccttctctgaagcggcctgcaacgttgactgaagaggttgttaggatacgacgagcacgtgagtcaaatcaagaagcggttcttcttgcgctctgtttgaagactttcaagcgaagtgttatcatttttagtggcacaaagcaatccgcacacaggttaaaaataatatttggtctctctggcatgaaagcagctgaacttcatggcaaccttacacaggcccagcggcttgaggctctggaacttttcaggaaacaagaagtagattttctgattgcaactgatgtcgctgctcgtttatcttcatcgtgttggccgcacagcacgggcaggaagagaaggctatgccgtaacatttgtaaccgatgatgatagatccctcttgaaagcaattgcaaagaaggctggttcacaactgaaaagccgcattgttgcagagaaacctgtggctgagtgtgcacaactgattgagcaactagaagatcagatttccatcatcattcgagaagaaaaggtggaaagagaagcgagaaaagctgaaatggaaattgcaaagaaaatatgatagctcataaggatgagatatactcacggccaaagagaacctggtttgctactgaaagggaaaagaagcttttggtagcagctgctaaagaatctttgggtcaaggtaagagtacctctggaattattagtgctaagcaggctgaagacctccgtctgaaggagaaaaagagacgagagcatgagaaggacctaccaaggaagaaacgccgaagattagaggcccagcgagagatgctggaagatgaggatgaagatgacgaggaagcaaaggaaagtgatagagggaagaaactgaagaaaggccagtctctagtggatgctgcttaccgaaaggcaaagtcattgaaggcggctagcaaacggggtcctggtgcaagcaaaggaaagaaagagaagaatgcaagacaatattctgagaagactcctaacaggcatgaggagatgcgtgagctgttccagaatgatatgagtgaatggaaacagggacgctcctcaaagaaaaacaacaatttcgcgcacaaaaaatcaaaagcttttaatagcaaagcaagatacaagcgccgcaaatagaagactcggccatccccggatttatttacattctcgtctcagttttgactgactgaccctgaagaaatctctgggatccagatgtttccagttaccatgcgtttgcttgttgtaaacttcgtcatatcatgtattgaaacttaccgttttctgatgtctcattgatcttgggagagctatcctcagtttcgacatgtgccgttgctggtttcgtaggtcgtacttatctcaaaacttacttgccagacgttgttgtgtggaaacgtcgaccagcttgttatgttcctacgcctcgaatgcaatgacaagcttgcacccagtattccagattttgtggatgtgtgatgttggtcttttcgaaagcagattctcatttcaag

SEQ ID NO: 66338 - DNA, 1893 bp, Zea Mays
gttaagctagtgtggtttccaggttcaagaagttgctctaagatcaatgcctgacatcgttgtagcaacccctgggcgtataatagaccatttacgcaactctctttctgttgggcttgaagatctagctgttgtgatccttgatgaggctgatcgcttgctagaattgggtttcagtgctgaaattcaagaactgattcgtatgtgtcctaaaaggaggcagactatgcttttctctgctacaatgacagaagaaattgatgaacttataaaactttcactaaacaaacctgtacgtcttgaagctgatccttctctgaagcggcctgcaacgttgactgaagaggttgttaggatacgacgagcacgtgagtcaaatcaagaagcggttcttcttgcgctctgtttgaagactttcaagcgaagtgttatcatttttagtggcacaaagcaatccgcacacaggttaaaaataatatttggtctctctggcatgaaagcagctgaacttcatggcaaccttacacaggcccagcggcttgaggctctggaacttttcaggaaacaagaagtagattttctgattgcaactgatgtcgctgctcgtgggattgatattgttggtgttcagactgtaataaattttgcatgcccaagagatgtgaaaacttatcttcatcgtgttggccgcacagcacgggcaggaagagaaggctatgccgtaacatttgtaaccgatgatgatagatccctcttgaaagcaattgcaaagaaggctggttcacaactgaaaagccgcattgttgcagagaaacctgtggctgagtgtgcacaactgattgagcaactagaagatcagatttccatcatcattcgagaagaaaaggtggaaagagaagcgagaaaagctgaaatggaaattgcaaaggcagaaaatatgatagctcataaggatgagatatactcacggccaaagagaacctggtttgctactgaaagggaaaagaagcttttggtagcagctgctaaagaatctttgggtcaaggtaagagtacctctggaattattagtgctaagcaggctgaagacctccgtctgaaggagaaaaagagacgagagcatgagaaggacctaccaaggaagaaacgccgaagattagaggcccagcgagagatgctggaagatgaggatgaagatgacgaggaagcaaaggaaagtgatagagggaagaaactgaagaaaggccagtctctagtggatgctgcttaccgaaaggcaaagtcattgaaggcggctagcaaacggggtcctggtgcaagcaaaggaaagaaagagaagaatgcaagacaatattctgagaagactcctaacaggcatgaggagatgcgtgagctgttccagaatgatatgagtgaatggaaacagggacgctcctcaaagaaaaacaacaatttcgcgcacaaaaaatcaaaagcttttaatagcaaagcaagatacaagcgccgcaaatagaagactcggccatccccggatttatttacattctcgtctcagttttgactgactgaccctgaagaaatctctgggatccagatgtttccagttaccatgcgtttgcttgttgtaaacttcgtcatatcatgtattgaaacttaccgttttctgatgtctcattgatcttgggagagctatcctcagtttcgacatgtgccgttgctggtttcgtaggtcgtacttatctcaaaacttacttgccagacgttgttgtgtggaaacgtcgaccagcttgttatgttcctacgcctcgaatgcaatgacaagcttgcacccagtattccagattttgtggatgtgtgatgttggtcttttcgaaagcagattctcatttcaag

SEQ ID NO: 66339 - DNA, 1373 bp, Zea Mays
ctgacaacgtgtcaatttttttgggctctggaacttttcaggaaacaagaagtagattttctgattgcaactgatgtcgctgctcgtgggattgatattgttggtgttcagactgtaataaattttgcatgcccaagagatgtgaaaacttatcttcatcgtgttggccgcacagcacgggcaggaagagaaggctatgccgtaacatttgtaaccgatgatgatagatccctcttgaaagcaattgcaaagaaggctggttcacaactgaaaagccgcattgttgcagagaaacctgtggctgagtgtgcacaactgattgagcaactagaagatcagatttccatcatcattcgagaagaaaaggtggaaagagaagcgagaaaagctgaaatggaaattgcaaaggcagaaaatatgatagctcataaggatgagatatactcacggccaaagagaacctggtttgctactgaaagggaaaagaagcttttggtagcagctgctaaagaatctttgggtcaaggtaagagtacctctggaattattagtgctaagcaggctgaagacctccgtctgaaggagaaaaagagacgagagcatgagaaggacctaccaaggaagaaacgccgaagattagaggcccagcgagagatgctggaagatgaggatgaagatgacgaggaagcaaaggaaagtgatagagggaagaaactgaagaaaggccagtctctagtggatgctgcttaccgaaaggcaaagtcattgaaggcggctagcaaacggggtcctggtgcaagcaaaggaaagaaagagaagaatgcaagacaatattctgagaagactcctaacaggcatgaggagatgcgtgagctgttccagaatgatatgagtgaatggaaacagggacgctcctcaaagaaaaacaacaatttcgcgcacaaaaaatcaaaagcttttaatagcaaagcaagatacaagcgccgcaaatagaagactcggccatccccggatttatttacattctcgtctcagttttgactgactgaccctgaagaaatctctgggatccagatgtttccagttaccatgcgtttgcttgttgtaaacttcgtcatatcatgtattgaaacttaccgttttctgatgtctcattgatcttgggagagctatcctcagtttcgacatgtgccgttgctggtttcgtaggtcgtacttatctcaaaacttacttgccagacgttgttgtgtggaaacgtcgaccagcttgttatgttcctacgcctcgaatgcaatgacaagcttgcacccagtattccagattttgtggatgtgtgatgttggtcttttcgaaagcagattctcatttcaag

SEQ ID NO: 66340 - DNA, 978 bp, Zea Mays
agttcagttttacgcagaaaatatgatagctcataaggatgagatatactcacggccaaagagaacctggtttgctactgaaagggaaaagaagcttttggtagcagctgctaaagaatctttgggtcaaggtaagagtacctctggaattattagtgctaagcaggctgaagacctccgtctgaaggagaaaaagagacgagagcatgagaaggacctaccaaggaagaaacgccgaagattagaggcccagcgagagatgctggaagatgaggatgaagatgacgaggaagcaaaggaaagtgatagagggaagaaactgaagaaaggccagtctctagtggatgctgcttaccgaaaggcaaagtcattgaaggcggctagcaaacggggtcctggtgcaagcaaaggaaagaaagagaagaatgcaagacaatattctgagaagactcctaacaggcatgaggagatgcgtgagctgttccagaatgatatgagtgaatggaaacagggacgctcctcaaagaaaaacaacaatttcgcgcacaaaaaatcaaaagcttttaatagcaaagcaagatacaagcgccgcaaatagaagactcggccatccccggatttatttacattctcgtctcagttttgactgactgaccctgaagaaatctctgggatccagatgtttccagttaccatgcgtttgcttgttgtaaacttcgtcatatcatgtattgaaacttaccgttttctgatgtctcattgatcttgggagagctatcctcagtttcgacatgtgccgttgctggtttcgtaggtcgtacttatctcaaaacttacttgccagacgttgttgtgtggaaacgtcgaccagcttgttatgttcctacgcctcgaatgcaatgacaagcttgcacccagtattccagattttgtggatgtgtgatgttggtcttttcgaaagcagattctcatttcaag

SEQ ID NO: 66341 - DNA, 908 bp, Zea Mays
cacaactccacattggacctcttgcaacaacttggcctgcttcaggaatctttgggtcaaggtaagagtacctctggaattattagtgctaagcaggctgaagacctccgtctgaaggagaaaaagagacgagagcatgagaaggacctaccaaggaagaaacgccgaagattagaggcccagcgagagatgctggaagatgaggatgaagatgacgaggaagcaaaggaaagtgatagagggaagaaactgaagaaaggccagtctctagtggatgctgcttaccgaaaggcaaagtcattgaaggcggctagcaaacggggtcctggtgcaagcaaaggaaagaaagagaagaatgcaagacaatattctgagaagactcctaacaggcatgaggagatgcgtgagctgttccagaatgatatgagtgaatggaaacagggacgctcctcaaagaaaaacaacaatttcgcgcacaaaaaatcaaaagcttttaatagcaaagcaagatacaagcgccgcaaatagaagactcggccatccccggatttatttacattctcgtctcagttttgactgactgaccctgaagaaatctctgggatccagatgtttccagttaccatgcgtttgcttgttgtaaacttcgtcatatcatgtattgaaacttaccgttttctgatgtctcattgatcttgggagagctatcctcagtttcgacatgtgccgttgctggtttcgtaggtcgtacttatctcaaaacttacttgccagacgttgttgtgtggaaacgtcgaccagcttgttatgttcctacgcctcgaatgcaatgacaagcttgcacccagtattccagattttgtggatgtgtgatgttggtcttttcgaaagcagattctcatttcaag

SEQ ID NO: 66342 - DNA, 889 bp, Zea Mays
aaaagagtagggataggggtaggcgatgggcctgtattgttgcctggcccattctcgtgactgcttcctcgactcgaaaatcctccgaacagaacgcaggcaggcggcggcggagacaggatcaggttcctcgcggccggcgttaagtagggcggccgccctacatcgtcccacctgtaggtacgacactgcgccgcttgaaggaggctttgcggcgatggaccgggtcggcggcggcgaaaagcaactggaggattgcacagtagccaattgggcacatgccaccgggagatggctcggtggagtcagcttgtggggaggagagtgctctaggaacttggttcttctcagttgcgggtgctcttgttgctattcctgtgggcataaagaagaaatccttagccccactcgtcttcttcggcactactggaaccatgctggacattatcatgggcattacccagtgtgagcgagagcatgctgagcgggaaatgaagattttggaagcccagaaattttcggtcgatgcttcagctcagaacgaaagctctgattcctttggcagtgctgacaagtgaaacacttctcctgttttccctcacttgtgacctggcttcacctctgttaattagagttgttgctcagatgccaatttgacacctttaaatttctgaatacactattcctactccctcaataacgtgcaattgtgcatttgatcaaccattagtttttatatatattgtgaattgaaaacaaaatataaaaggttcagtcttgctcctcaagcaagattgccacatggtgaaaatagctcaatccattgtacggcttggtatgggactatatatatataatgttttttttaaaaaaaacttgtgcacgaatt

SEQ ID NO: 66343 - DNA, 1991 bp, Zea Mays
gttgggttccttaagtaccctgttttggtcattatcttttcctttcccatgaaattgtcggtacaacaggttatggccaacagttaagcatttgtgtcatggcgatttatcaggtggatcgtgacaaggatgggtgtggctggattacaacaggattgaagtcgattggcaggagatgatgctacttagcaaattgttccctgactgtaactgcctacaaaggtagtaacttgtgaacggacagccatgttgatttcagacagttctggtgctgtccaatactactattcctgaggtacgctactattctaagaccatatttcaaaaacacacaattttgaatgcagctgttcctataagtatcatactgtaattttgtatgcagttgttcctataacattaggtctgcatcatgcattatgatgttctctattgatctctatatcccatattgtggagatcactaaaatgttagtgatttaacttctgttcaaactttcaattccatcgtccgtgaacaattgataaatatgaatgtgtttacttgactccattttatcttcttatttgagcttgtattcttctttttgaagatattgctgccatgcactgagatttctattgttaataagcaaggtgtaattgaaattttggttcattccttatgaatctctgctggttttaggaaagcgctgagagaggtggcatctagaggacgtgatgtcgagcatgtgaagcttttttagaaatatatattggtgtcaagcttttttgaaacttgacttcattttattttatatgttcctctcggctttgtttcctatcctttccggtgacttgctatgcattgccacagtatttggcatgtctacaactgctacacaaaacatttctacctcctacctctgcttctctcctgtctccttcccgcttctacttcctcgtgctgccttccttctattcttcttccttgttctagagatcgctagagccttctcgccacgagcatcacaattaggtatggaatgtgcctccaatatggactgcaccactgacccacattgccatctccacccgtcgtccttaaaaagacgtcaacccgctttcatcctcctcacatcctcatctcaatctccacgacggacaattgttgtgtgggcgtcgtccaattcatctggtgagcctccagtcaatttcatctgtcgtgtgtgtgcacagtttgtggtttgactgataatgatgcttctattgatgtgaaatggtgtgtccagggagtcaccagatgtgcttgtttcagttgtttcttgtagtatgtttcagacaaatgtacatttgtctggttcatttggggcatactgtttatttgtacaaatctggttgcaatcttgggacacatgcaaaaatatagcattgtttatttgtgttgcaatcacaatctcatagttaccaccagttagcaaattactgctattttgttcacttggtagttggtactgctgttttggtactgcgatgaagccaatgtttaattgttttgtatgtataccttcggtttgggatttatagaagtattatttagaaaatgattgcagtgttacagtaatggttacataatctggtttacttgaccctggctgatcattagtggggcaagcaattgatatagatgtgaaaatcccggccactaaccacacatactcataagattgcatcaccctgcacccacatagcgcagatcgccatatatgttggatgaatacatttctctggttactgactgcgattttcacaactatatcaaactggttagcttctcatgatgaaatgcaaaaaatgtctctgtctcattctttggttactgctgctttggtccgtacaaccagttagctccatagtttggtaatgttgttttggtctataaaagccttttgtcactttatactacagttttggtactgctaaagaatatctacttaacatgccattaattt

SEQ ID NO: 66344 - DNA, 958 bp, Zea Mays
atggggacatactactacaatgtgctcaaggttttgggtgatccccagaagagggcggcatatgatcagtatggcaaggaagggctgaaggcctttgcagatatctaggagcgttgtgaggctgaatggacaatgccataggaaggaagattgatgctacaggagatgattatggcgatcctgacttgttttctgtgatcatgttatgtgaataaaaaaataaaggaatttctggtgtttgaataccatggtttttaaagtggtaaggcgagacaaggcgtcggaccaccgcctggacgcctaggcgaggtaggcgggcaaggagcctaggcgttggacctccgcctggacgcctagacgacaccttaagaacagtgttgaatacttaaactgtatttttttctttatttcaaatgctacattcatacggtttttttattcaacacagctccatcccattttgtattgtcccctgtgttcaatactattctatgtctttcaggcattgttctcattggtgaaattggaggtatggctgaggaggatattgcaacattcatccaggtggtgagccggtgtacgggtattccaatgactcgacttggccataacgataaggagaggctggtcgtccttgctgacaggagggtggccatcgcattgccactgctgatgtacctatcaaatgttgagaagggtggccatcacattgccacggttgatgtacctatcaaatgttgagaagggtggagggaccatttccccaatgcattgtcacaattgatgtacctatcaaatgttgagaagggtggagggaccatttccccaatgcattgtcagagttgacgtacctatcaaatgttgagaaggtggaggggtcatctttcccaatacagagtttattacttgtccttcctgtgtttactatcttaagaatgcaagttgtaatgacttcaac

SEQ ID NO: 66345 - DNA, 1994 bp, Zea Mays
ggacgcccgagtaccagcgtgcgtctgatcgcccaaaccaacggacgcgatcgctcacctctccccaccggtcattccaccgacccagcacagcagtccgagaggcgagcgaccgaaccagcctgctctctcgctcgagaagcctcctccgctccgccgtccgcccctcgcctcaccagtccgcattccggcgcacacgcccattaaaataccgcgtccaatctccgccctgcgctcgtccctcatgcccgcctcgcggctcacagtgcgcgtgtgccaccatgctcggcgcggcgctccgcctccgcgtccgcgtgctccgccgccgccgctcccaccgcgggcgccgtcgaggcaggcggtctctcggtcgggtcggggatgacgacgacgacgagggaggccgggagccggtgctgctagtgtccgggatgggcggctccgtgctgcacgcgcgccgccggtccaactccaagttcgacctccgggtctgggtgcgcatcctcttcgccaacctcgacttcaagaagtacctctggtcgctctacaacgccgataccgggtatgtggagccgctggacgacgatgtggagattgtcgtgccggaggacgaccacggcctgtttgccatcgacattcttgatccttcctggtttgtagaacttctccatctgtctatggtgtatcacttccatggtatgattgatatgctcataaactgtggatatgagaaagggaccacactatttggatatggttatgattttcgccaaagcaacaggatagacaaagcgatggctggtttgagagcaaaacttgagacagcttataagacctctggagggaaaaaagttaatttaatctcacattctatgggtggattgctagtacgctgcttcatgtctatgaatcatgatgtattcactaagtatgtcaacaaatggatttgcattgcttgtccattccaaggtgcccccggatgcatcaatgattctctacttactggattgcaatttgtttatggttttgagagcttctttttcgtatctagatgggcaatgcaccaattgcttgtcgaatgcccatcaatctatgaaatgttaccgaatccagaattcaagtggaaggaaaaaccaattattcaggtttggcgtaagaaccctgaaaaggatggaactgtggagcttgttcaatatgaagcaactgattgtgtgtccttgttcgaagaagctttaaggaataatgagctcacgtataacggaaagaaagtagcactaccattcaatatgtcagtcttcaaatgggccaccaagactcgccaaatcctagacaatgctgaattaccagatactgtgagcttttacaatatatacgggacatcttatgaaactccatacgatgtatgctatggctcagaaagctctccgattggagatttgtcagaagtgtgtcacacagtgccgtcatacacttatgtggatggagattgcacggttcccatagaatcggcacgggctgatgggttctctgcgaaagaaagagttggcgtcaaggccgaccaccgtggcctgctgtccgatgagaacgtattcaagcttctcaagaaatggctcggtgtgagcgagaagaagtcagagtggcgttgcgtgtctaaatcctactccaaagtgggtaattgggttgccctgtagttcttcaggaagactgttattttggcctttcctcctgaagagaagatgaaacaaaattctggtgattgtattgtatgtctgcacgatgtaaatccctgcgagctgcacggaacaagggattagtgccccttgtacgatgtatcattgccagacatttcttttgaagcctagggtcatatattcattgccccttccaactttggagcatagtaaatgaataatatgaaatcgatcataatttcagaagtgttctgtatttggattagaatgttaatttgcccataacggtgggacgcatctttt

SEQ ID NO: 66346 - DNA, 1951 bp, Zea Mays
caacggacgcgatcgctcacctctccccaccggtcattccaccgacccagcacagcagtccgagaggcgagcgaccgaaccagcctgctctctcgctcgagaagcctcctccgctccgccgtccgcccctcgcctcaccagtccgcattccggcgcacacgcccattaaaataccgcgtccaatctccgccctgcgctcgtccctcatgcccgcctcgcggctcacagtgcgcgtgtgccaccatgctcggcgcggcgctccgcctccgcgtccgcgtgctccgccgccgccgctcccaccgcgggcgccgtcgaggcaggcggtctctcggtcgggtcggggatgacgacgacgacgagggaggccgggagccggtgctgctagtgtccgggatgggcggctccgtgctgcacgcgcgccgccggtccaactccaagttcgacctccgggtctgggtgcgcatcctcttcgccaacctcgacttcaagaagtacctctggtcgctctacaacgccgataccgggtatgtggagccgctggacgacgatgtggagattgtcgtgccggaggacgaccacggcctgtttgccatcgacattcttgatccttcctggtttgtagaacttctccatctgtctatggtgtatcacttccatggtatgattgatatgctcataaactgtggatatgagaaagggaccacactatttggatatggttatgattttcgccaaagcaacagacaaagcgatggctggtttgagagcaaaacttgagacagcttataagacctctggagggaaaaaagttaatttaatctcacattctatgggtggattgctagtacgctgcttcatgtctatgaatcatgatgtattcactaagtatgtcaacaaatggatttgcattgcttgtccattccaaggtgcccccggatgcatcaatgattctctacttactggattgcaatttgtttatggttttgagagcttctttttcgtatctagatgggcaatgcaccaattgcttgtcgaatgcccatcaatctatgaaatgttaccgaatccagaattcaagtggaaggaaaaaccaattattcaggtttggcgtaagaaccctgaaaaggatggaactgtggagcttgttcaatatgaagcaactgattgtgtgtccttgttcgaagaagctttaaggaataatgagctcacgtataacggaaagaaagtagcactaccattcaatatgtcagtcttcaaatgggccaccaagactcgccaaatcctagacaatgctgaattaccagatactgtgagcttttacaatatatacgggacatcttatgaaactccatacgatgtatgctatggctcagaaagctctccgattggagatttgtcagaagtgtgtcacacagtgccgtcatacacttatgtggatggagattgcacggttcccatagaatcggcacgggctgatgggttctctgcgaaagaaagagttggcgtcaaggccgaccaccgtggcctgctgtccgatgagaacgtattcaagcttctcaagaaatggctcggtgtgagcgagaagaagtcagagtggcgttgcgtgtctaaatcctactccaaagtgggtaattgggttgccctgtagttcttcaggaagactgttattttggcctttcctcctgaagagaagatgaaacaaaattctggtgattgtattgtatgtctgcacgatgtaaatccctgcgagctgcacggaacaagggattagtgccccttgtacgatgtatcattgccagacatttcttttgaagcctagggtcatatattcattgccccttccaactttggagcatagtaaatgaataatatgaaatcgatcataatttcagaagtgttctgtatttggattagaatgttaatttgcccataacggtgggacgcatctttt

SEQ ID NO: 66347 - DNA, 1974 bp, Zea Mays
ccagcacagcagtccgagaggcgagcgaccgaaccagcctgctctctcgctcgagaagcctcctccgctccgccgtccgcccctcgcctcaccagtccgcattccggcgcacacgcccattaaaataccgcgtccaatctccgccctgcgctcgtccctcatgcccgcctcgcggctcacagtgcgcgtgtgccaccatgctcggcgcggcgctccgcctccgcgtccgcgtgctccgccgccgccgctcccaccgcgggcgccgtcgaggcaggcggtctctcggtcgggtcggggatgacgacgacgacgagggaggccgggagccggtgctgctagtgtccgggatgggcggctccgtgctgcacgcgcgccgccggtccaactccaagttcgacctccgggtctgggtgcgcatcctcttcgccaacctcgacttcaagaagtacctctggtcgctctacaacgccgataccgggtatgtggagccgctggacgacgatgtggagattgtcgtgccggaggacgaccacggcctgtttgccatcgacattcttgatccttcctgggtgagcttatgtgtgttggttggctcaattgcaggcttggtgtgtcattactgaatagtttagaccgagtttgtagaacttctccatctgtctatggtgtatcacttccatggtatgattgatatgctcataaactgtggatatgagaaagggaccacactatttggatatggttatgattttcgccaaagcaacagacaaagcgatggctggtttgagagcaaaacttgagacagcttataagacctctggagggaaaaaagttaatttaatctcacattctatgggtggattgctagtacgctgcttcatgtctatgaatcatgatgtattcactaagtatgtcaacaaatggatttgcattgcttgtccattccaaggtgcccccggatgcatcaatgattctctacttactggattgcaatttgtttatggttttgagagcttctttttcgtatctagatgggcaatgcaccaattgcttgtcgaatgcccatcaatctatgaaatgttaccgaatccagaattcaagtggaaggaaaaaccaattattcaggtttggcgtaagaaccctgaaaaggatggaactgtggagcttgttcaatatgaagcaactgattgtgtgtccttgttcgaagaagctttaaggaataatgagctcacgtataacggaaagaaagtagcactaccattcaatatgtcagtcttcaaatgggccaccaagactcgccaaatcctagacaatgctgaattaccagatactgtgagcttttacaatatatacgggacatcttatgaaactccatacgatgtatgctatggctcagaaagctctccgattggagatttgtcagaagtgtgtcacacagtgccgtcatacacttatgtggatggagattgcacggttcccatagaatcggcacgggctgatgggttctctgcgaaagaaagagttggcgtcaaggccgaccaccgtggcctgctgtccgatgagaacgtattcaagcttctcaagaaatggctcggtgtgagcgagaagaagtcagagtggcgttgcgtgtctaaatcctactccaaagtgggtaattgggttgccctgtagttcttcaggaagactgttattttggcctttcctcctgaagagaagatgaaacaaaattctggtgattgtattgtatgtctgcacgatgtaaatccctgcgagctgcacggaacaagggattagtgccccttgtacgatgtatcattgccagacatttcttttgaagcctagggtcatatattcattgccccttccaactttggagcatagtaaatgaataatatgaaatcgatcataatttcagaagtgttctgtatttggattagaatgttaatttgcccataacggtgggacgcatctttt

SEQ ID NO: 66348 - DNA, 1880 bp, Zea Mays
ccagcacagcagtccgagaggcgagcgaccgaaccagcctgctctctcgctcgagaagcctcctccgctccgccgtccgcccctcgcctcaccagtccgcattccggcgcacacgcccattaaaataccgcgtccaatctccgccctgcgctcgtccctcatgcccgcctcgcggctcacagtgcgcgtgtgccaccatgctcggcgcggcgctccgcctccgcgtccgcgtgctccgccgccgccgctcccaccgcgggcgccgtcgaggcaggcggtctctcggtcgggtcggggatgacgacgacgacgagggaggccgggagccggtgctgctagtgtccgggatgggcggctccgtgctgcacgcgcgccgccggtccaactccaagttcgacctccgggtctgggtgcgcatcctcttcgccaacctcgacttcaagaagtacctctggtcgctctacaacgccgataccgggtatgtggagccgctggacgacgatgtggagattgtcgtgccggaggacgaccacggcctgtttgccatcgacattcttgatccttcctggtttgtagaacttctccatctgtctatggtgtatcacttccatggtatgattgatatgctcataaactgtggatatgagaaagggaccacactatttggatatggttatgattttcgccaaagcaacaggatagacaaagcgatggctggtttgagagcaaaacttgagacagcttataagacctctggagggaaaaaagttaatttaatctcacattctatgggtggattgctagtattcactaagtatgtcaacaaatggatttgcattgcttgtccattccaaggtgcccccggatgcatcaatgattctctacttactggattgcaatttgtttatggttttgagagcttctttttcgtatctagatgggcaatgcaccaattgcttgtcgaatgcccatcaatctatgaaatgttaccgaatccagaattcaagtggaaggaaaaaccaattattcaggtttggcgtaagaaccctgaaaaggatggaactgtggagcttgttcaatatgaagcaactgattgtgtgtccttgttcgaagaagctttaaggaataatgagctcacgtataacggaaagaaagtagcactaccattcaatatgtcagtcttcaaatgggccaccaagactcgccaaatcctagacaatgctgaattaccagatactgtgagcttttacaatatatacgggacatcttatgaaactccatacgatgtatgctatggctcagaaagctctccgattggagatttgtcagaagtgtgtcacacagtgccgtcatacacttatgtggatggagattgcacggttcccatagaatcggcacgggctgatgggttctctgcgaaagaaagagttggcgtcaaggccgaccaccgtggcctgctgtccgatgagaacgtattcaagcttctcaagaaatggctcggtgtgagcgagaagaagtcagagtggcgttgcgtgtctaaatcctactccaaagtgggtaattgggttgccctgtagttcttcaggaagactgttattttggcctttcctcctgaagagaagatgaaacaaaattctggtgattgtattgtatgtctgcacgatgtaaatccctgcgagctgcacggaacaagggattagtgccccttgtacgatgtatcattgccagacatttcttttgaagcctagggtcatatattcattgccccttccaactttggagcatagtaaatgaataatatgaaatcgatcataatttcagaagtgttctgtatttggattagaatgttaatttgcccataacggtgggacgcatctttt

SEQ ID NO: 66349 - DNA, 1841 bp, Zea Mays
gaccgaaccagcctgctctctcgctcgagaagcctcctccgctccgccgtccgcccctcgcctcaccagtccgcattccggcgcacacgcccattaaaataccgcgtccaatctccgccctgcgctcgtccctcatgcccgcctcgcggctcacagtgcgcgtgtgccaccatgctcggcgcggcgctccgcctccgcgtccgcgtgctccgccgccgccgctcccaccgcgggcgccgtcgaggcaggcggtctctcggtcgggtcggggatgacgacgacgacgagggaggccgggagccggtgctgctagtgtccgggatgggcggctccgtgctgcacgcgcgccgccggtccaactccaagttcgacctccgggtctgggtgcgcatcctcttcgccaacctcgacttcaagaagtacctctggtcgctctacaacgccgataccgggtatgtggagccgctggacgacgatgtggagattgtcgtgccggaggacgaccacggcctgtttgccatcgacattcttgatccttcctggtttgtagaacttctccatctgtctatggtgtatcacttccatggtatgattgatatgctcataaactgtggatatgagaaagggaccacactatttggatatggttatgattttcgccaaagcaacaggatagacaaagcgatggctggtttgagagcaaaacttgagacagcttataagacctctggagggaaaaaagttaatttaatctcacattctatgggtggattgctagtacgctgcttcatgtctatgaatcatgatgtattcactaagtatgtcaacaaatggatttgcattgcttgtccattccaaggtgcccccggatgcatcaatgattctctacttactggattgcaatttgtttatggttttgagagcttctttttcgtatctagatgggcaatgcaccaattgaattcaagtggaaggaaaaaccaattattcaggtttggcgtaagaaccctgaaaaggatggaactgtggagcttgttcaatatgaagcaactgattgtgtgtccttgttcgaagaagctttaaggaataatgagctcacgtataacggaaagaaagtagcactaccattcaatatgtcagtcttcaaatgggccaccaagactcgccaaatcctagacaatgctgaattaccagatactgtgagcttttacaatatatacgggacatcttatgaaactccatacgatgtatgctatggctcagaaagctctccgattggagatttgtcagaagtgtgtcacacagtgccgtcatacacttatgtggatggagattgcacggttcccatagaatcggcacgggctgatgggttctctgcgaaagaaagagttggcgtcaaggccgaccaccgtggcctgctgtccgatgagaacgtattcaagcttctcaagaaatggctcggtgtgagcgagaagaagtcagagtggcgttgcgtgtctaaatcctactccaaagtgggtaattgggttgccctgtagttcttcaggaagactgttattttggcctttcctcctgaagagaagatgaaacaaaattctggtgattgtattgtatgtctgcacgatgtaaatccctgcgagctgcacggaacaagggattagtgccccttgtacgatgtatcattgccagacatttcttttgaagcctagggtcatatattcattgccccttccaactttggagcatagtaaatgaataatatgaaatcgatcataatttcagaagtgttctgtatttggattagaatgttaatttgcccataacggtgggacgcatctttt

SEQ ID NO: 66350 - DNA, 2325 bp, Zea Mays
ctctcgctcgagaagcctcctccgctccgccgtccgcccctcgcctcaccagtccgcattccggcgcacacgcccattaaaataccgcgtccaatctccgccctgcgctcgtccctcatgcccgcctcgcggctcacagtgcgcgtgtgccaccatgctcggcgcggcgctccgcctccgcgtccgcgtgctccgccgccgccgctcccaccgcgggcgccgtcgaggcaggcggtctctcggtcgggtcggggatgacgacgacgacgagggaggccgggagccggtgctgctagtgtccgggatgggcggctccgtgctgcacgcgcgccgccggtccaactccaagttcgacctccgggtctgggtgcgcatcctcttcgccaacctcgacttcaagaagtacctctggtcgctctacaacgccgataccgggtatgtggagccgctggacgacgatgtggagattgtcgtgccggaggacgaccacggcctgtttgccatcgacattcttgatccttcctggtttgtagaacttctccatctgtctatggtgtatcacttccatggtatgattgatatgctcataaactgtggatatgagaaagggaccacactatttggatatggttatgattttcgccaaagcaacaggatagacaaagcgatggctggtttgagagcaaaacttgagacagcttataagacctctggagggaaaaaagttaatttaatctcacattctatgggtggattgctagtacgctgcttcatgtctatgaatcatgatgtgagttttcatgttttctgtgtttttttgcttatgcataaatatccatgtcaattttccccattttctaggtattcactaagtatgtcaacaaatggatttgcattgcttgtccattccaaggtgcccccggatgcatcaatgattctctacttactggattgcaatttgtttatggttttgagagcttctttttcgtatctagatgggcaatgcaccaattgcttgtcgaatgcccatcaatctatgaaatgttaccgaatccagaattcaagtggaaggaaaaaccaattattcaggtttggcgtaagaaccctgaaaaggatggaactgtggagcttgttcaatatgaagcaactgattgtgtgtccttgttcgaagaagctttaaggaataatgagctcacgtataacggaaagaaagtagcactaccattcaatatgtcagtcttcaaatgggccaccaagactcgccaaatcctagacaatgctgaattaccagatactgtgagcttttacaatatatacgggacatcttatgaaactccatacgatgtatggtgagtattatgaatttatgatggcagttgatactcacattatgtagtttttctttctgctctagatttttattctggtattcatcattcttattttgaactatctgtaggcttataggttgtcaatgtataaagttcaaggtagagaaactttaggttctgattgagatggttcaatacaaatagccaatatgaattagaatctgattgagattcacattttctagctccacagctggagctgtgacttgtatccatagtacctttttcagtgaggatgcttcaaattttgttttagtggaaaaaaatactctagtgagagtctgacagttgaaatatgtaatttcgttcctctggctctaagtatatcactgctattttccacagctatggctcagaaagctctccgattggagatttgtcagaagtgtgtcacacagtgccgtcatacacttatgtggatggagattgcacggttcccatagaatcggcacgggctgatgggttctctgcgaaagaaagagttggcgtcaaggccgaccaccgtggcctgctgtccgatgagaacgtattcaagcttctcaagaaatggctcggtgtgagcgagaagaagtcagagtggcgttgcgtgtctaaatcctactccaaagtgggtaattgggttgccctgtagttcttcaggaagactgttattttggcctttcctcctgaagagaagatgaaacaaaattctggtgattgtattgtatgtctgcacgatgtaaatccctgcgagctgcacggaacaagggattagtgccccttgtacgatgtatcattgccagacatttcttttgaagcctagggtcatatattcattgccccttccaactttggagcatagtaaatgaataatatgaaatcgatcataatttcagaagtgttctgtatttggattagaatgttaatttgcccataacggtgggacgcatctttt

SEQ ID NO: 66351 - DNA, 1332 bp, Zea Mays
aaaataccgcgtccaatctccgccctgcgctcgtccctcatgcccgcctcgcggctcacagtgcgcgtgtgccaccatgctcggcgcggcgctccgcctccgcgtccgcgtgctccgccgccgccgctcccaccgcgggcgccgtcgaggcaggcggtctctcggtcgggtcggggatgacgacgacgacgagggaggccgggagccggtgctgctagtgtccgggatgggcggctccgtgctgcacgcgcgccgccggtccaactccaagttcgacctccgggtctgggtgcgcatcctcttcgccaacctcgacttcaagaagtacctctggtcgctctacaacgccgataccgggtatgtggagccgctggacgacgatgtggagattgtcgtgccggaggacgaccacggcctgtttgccatcgacattcttgatccttcctggtttgtagaacttctccatctgtctatggtgtatcacttccatggtatgattgatatgctcataaactgtggatatgagaaagggaccacactatttggatatggttatgattttcgccaaagcaacaggatagacaaagcgatggctggtttgagagcaaaacttgagacagcttataagacctctggagggaaaaaagttaatttaatctcacattctatgggtggattgctagtacgctgcttcatgtctatgaatcatgatgtattcactaagtatgtcaacaaatggatttgcattgcttgtccattccaaggtgcccccggatgcatcaatgattctctacttactggattgcaatttgtttatggttttgagagcttctttttcgtatctagatgggcaatgcaccaattgcttgtcgaatgcccatcaatctatgaaatgttaccgaatccagaattcaagtggaaggaaaaaccaattattcaggtttggcgtaagaaccctgaaaaggatggaactgtggagcttgttcaatatgaagcaactgattgtgtgtccttgttcgaagaagctttaaggaataatgagctcacgtataacggaaagaaagtagcactaccattcaatatgtcagtcttcaaatgggccaccaagactcgccaaatcctagacaatgctgaattaccagatactgtgagcttttacaatatatacgggacatcttatgaaactccatacgatgtatgctatggctcagaaagctctccgattggagatttgtcagaagtgtgtcacacagtgccgtcatacacttatgtggatggagattgcacggttcccatagaatcggcacggcgatcactggtcagtcacagaag

SEQ ID NO: 66352 - DNA, 1309 bp, Zea Mays
gttggctcaattgcaggcttggtgtgtcattactgaatagtttagaccgagtttgtagaacttctccatctgtctatggtgtatcacttccatggtatgattgatatgctcataaactgtggatatgagaaagggaccacactatttggatatggttatgattttcgccaaagcaacagacaaagcgatggctggtttgagagcaaaacttgagacagcttataagacctctggagggaaaaaagttaatttaatctcacattctatgggtggattgctagtacgctgcttcatgtctatgaatcatgatgtattcactaagtatgtcaacaaatggatttgcattgcttgtccattccaaggtgcccccggatgcatcaatgattctctacttactggattgcaatttgtttatggttttgagagcttctttttcgtatctagatgggcaatgcaccaattgcttgtcgaatgcccatcaatctatgaaatgttaccgaatccagaattcaagtggaaggaaaaaccaattattcaggtttggcgtaagaaccctgaaaaggatggaactgtggagcttgttcaatatgaagcaactgattgtgtgtccttgttcgaagaagctttaaggaataatgagctcacgtataacggaaagaaagtagcactaccattcaatatgtcagtcttcaaatgggccaccaagactcgccaaatcctagacaatgctgaattaccagatactgtgagcttttacaatatatacgggacatcttatgaaactccatacgatgtatggcttataggttgtcaatgtataaagttcaaggctgatgggttctctgcgaaagaaagagttggcgtcaaggccgaccaccgtggcctgctgtccgatgagaacgtattcaagcttctcaagaaatggctcggtgtgagcgagaagaagtcagagtggcgttgcgtgtctaaatcctactccaaagtgggtaattgggttgccctgtagttcttcaggaagactgttattttggcctttcctcctgaagagaagatgaaacaaaattctggtgattgtattgtatgtctgcacgatgtaaatccctgcgagctgcacggaacaagggattagtgccccttgtacgatgtatcattgccagacatttcttttgaagcctagggtcatatattcattgccccttccaactttggagcatagtaaatgaataatatgaaatcgatcataatttcagaagtgttctgtatttggattagaatgttaatttgcccataacggtgggacgcatctttt

SEQ ID NO: 66353 - DNA, 1309 bp, Zea Mays
ctcaattgcaggcttggtgtgtcattactgaatagtttagaccgagtttgtagaacttctccatctgtctatggtgtatcacttccatggtatgattgatatgctcataaactgtggatatgagaaagggaccacactatttggatatggttatgattttcgccaaagcaacaggatagacaaagcgatggctggtttgagagcaaaacttgagacagcttataagacctctggagggaaaaaagttaatttaatctcacattctatgggtggattgctagtacgctgcttcatgtctatgaatcatgatgtattcactaagtatgtcaacaaatggatttgcattgcttgtccattccaaggtgcccccggatgcatcaatgattctctacttactggattgcaatttgtttatggttttgagagcttctttttcgtatctagatgggcaatgcaccaattgcttgtcgaatgcccatcaatctatgaaatgttaccgaatccagaattcaagtggaaggaaaaaccaattattcaggtttggcgtaagaaccctgaaaaggatggaactgtggagcttgttcaatatgaagcaactgattgtgtgtccttgttcgaagaagctttaaggaataatgagctcacgtataacggaaagaaagtagcactaccattcaatatgtcagtcttcaaatgggccaccaagactcgccaaatcctagacaatgctgaattaccagatactgtgagcttttacaatatatacgggacatcttatgaaactccatacgatgtatggcttataggttgtcaatgtataaagttcaaggctgatgggttctctgcgaaagaaagagttggcgtcaaggccgaccaccgtggcctgctgtccgatgagaacgtattcaagcttctcaagaaatggctcggtgtgagcgagaagaagtcagagtggcgttgcgtgtctaaatcctactccaaagtgggtaattgggttgccctgtagttcttcaggaagactgttattttggcctttcctcctgaagagaagatgaaacaaaattctggtgattgtattgtatgtctgcacgatgtaaatccctgcgagctgcacggaacaagggattagtgccccttgtacgatgtatcattgccagacatttcttttgaagcctagggtcatatattcattgccccttccaactttggagcatagtaaatgaataatatgaaatcgatcataatttcagaagtgttctgtatttggattagaatgttaatttgcccataacggtgggacgcatctttt

SEQ ID NO: 66354 - DNA, 1352 bp, Zea Mays
ctcaattgcaggcttggtgtgtcattactgaatagtttagaccgagtttgtagaacttctccatctgtctatggtgtatcacttccatggtatgattgatatgctcataaactgtggatatgagaaagggaccacactatttggatatggttatgattttcgccaaagcaacagacaaagcgatggctggtttgagagcaaaacttgagacagcttataagacctctggagggaaaaaagttaatttaatctcacattctatgggtggattgctagtattcactaagtatgtcaacaaatggatttgcattgcttgtccattccaaggtgcccccggatgcatcaatgattctctacttactggattgcaatttgtttatggttttgagagcttctttttcgtatctagatgggcaatgcaccaattgcttgtcgaatgcccatcaatctatgaaatgttaccgaatccagaattcaagtggaaggaaaaaccaattattcaggtttggcgtaagaaccctgaaaaggatggaactgtggagcttgttcaatatgaagcaactgattgtgtgtccttgttcgaagaagctttaaggaataatgagctcacgtataacggaaagaaagtagcactaccattcaatatgtcagtcttcaaatgggccaccaagactcgccaaatcctagacaatgctgaattaccagatactgtgagcttttacaatatatacgggacatcttatgaaactccatacgatgtatgctatggctcagaaagctctccgattggagatttgtcagaagtgtgtcacacagtgccgtcatacacttatgtggatggagattgcacggttcccatagaatcggcacgggctgatgggttctctgcgaaagaaagagttggcgtcaaggccgaccaccgtggcctgctgtccgatgagaacgtattcaagcttctcaagaaatggctcggtgtgagcgagaagaagtcagagtggcgttgcgtgtctaaatcctactccaaagtgggtaattgggttgccctgtagttcttcaggaagactgttattttggcctttcctcctgaagagaagatgaaacaaaattctggtgattgtattgtatgtctgcacgatgtaaatccctgcgagctgcacggaacaagggattagtgccccttgtacgatgtatcattgccagacatttcttttgaagcctagggtcatatattcattgccccttccaactttggagcatagtaaatgaataatatgaaatcgatcataatttcagaagtgttctgtatttggattagaatgttaatttgcccataacggtgggacgcatctttt

SEQ ID NO: 66355 - DNA, 1387 bp, Zea Mays
ctcaattgcaggcttggtgtgtcattactgaatagtttagaccgagtttgtagaacttctccatctgtctatggtgtatcacttccatggtatgattgatatgctcataaactgtggatatgagaaagggaccacactatttggatatggttatgattttcgccaaagcaacaggatagacaaagcgatggctggtttgagagcaaaacttgagacagcttataagacctctggagggaaaaaagttaatttaatctcacattctatgggtggattgctagtacgctgcttcatgtctatgaatcatgatgtattcactaagtatgtcaacaaatggatttgcattgcttgtccattccaaggtgcccccggatgcatcaatgattctctacttactggattgcaatttgtttatggttttgagagcttctttttcgtatctagatgggcaatgcaccaattgcttgtcgaatgcccatcaatctatgaaatgttaccgaatccagaattcaagtggaaggaaaaaccaattattcaggtttggcgtaagaaccctgaaaaggatggaactgtggagcttgttcaatatgaagcaactgattgtgtgtccttgttcgaagaagctttaaggaataatgagctcacgtataacggaaagaaagtagcactaccattcaatatgtcagtcttcaaatgggccaccaagactcgccaaatcctagacaatgctgaattaccagatactgtgagcttttacaatatatacgggacatcttatgaaactccatacgatgtatgctatggctcagaaagctctccgattggagatttgtcagaagtgtgtcacacagtgccgtcatacacttatgtggatggagattgcacggttcccatagaatcggcacgggctgatgggttctctgcgaaagaaagagttggcgtcaaggccgaccaccgtggcctgctgtccgatgagaacgtattcaagcttctcaagaaatggctcggtgtgagcgagaagaagtcagagtggcgttgcgtgtctaaatcctactccaaagtgggtaattgggttgccctgtagttcttcaggaagactgttattttggcctttcctcctgaagagaagatgaaacaaaattctggtgattgtattgtatgtctgcacgatgtaaatccctgcgagctgcacggaacaagggattagtgccccttgtacgatgtatcattgccagacatttcttttgaagcctagggtcatatattcattgccccttccaactttggagcatagtaaatgaataatatgaaatcgatcataatttcagaagtgttctgtatttggattagaatgttaatttgcccataacggtgggacgcatctttt

SEQ ID NO: 66356 - DNA, 1281 bp, Zea Mays
ctcaattgcaggcttggtgtgtcattactgaatagtttagaccgagtttgtagaacttctccatctgtctatggtgtatcacttccatggtatgattgatatgctcataaactgtggatatgagaaagggaccacactatttggatatggttatgattttcgccaaagcaacagacaaagcgatggctggtttgagagcaaaacttgagacagcttataagacctctggagggaaaaaagttaatttaatctcacattctatgggtggattgctagtacgctgcttcatgtctatgaatcatgatgtattcactaagtatgtcaacaaatggatttgcattgcttgtccattccaagcttgtcgaatgcccatcaatctatgaaatgttaccgaatccagaattcaagtggaaggaaaaaccaattattcaggtttggcgtaagaaccctgaaaaggatggaactgtggagcttgttcaatatgaagcaactgattgtgtgtccttgttcgaagaagctttaaggaataatgagctcacgtataacggaaagaaagtagcactaccattcaatatgtcagtcttcaaatgggccaccaagactcgccaaatcctagacaatgctgaattaccagatactgtgagcttttacaatatatacgggacatcttatgaaactccatacgatgtatgctatggctcagaaagctctccgattggagatttgtcagaagtgtgtcacacagtgccgtcatacacttatgtggatggagattgcacggttcccatagaatcggcacgggctgatgggttctctgcgaaagaaagagttggcgtcaaggccgaccaccgtggcctgctgtccgatgagaacgtattcaagcttctcaagaaatggctcggtgtgagcgagaagaagtcagagtggcgttgcgtgtctaaatcctactccaaagtgggtaattgggttgccctgtagttcttcaggaagactgttattttggcctttcctcctgaagagaagatgaaacaaaattctggtgattgtattgtatgtctgcacgatgtaaatccctgcgagctgcacggaacaagggattagtgccccttgtacgatgtatcattgccagacatttcttttgaagcctagggtcatatattcattgccccttccaactttggagcatagtaaatgaataatatgaaatcgatcataatttcagaagtgttctgtatttggattagaatgttaatttgcccataacggtgggacgcatctttt

SEQ ID NO: 66357 - DNA, 1448 bp, Zea Mays
gtatgcataagcacatttaagcaactgatggaatcgtttgtagaacttctccatctgtctatggtgtatcacttccatggtatgattgatatgctcataaactgtggatatgagaaagggaccacactatttggatatggttatgattttcgccaaagcaacaggatagacaaagcgatggctggtttgagagcaaaacttgagacagcttataagacctctggagggaaaaaagttaatttaatctcacattctatgggtggattgctagtacgctgcttcatgtctatgaatcatgatgtgagttttcatgttttctgtgtttttttgcttatgcataaatatccatgtcaattttccccattttctaggtattcactaagtatgtcaacaaatggatttgcattgcttgtccattccaaggtgcccccggatgcatcaatgattctctacttactggattgcaatttgtttatggttttgagagcttctttttcgtatctagatgggcaatgcaccaattgcttgtcgaatgcccatcaatctatgaaatgttaccgaatccagaattcaagtggaaggaaaaaccaattattcaggtttggcgtaagaaccctgaaaaggatggaactgtggagcttgttcaatatgaagcaactgattgtgtgtccttgttcgaagaagctttaaggaataatgagctcacgtataacggaaagaaagtagcactaccattcaatatgtcagtcttcaaatgggccaccaagactcgccaaatcctagacaatgctgaattaccagatactgtgagcttttacaatatatacgggacatcttatgaaactccatacgatgtatgctatggctcagaaagctctccgattggagatttgtcagaagtgtgtcacacagtgccgtcatacacttatgtggatggagattgcacggttcccatagaatcggcacgggctgatgggttctctgcgaaagaaagagttggcgtcaaggccgaccaccgtggcctgctgtccgatgagaacgtattcaagcttctcaagaaatggctcggtgtgagcgagaagaagtcagagtggcgttgcgtgtctaaatcctactccaaagtgggtaattgggttgccctgtagttcttcaggaagactgttattttggcctttcctcctgaagagaagatgaaacaaaattctggtgattgtattgtatgtctgcacgatgtaaatccctgcgagctgcacggaacaagggattagtgccccttgtacgatgtatcattgccagacatttcttttgaagcctagggtcatatattcattgccccttccaactttggagcatagtaaatgaataatatgaaatcgatcataatttcagaagtgttctgtatttggattagaatgttaatttgcccataacggtgggacgcatctttt

SEQ ID NO: 66358 - DNA, 1433 bp, Zea Mays
gcacatttaagcaactgatggaatcgtttgtagaacttctccatctgtctatggtgtatcacttccatggtatgattgatatgctcataaactgtggatatgagaaagggaccacactatttggatatggttatgattttcgccaaagcaacagacaaagcgatggctggtttgagagcaaaacttgagacagcttataagacctctggagggaaaaaagttaatttaatctcacattctatgggtggattgctagtacgctgcttcatgtctatgaatcatgatgtgagttttcatgttttctgtgtttttttgcttatgcataaatatccatgtcaattttccccattttctaggtattcactaagtatgtcaacaaatggatttgcattgcttgtccattccaaggtgcccccggatgcatcaatgattctctacttactggattgcaatttgtttatggttttgagagcttctttttcgtatctagatgggcaatgcaccaattgcttgtcgaatgcccatcaatctatgaaatgttaccgaatccagaattcaagtggaaggaaaaaccaattattcaggtttggcgtaagaaccctgaaaaggatggaactgtggagcttgttcaatatgaagcaactgattgtgtgtccttgttcgaagaagctttaaggaataatgagctcacgtataacggaaagaaagtagcactaccattcaatatgtcagtcttcaaatgggccaccaagactcgccaaatcctagacaatgctgaattaccagatactgtgagcttttacaatatatacgggacatcttatgaaactccatacgatgtatgctatggctcagaaagctctccgattggagatttgtcagaagtgtgtcacacagtgccgtcatacacttatgtggatggagattgcacggttcccatagaatcggcacgggctgatgggttctctgcgaaagaaagagttggcgtcaaggccgaccaccgtggcctgctgtccgatgagaacgtattcaagcttctcaagaaatggctcggtgtgagcgagaagaagtcagagtggcgttgcgtgtctaaatcctactccaaagtgggtaattgggttgccctgtagttcttcaggaagactgttattttggcctttcctcctgaagagaagatgaaacaaaattctggtgattgtattgtatgtctgcacgatgtaaatccctgcgagctgcacggaacaagggattagtgccccttgtacgatgtatcattgccagacatttcttttgaagcctagggtcatatattcattgccccttccaactttggagcatagtaaatgaataatatgaaatcgatcataatttcagaagtgttctgtatttggattagaatgttaatttgcccataacggtgggacgcatctttt

SEQ ID NO: 66359 - DNA, 1486 bp, Zea Mays
cggaacacctctgcggtcctgcctctgcttctccccacgccaccgaggcagtccaggccaggacagggtgccacaaaaccaaaaccaaaccccaccaccactccgcacgagatcatttcgccagctcatcgccaccgccctcctccgctcccgcgtctccttcccctcgtcgtcgtcgggttggtgggtccacctctcgccgtgccccgccgtcgacccgcctcagaatcaaagataagtcaaaggaaaggtcggtatgcgccggtggttttgctgcacgaggtttaatgcttcatatcgtgaacatgaaaatgaacgtcccatcactccagaggagaaagaaggaaatggtttttctgttaaaagtgatcccatcaaggcaccaccttccattgaagtccctgaattatcatttgaagaattgaaagaaaagaccgacaattttggttcaaaggctttgattggtgaggggtcatatggaagagtatattatgctattctggacagcggaaaacatgttgctgttaaaaagcttgacgcttcaacagaccctgaacttgataatgagtttttgacacaggtatccattgcctcaaaactaaaacatgataattttgtggagatgcttggatattgtgtggaaggaaatcagcgtctagtggtctatgaatttgcgacaatgggttctctgcatgatatcttgcatggaagaaagggtgttccaggtgcacagcctggcccagcacttgattggatgcagcgggttaagattgctattgatgctgctaaagggctagagtatcttcatgaaaaggtgcagccttcaatagtccaccgggacatacggtctagcaatattcttctgtttgaggactacagagcgaaaattgcagatttcaatctttcgaatcagtctccagatatggctgctcgtttgcattctactcgtgtccttggaaccttcggctaccatgctcccgagtatgccatgactggccagctaactcagaagagtgatgtatatagctttggggttgttcttttagagcttctaacaggaaggaaaccagtagatcatacaatgcctagaggtcagcagagtctggttacatgggcaacacctagattgactgaggacacagttaaacaatgtgttgatccaagattgaagggagaatatcctccaaagggagttgccaagcttgcggctgtggcggcactgtgtgtgcaatatgaatctgaatttagacccagcatgagcatcgtagttaaggcactctcaccccttcttcaacataaaccgcaaccaccggcagccactactgacgctacagcaccgtcagatgcctgactttctcaaggagctatgaatcatgaatgttaagagaaccattttctcttcggagagctaaactgtgcactcatgctgttcgttggtccatctgtttgttcatcaaatcgagcgtaacgttaccgaaagatggac

SEQ ID NO: 66360 - DNA, 1955 bp, Zea Mays
cagcccaactccatcgttactgccccctcaaaaagaaaaactctatatctttacacgccggacacacgggcacacgggccaggccaagcctgacatgccgtccgccgcgctcatatctcctttcgtctactccgtccagtcccaactctccaccggcggcaggaggcgccggcgctagcccgtggcgagatgagcggcgggagcgtaagcgccgtgttttatgcggacaagtaccacccgatccaggccggcagcatcgacggcacggacgtcgcgccccacgataacgccgtcctccgcgccctcatctgctctcaggccggcctctacgaccctttcggcgaccccaaggcctccggcgacccccaccgcacggttttcgtcggccgcctctcgcgccagaccgacgacgacacgcttcggaaggcgatgagcaggtacgggagggtgaagagcatgcggttggtgcgtgacattggtgcttctcgtggttatgcatttgttgagtatgaaactgacagagagatgcatcgtgcctatgaggatgcacaccattcagttattgaaggcagtgaagtgattgttgattactacaggcaacagcttatgcctgggtggataccaaggcggctaggaggggggcttggtggaatgaaagaatctggacagcttcgctttggaggccgagagaggccatttcgtgctcccttgcgacctattccttatgatgaactgaagaagcttgggatcccaccgccacctgaagggcgatatatgacacgttatcaggttccaccaccaccaaggcggaagagcagcaatattgacattgaagattcacctcctgggagaagatccaaggacagagccggggttagtacctacagaaggcaaagaagttctaatgacgatgatgaaacccttctcaagaggaaaagcagccgagacgggctagaagaatcacaaagtcggaggagcgcaagatcatccattaccaaggaggacaacaggtacagcagtcagaggaagtccaaggaacatgacaaaggtcatcgcaagcacagacgaagccaagatccgggcgaagtatctcctccagcagaggaagacggtagctatgaaaggcagagaactttagaagaacctgatcgcagccctgatcggtaccatcaccactggcatcacagggatgatacatatgagagcagacacttgcgccacagggatcatcgcaagcgtagacgaagccaagaaccgggcgaagtatctccaccagaggaagactgtagccatgaaagggagagaacttcagacgaacctggtcgcagccctgatcggtaccatcaccactggcatcaaagggatggtacatatgagagcagacactcacgccacagggatcatcgcaagcgcagacgaagccaagagccaggcgtatctccactagaggaagacagtagctatgaaagggaaagaacttcagacgaacttggtcgcagccctgattggtaccatcaccatcggcatcacagggaggatacatatgagagcagacactctcaccacagggatcgccgacgccatggtgaccggcatcgcaccaagagaagcgagagtcgagattacagggactaggcaactctcactcgcaccacagggatccccgacgccatggtgaccggcatcacaccaagagaagtgagggtcgagattacactctccagtttcctagactacaatgtttcattatgtaaacttgattgtttttcgtactccttgatctagtaaggtttactgttgccctgtagtctctttcatgagaatgtattcctgtaccgaattttatatgtttggttttgttgttgacacacctttatctctatttatttactcctagactagatgacaggagagaataaaaataaatgaaatactgaaatataataaaaagaaca

SEQ ID NO: 66361 - DNA, 1925 bp, Zea Mays
cagcccaactccatcgttactgccccctcaaaaagaaaaactctatatctttacacgccggacacacgggcacacgggccaggccaagcctgacatgccgtccgccgcgctcatatctcctttcgtctactccgtccagtcccaactctccaccggcggcaggaggcgccggcgctagcccgtggcgagatgagcggcgggagcgtaagcgccgtgttttatgcggacaagtaccacccgatccaggccggcagcatcgacggcacggacgtcgcgccccacgataacgccgtcctccgcgccctcatctgctctcaggccggcctctacgaccctttcggcgaccccaaggcctccggcgacccccaccgcacggttttcgtcggccgcctctcgcgccagaccgacgacgacacgcttcggaaggcgatgagcaggtacgggagggtgaagagcatgcggttggtgcgtgacattgttacaggtgcttctcgtggttatgcatttgttgagtatgaaactgacagagagatgcatcgtgcctatgaggatgcacaccattcagttattgaaggcagtgaagtgattgttgattactacaggcaacagcttatgcctgggtggataccaaggcggctaggaggggggcttggtggaatgaaagaatctggacagcttcgctttggaggccgagagaggccatttcgtgctcccttgcgacctattccttatgatgaactgaagaagcttgggatcccaccgccacctgaagggcgatatatgacacgttatcaggttccaccaccaccaaggcggaagagcagcaatattgacattgaagattcacctcctgggagaagatccaaggacagagccggggttagtacctacagaaggcaaagaagttctaatgacgatgatgaaacccttctcaagaggaaaagcagccgagacgggctagaagaatcacaaagtcggaggagcgcaagatcatccattaccaaggaggacaacaggtacagcagtcagaggaagtccaaggaacatgacaaaggtcatcgcaagcacagacgaagccaagatccgggcgaagtatctcctccagcagaggaagacggtagctatgaaaggcagagaactttagaagaacctgatcgcagccctgatcggtaccatcaccactggcatcacagggatgatacatatgagagcagacacttgcgccacagggatcatcgcaagcgtagacgaagccaagaaccgggcgaagtatctccaccagaggaagactgtagccatgaaagggagagaacttcagacgaacctggtcgcagccctgatcggtaccatcaccactggcatcaaagggatggtacatatgagagcagacactcacgccacagggatcatcgcaagcgcagacgaagccaagagccaggcgtatctccactagaggaagacagtagctatgaaagggaaagaacttcagacgaacttggtcgcagccctgattggtaccatcaccatcggcatcacagggaggatacatatgagagcagacactctcaccacagggatcgccgacgccatggtgaccggcatcgcaccaagagaagcgagagtcgagattacagggactaggcaactctcactcgcaccacagggatccccgacgccatggtgaccggcatcacaccaagagaagtgagggtcgagattacactctccagtttcctagactacaatgtttcattatgtaaacttgattgtttttcgtactccttgatctagtaaggtttactgttgccctgtagtctctttcatgagaatgtattcctgtaccgaattttatatgtttggttttgttgttgacacacaggagagaataaaaataaatgaaatactgaaatataataaaaagaaca

SEQ ID NO: 66362 - DNA, 1679 bp, Zea Mays
caaaattacgatattgtaaatacaatgatatttttggaatactgaaaactcatctttaatataaagtttttaaactatagctagcttgtgtataaatatcataatttgtaatgttgtattttaaaaatatattttaaaactacggtatttttgatctgtgatgatagttttgagaaaccaaacatacgtattaataagttgcaagaccgttgaggcgttgactcgtcactcggtcttttgtccatcaatccctctctttcccatcgccagatcacctggccggccttctcctgcaatggatgctaccatggcgttcacctccggaagccctacccccacgcgcttctactcttcagctttgctatcgttgcgcacccccaagagcctctctgtctacggcccatggcgatggcgtgggcgtgggcgccccctcctcgcgctccggcatcggtcccaggcccaggccgccgcagcggcggccggggcggccgaagcctcccaccacgatgttgtagttgtgggcgctggaatcgtagggcttgccatcgcgcgccacctcctcctccacacttcgctctccgttgccatcgccgacgctgccgtcccctgctctggtgccacaggcgcagggcagggatacatatggatgtcgcaccggacgccggggactgacacgtgggagctggcgctgcggagtaagcaactttgggaggagctggcgaccgaggttgacggccagggaggcggcggagcacgggagaaattggggtggatgaggacagttgggagaagttcggaagagctgggcacattggacgaaaggaccaaggctctgtctcaggcaggcatacatgcggaattcttgtcagcatcttcattacatgcattagaaccggcactcagtgtagggaaagatggcggtgctatgttcttgccgcaagactgtcagattgatgcattccaggctgtctctttgattgagaagaccaataactcgtattcctcagaaggaaggtatagggagttctataatgatcctgccatgtcattaataagatcggacgttactggaaaagttgaagctgtccaaacttccagaaacatattgtatggcagaaaagcttttgtaattgcttctggtgcctggactcgatccttattgcatagtttcgtagaaccagctttgacgttggatattcctgtcaagccacgaaagggtcatcttcttgtgttggagaaattcgacaaggttaagttaaatcatgccctaatggaggttggatatgttgaccatcagattacaaagtcaaatagcacacacatagcttcagaatctagtgaagatgagcttggtgctttatcagtatcaatgactgcaaccttagatacaaagggaaatttagttctaggaagcagccgggagttcaaaggtttttcgagggaggttgatagatccgttgttcagtgtatatgggaacgtgcaggagagttttttcctgcaatgaagaatgtttcttttgatattgatcagaatactcaaatcagaatagggcatcgtccatacatgcctgatggaaagccagttattgactttattcctaatctctcaaatattttgattgcaactggacacgaaggaagtggacttactttgatgaaaggggtaaaagcgaggagcc

SEQ ID NO: 66363 - DNA, 1691 bp, Zea Mays
caaaattacgatattgtaaatacaatgatatttttggaatactgaaaactcatctttaatataaagtttttaaactatagctagcttgtgtataaatatcataatttgtaatgttgtattttaaaaatatattttaaaactacggtatttttgatctgtgatgatagttttgagaaaccaaacatacgtattaataagttgcaagaccgttgaggcgttgactcgtcactcggtcttttgtccatcaatccctctctttcccatcgccagatcacctggccggccttctcctgcaatggatgctaccatggcgttcacctccggaagccctacccccacgcgcttctactcttcagctttgctatcgttgcgcacccccaagagcctctctgtctacggcccatggcgatggcgtgggcgtgggcgccccctcctcgcgctccggcatcggtcccaggcccaggccgccgcagcggcggccggggcggccgaagcctcccaccacgatgttgtagttgtgggcgctggaatcgtagggcttgccatcgcgcgccacctcctcctccacacttcgctctccgttgccatcgccgacgctgccgtcccctgctctggtgccacaggcgcagggcagggatacatatggatgtcgcaccggacgccggggactgacacgtgggagctggcgctgcggagtaagcaactttgggaggagctggcgaccgaggttgacggccagggaggcggcggagcacgggagaaattggggtggatgaggacaggaagcttgctagttgggagaagttcggaagagctgggcacattggacgaaaggaccaaggctctgtctcaggcaggcatacatgcggaattcttgtcagcatcttcattacatgcattagaaccggcactcagtgtagggaaagatggcggtgctatgttcttgccgcaagactgtcagattgatgcattccaggctgtctctttgattgagaagaccaataactcgtattcctcagaaggaaggtatagggagttctataatgatcctgccatgtcattaataagatcggacgttactggaaaagttgaagctgtccaaacttccagaaacatattgtatggcagaaaagcttttgtaattgcttctggtgcctggactcgatccttattgcatagtttcgtagaaccagctttgacgttggatattcctgtcaagccacgaaagggtcatcttcttgtgttggagaaattcgacaaggttaagttaaatcatgccctaatggaggttggatatgttgaccatcagattacaaagtcaaatagcacacacatagcttcagaatctagtgaagatgagcttggtgctttatcagtatcaatgactgcaaccttagatacaaagggaaatttagttctaggaagcagccgggagttcaaaggtttttcgagggaggttgatagatccgttgttcagtgtatatgggaacgtgcaggagagttttttcctgcaatgaagaatgtttcttttgatattgatcagaatactcaaatcagaatagggcatcgtccatacatgcctgatggaaagccagttattgactttattcctaatctctcaaatattttgattgcaactggacacgaaggaagtggacttactttgatgaaaggggtaaaagcgaggagcc

SEQ ID NO: 66364 - DNA, 2036 bp, Zea Mays
caaaattacgatattgtaaatacaatgatatttttggaatactgaaaactcatctttaatataaagtttttaaactatagctagcttgtgtataaatatcataatttgtaatgttgtattttaaaaatatattttaaaactacggtatttttgatctgtgatgatagttttgagaaaccaaacatacgtattaataagttgcaagaccgttgaggcgttgactcgtcactcggtcttttgtccatcaatccctctctttcccatcgccagatcacctggccggccttctcctgcaatggatgctaccatggcgttcacctccggaagccctacccccacgcgcttctactcttcagctttgctatcgttgcgcacccccaagagcctctctgtctacggcccatggcgatggcgtgggcgtgggcgccccctcctcgcgctccggcatcggtcccaggcccaggccgccgcagcggcggccggggcggccgaagcctcccaccacgatgttgtagttgtgggcgctggaatcgtagggcttgccatcgcgcgccacctcctcctccacacttcgctctccgttgccatcgccgacgctgccgtcccctgctctggtgccacaggcgcagggcagggatacatatggatgtcgcaccggacgccggggactgacacgtgggagctggcgctgcggagtaagcaactttgggaggagctggcgaccgaggttgacggccagggaggcggcggagcacgggagaaattggggtggatgaggacaggaagcttgctagttgggagaagttcggaagagctgggcacattggacgaaaggaccaaggctctgtctcaggcaggcatacatgcggaattcttgtcagcatcttcattacatgcattagaaccggcactcagtgtagggaaagatggcggtgctatgttcttgccgcaagactgtcagattgatgcattccaggctgtctctttgattgagaagaccaataactcgtattcctcagaaggaaggtatagggagttctataatgatcctgccatgtcattaataagatcggacgttactggaaaagttgaagctgtccaaacttccagaaacatattgtatggcagaaaagcttttgtaattgcttctggtgcctggactcgatccttattgcatagtttcgtagaaccagctttgacgttggatattcctgtcaagccacgaaagggtcatcttcttgtgttggagaaattcgacaaggttaagttaaatcatgccctaatggaggttggatatgttgaccatcagattacaaagtcaaatagcacacacatagcttcagaatctagtgaagatgagcttggtgctttatcagtatcaatgactgcaaccttagatacaaagggaaatttagttctaggaagcagccgggagttcaaaggtttttcgagggaggttgatagatccgttgttcagtgtatatgggaacgtgcaggagagttttttcctgcaatgaagaatgtttcttttgatattgatcagaatactcaaatcagaatagggcatcgtccatacatgcctgatggaaagccagttattgactttattcctaatctctcaaatattttgattgcaactggacacgaaggaagtggacttactttggcactaggcactgctgaaatggtcactgatatgattcttgggaatcctggaaaagtgagctactcacctttttccatcaaacgcagattttcagtttttgactgaggctgctgaaattctctgttgagtaacgtctagaggcgttcctccagtccgatccacttttcatcatcaattcaaactctgggtaactgatgcgaccatcctgttcaatatatttataaaatgtcaggtatgctaaataagaatgtgttgtgcaatccaggacaatgaataaaaacgtagatggaaccctccaaccagtcttttagatttatactgaccctcgccatagtttgttatcttttattttgtcaaaaactagtttgta

SEQ ID NO: 66365 - DNA, 1814 bp, Zea Mays
caaaattacgatattgtaaatacaatgatatttttggaatactgaaaactcatctttaatataaagtttttaaactatagctagcttgtgtataaatatcataatttgtaatgttgtattttaaaaatatattttaaaactacggtatttttgatctgtgatgatagttttgagaaaccaaacatacgtattaataagttgcaagaccgttgaggcgttgactcgtcactcggtcttttgtccatcaatccctctctttcccatcgccagatcacctggccggccttctcctgcaatggatgctaccatggcgttcacctccggaagccctacccccacgcgcttctactcttcagctttgctatcgttgcgcacccccaagagcctctctgtctacggcccatggcgatggcgtgggcgtgggcgccccctcctcgcgctccggcatcggtcccaggcccaggccgccgcagcggcggccggggcggccgaagcctcccaccacgatgttgtagttgtgggcgctggaatcgtagggcttgccatcgcgcgccacctcctcctccacacttcgctctccgttgccatcgccgacgctgccgtcccctgctctggtgccacaggcgcagggcagggatacatatggatgtcgcaccggacgccggggactgacacgtgggagctggcgctgcggagtaagcaactttgggaggagctggcgaccgaggttgacggccagggaggcggcggagcacgggagaaattggggtggatgaggacaggaagcttgctagttgggagaagttcggaagagctgggcacattggacgaaaggaccaaggctctgtctcaggcaggcatacatgcggaattcttgtcagcatcttcattacatgcattagaaccggcactcagtgtagggaaagatggcggtgctatgttcttgccgcaagactgtcagattgatgcattccaggctgtctctttgattgagaagaccaataactcgtattcctcagaaggaaggtatagggagttctataatgatcctgccatgtcattaataagatcggacgttactggaaaagttgaagctgtccaaacttccagaaacatattgtatggcagaaaagcttttgtaattgcttctggtgcctggactcgatccttattgcatagtttcgtagaaccagctttgacgttggatattcctgtcaagccacgaaagggtcatcttcttgtgttggagaaattcgacaaggttaagttaaatcatgccctaatggaggttggatatgttgaccatcagattacaaagtcaaatagcacacacatagcttcagaatctagtgaagatgagcttggtgctttatcagtatcaatgactgcaaccttagatacaaagggaaatttagttctaggaagcagccgggagttcaaaggtttttcgagggaggttgatagatccgttgttcagtgtatatgggaacgtgcaggagagttttttcctgcaatgaagaatgtttcttttgatattgatcagaatactcaaatcagaatagggcatcgtccatacatgcctgatggaaagccagttattgactttattcctaatctctcaaatattttgattgcaactggacacgaaggaagtggacttactttggcactaggcactgctgaaatggtcactgatatgattcttgggaatcctggaaaagtgagctactcacctttttccatcaaacgcagattttcaggctttagttcaccatcacttagagtctccattaactcggacatttcaataaaac

SEQ ID NO: 66366 - DNA, 2510 bp, Zea Mays
gtctttcgccgcggccaactcctcgtgacgtcgccccggacggccccgatccaccaggtcccatgttggacggcggatctcgtccccctgcgctctccgcacacccaccgttttccttttccgccccaggcaccctgcacgatcgcgccttgccttccattttcctgccatcgtcggaagtcggaacggcggccgcccagaaaaccccaactcccgcggcgcaaaaccctagtagaggttgcgcgggacactgctgtggttccggtgatggagggggaaggcgacgccagtggtagcgatgaggtggtgcagctggaggacgcggtggagctgctggtggagcacctcgtggtgccggtgctgccgcgcggccaggtagaccgggaggaggccctgtcgcctgaggctcaggaggctgtggcgcgtcaggtccacgcgacggttctcctgtacaactactaccaccggaagcagttcccgcagctcgagtttgccaaccccgaacggttctccatgtctgcctccctcagcgtcaccaacaaaaatctgctcatgtacctgaaccaggcgcagaaccgcctcggcaacggagtgggggccgggctctcggtcactgacaaggcaatcgtcgacgcctgcgacatcgctgaggcgctcgaccccacgaaggactcccccgagatgaccacgtggccgatctccaaggtcgctgttctgcttctcaatcggacaaagaaagagtgcgtgctcgagcatggctccgaaaccaagggcgtctggtcgatgtttgagaaagagatcacgacggcattgggtggttcgctcagcagtgacatgccagtgcaggggtcgagtaataaatccgtgggacttccttcggaaccgtacgtgcttcagcagattgcatattcagaggtggaactcaaaacaggtatgaagcatacaaatttgcgctttatcgaagaacatcgggtgtactcactgagtaagaaggggacagctaccatgttgttccttctgcactatgatcagactgtcgatagcaagcttaaggaaatgcctttagatgccctgatcgaaaggatgagtggtcctatatttcaaagtggtccgtacccaacaacgacatctgtagttgaatactatcatttactgccatataaggaggtcttgttaaacgtcctgaacagggactggcctttgtgttcttcactgagcgtgccaaaggagcaggtatttcaaaatgggaaatcttcatttccctctgaaatagaagaaagtttgaaggaacaagaagctaatagtaatagcaagactaaaatgaaaaaaatgccaacagacgtttctactccaaagaaaaataagcaggtagtaaaagcagttcgtgacagtggcaccaacgaaagcagcaccagcaaaaacaaaaaaggcagcaacacgaactgcaaaagaacatctgaagcctgcaagactaaagttgctacctacgcagagcatggggatggtcagagccctacaaaagacttacaagccagtgcccaaatggacaagagcagaacagagaagaacactaaaagtagaaatgtgccccaaaatatctttctgacaccagatgttggtcctgtaaataatgaccatgccttgaaaagccaaaaggagaaagtcactgataagtctggtggcatcacaggtaacatgaatgttcagaagtatgcgactctgcaattactttggaagatgcgagatgatacactccatgagcattttatgcttggagatcgatgtgctgagtacgaaatggacattcaaacaatcttgacagaaacagagatgacacctaaagtaatgtcaatcctaaagaaatatgagaatagttggaaggcgatgaaagttgccaatccaattagctctggagaaggatgccaaaccatgaacataaagaggaagaaactgaaagaagccatacttctacgcaacagatgccaggaactggatgatatatgccgtgagagcaactggattcttccaagatacagagtacttccttcagttaccggtgatatgtaccaggccagtgtccaccttatgggcccagacttcaacttgagtgtagatggtgatgtgagggttacccctcacgaggcacgagactcagcagcgtccaacatgctgtctcagcttcagcagaaggcaagggaaggctaggagagcggcatgtctccacagaacccttaatgctgcatccttgtgggtatcgacttgcatgcgacaggaaagaacagccatcacagctcagaaatgaacatgctggttgtcaaaacaaaattctatctatctatttgaacttaagaattctgcagcctgctgtgctaagaaccgcggcccggagaggttcattggtctttaagctgttggctgcaggctatatacttgtcacccacccaccctgccgttgctgggagtccaaactcatagggatgaaagcggtaatccgaactgttagaacaaat

SEQ ID NO: 66367 - DNA, 2226 bp, Zea Mays
atcgtcggaagtcggaacggcggccgcccagaaaaccccaactcccgcggcgcaaaaccctagtagaggttgcgcgggacactgctgtggttccggtgatggagggggaaggcgacgccagtggtagcgatgaggtggtgcagctggaggacgcggtggagctgctggtggagcacctcgtggtgccggtgctgccgcgcggccaggtagaccgggaggaggccctgtcgcctgaggctcaggaggctgtggcgcgtcaggtccacgcgacggttctcctgtacaactactaccaccggaagcagttcccgcagctcgagtttgccaaccccgaacggttctccatgtctgcctccctcagcgtcaccaacaaaaatctgctcatgtacctgaaccaggcgcagaaccgcctcggcaacggagtgggggccgggctctcggtcactgacaaggcaatcgtcgacgcctgcgacatcgctgaggcgctcgaccccacgaaggactcccccgagatgaccacgtggccgatctccaaggtcgctgttctgcttctcaatcggacaaagaaagagtgcgtgctcgagcatggctccgaaaccaagggcgtctggtcgatgtttgagaaagagatcacgacggcattgggtggttcgctcagcagtgacatgccagtgcaggggtcgagtaataaatccgtgggacttccttcggaaccgtacgtgcttcagcagattgcatattcagaggtggaactcaaaacaggtatgaagcatacaaatttgcgctttatcgaagaacatcgggtgtactcactgagtaagaaggggacagctaccatgttgttccttctgcactatgatcagactgtcgatagcaagcttaaggaaatgcctttagatgccctgatcgaaaggatgagtggtcctatatttcaaagtggtccgtacccaacaacgacatctgtagttgaatactatcatttactgccatataaggaggtcttgttaaacgtcctgaacagggactggcctttgtgttcttcactgagcgtgccaaaggagcaggtatttcaaaatgggaaatcttcatttccctctgaaatagaagaaagtttgaaggaacaagaagctaatagtaatagcaagactaaaatgaaaaaaatgccaacagacgtttctactccaaagaaaaataagcaggtagtaaaagcagttcgtgacagtggcaccaacgaaagcagcaccagcaaaaacaaaaaaggcagcaacacgaactgcaaaagaacatctgaagcctgcaagactaaagttgctacctacgcagagcatggggatggtcagagccctacaaaagacttacaagccagtgcccaaatggacaagagcagaacagagaagaacactaaaagtagaaatgtgccccaaaatatctttctgacaccagatgttggtcctgtaaataatgaccatgccttgaaaagccaaaaggagaaagtcactgataagtctggtggcatcacaggtaacatgaatgttcagaagtatgcgactctgcaattactttggaagatgcgagatgatacactccatgagcattttatgcttggagatcgatgtgctgagtacgaaatggacattcaaacaatcttgacagagatgacacctaaagtaatgtcaatcctaaagaaatatgagaatagttggaaggcgatgaaagttgccaatccaattagctctggagaaggatgccaaaccatgaacataaagaggaagaaactgaaagaagccatacttctacgcaacagatgccaggaactggatgatatatgccgtgagagcaactggattcttccaagatacagagtacttccttcagttaccggtgatatgtaccaggccagtgtccaccttatgggcccagacttcaacttgagtgtagatggtgatgtgagggttacccctcacgaggcacgagactcagcagcgtccaacatgctgtctcagcttcagcagaaggcaagggaaggctaggagagcggcatgtctccacagaacccttaatgctgcatccttgtgggtatcgacttgcatgcgacaggaaagaacagccatcacagctcagaaatgaacatgctggttgtcaaaacaaaattctatctatctatttgaacttaagaattctgcaggtgtggttctgcgttttcttgttgggcaatctggattttca

SEQ ID NO: 66368 - DNA, 2288 bp, Zea Mays
aaaaggttcactccaggctctggcatccagcggccctgaccactgcaccagccagtcagccacccagcaccagcaggcagcgcagctaggtggggtggggccgtggggggcagccggtgggaacgcttgccccgaactcccgatacccacacccgtcttgactctggccgtctctattctccaagtcccaatccaccgacgaattccaaaccctgcctaggacctcggcgccactcgccgcacgtcgtccacgtccgcctccaccccaatccgatggggtatgaagagagcaaaaaacatctcctcagtctcagctaccctgagctgcaatgtttgtgcaaaaggtataaccttcctgctaagaagacccactctcagttagcaagttcgctcgcctcgctgcttgaggcatctccatctcctgctcctcctcctgtccaattagcaaatatgaaagaagcatccacatgcaatcatgctaacaacaaaagaggcccatacaatggcagggatgatggtaaaccacttgtgcatgcgaaacatcaaaaaggagatcagacacctgttgatgaaacatctaaaaaggggattgacactggtacgagtatacctccagtttctatgaaccatggaagaccagaatatcatggccatctatcttctgacctgagaactgctcataatttacagtcccaatgtgacgtgggaattgcaactaatacaacaaatctagaatttgttggcaaacatgattgttcacctgctaacgtaattgatcaaatctgtccccctattattcaaaaatatccttctaatggtaatggtcaggcttccactaagttcggccgtatgaatgataacacagaaaagggttgtcggctgtctgataagatatcagcaaatgctgctgctgttcaattttctgtaatgtcagatgagggcattgatcttcttgttgatctgaactccagttcagcaacatgggccaagaacttcatggcagaaatgcacattacccctccgtctgaacatgggaatttctctagcttcattagcagtttgtcaactaaggatgatcatagcactgcgtcaccatctggaaatatcattgttgacattcagaacaagggagctgagaacattgttccttccactgattcatcacttgcttcagatgttggtgagagctcccgttcagtgctctatccagttgatacgactactgtgaactcagtgtcatccacgtctacagtggctggtaccccagttgaactttctgggtatcaggagggtgctccagtggtatgttcttcatgtttaacagctgatgttcagaacaatgtgacatctgatatgccaggtgcttcggataacgaggggatgaggttagaagtggctccaatgaagactcctgtccaaaatcttcaggaaaacaaactggagatgaaaccctaatggaaaatgaacctgtgaaggcagtagcagtggaagaaaatataggtcgtgatgacagtttgtccatttcttatcaactagcctgtaagacagtagcagaactgcctgttacagatgcccagtcgcctgctagttcttctggtcattttattgctggaaattttgacaacacacatccaacatcttccgccacttcggacaatgctattaattctctgacttcaaagttcggtgcagagctagcacaaagtcatgattctacggacaaaaagggacagaatgatgctgaggaggttgaggagttagagagtatgacaccagcagcctatagtgaacctcccagaaatatacaacttagcttacgaagtgcttccgctaaggtcaagccttctacactaccaagacgatcagcgaggcttcttcctaagcatctgtttcctctggtctgcgacttgttggatgatgtcttctgtgttttatatcaatgcaatataactattggtgcaggagcaatgatatttccgattccacaagttaaccggaaatcttcatgggtgatagctgtgtcagattctttcgcgcatagtgatagctgtgtcagtttacccccattttcttgggcatcacttgtctcaaatgaagttcattggaggttcgcaatttatgttccgtggcatcacaccggcacctacctatttgctggttatctaattttacatacggaggacctggattgccacctgctaattgctatcgcggccttgaccaaaaaggtaagagcatcccttctcaatcagagccgtggaaccatagccaaatttgccaagtgttaa

SEQ ID NO: 66369 - DNA, 2463 bp, Zea Mays
gggaacgcttgccccgaactcccgatacccacacccgtcttgactctggccgtctctattctccaagtcccaatccaccgacgaattccaaaccctgcctaggacctcggcgccactcgccgcacgtcgtccacgtccgcctccaccccaatccgatggggtatgaagagagcaaaaaacatctcctcagtctcagctaccctgagctgcaatgtttgtgcaaaaggtataaccttcctgctaagaagacccactctcagttagcaagttcgctcgcctcgctgcttgaggcatctccatctcctgctcctcctcctgtccaattagcaaatatgaaagaagcatccacatgcaatcatgctaacaacaaaagaggcccatacaatggcagggatgatggtaaaccacttgtgcatgcgaaacatcaaaaaggagatcagacacctgttgatgaaacatctaaaaaggggattgacactggtacgagtatacctccagtttctatgaaccatggaagaccagaatatcatggccatctatcttctgacctgagaactgctcataatttacagtcccaatgtgacgtgggaattgcaactaatacaacaaatctagaatttgttggcaaacatgattgttcacctgctaacgtaattgatcaaatctgtccccctattattcaaaaatatccttctaatggtaatggtcaggcttccactaagttcggccgtatgaatgataacacagaaaagggttgtcggctgtctgataagatatcagcaaatgctgctgctgttcaattttctgtaatgtcagatgagggcattgatcttcttgttgatctgaactccagttcagcaacatgggccaagaacttcatggcagaaatgcacattacccctccgtctgaacatgggaatttctctagcttcattagcagtttgtcaactaaggatgatcatagcactgcgtcaccatctggaaatatcattgttgacattcagaacaagggagctgagaacattgttccttccactgattcatcacttgcttcagatgttggtgagagctcccgttcagtgctctatccagttgatacgactactgtgaactcagtgtcatccacgtctacagtggctggtgcttcggataacgaggtgcttcctccagaacctgctgatgtctttttgcagtctgaaagaatcactgcaccagctgtatgtggttcagtgcaaccaattggcaataaatgcacaatgagttctggggatgaggttagaagtggctccaatgaagactcctgtccaaaatcttcaggaaaacaaactggagatgaaaccctaatggaaaatgaacctgtgaaggcagtagcagtggaagaaaatataggtcgtgatgacagtttgtccatttcttatcaactagcctgtaagacagtagcagaactgcctgttacagatgcccagtcgcctgctagttcttctggtcattttattgctggaaattttgacaacacacatccaacatcttccgccacttcggacaatgctattaattctctgacttcaaagttcggtgcagagctagcacaaagtcatgattctacggacaaaaagggacagaatgatgctgaggaggttgaggagttagagagtatgacaccagcagcctatagtgaacctcccagaaatatacaacttagcttacgaagtgcttccgctaaggtcaagccttctacactaccaagacgatcagcgaggcttcttcctaagtaaccgccgtaaatgatacagatgagatccagtgtgagaatagcctcactaccggcttagtcagattccatgaggatgaagggatagaaaacagttaacaagcttagattctaattttgtatgttcttgttaattcttttttgttccagcaactgagtagaacttggtttctgaagcttaggctgcgtgactttttatctcctcgtgtccatcaacatctgttacagttacagtcgtactgtcgagctttcatacactattgtacaaacgactcctacttttacagcatctgtttcctctggtctgcgacttgttggatgatgtcttctgtgttttatatcaatgcaatataactattggtgcaggagcaatgatatttccgattccacaagttaaccggaaatcttcatgggtgatagctgtgtcagattctttcgcgcatagtgatagctgtgtcagtttacccccattttcttgggcatcacttgtctcaaatgaagttcattggaggttcgcaatttatgttccgtggcatcacaccggcacctacctatttgctggttatctaattttacatacggaggacctggattgccacctgctaattgctatcgcggccttgaccaaaaaggtaagagcatcccttctcaatcagagccgtggaaccatagccaaatttgccaagtgttaa

SEQ ID NO: 66370 - DNA, 2660 bp, Zea Mays
cttgccccgaactcccgatacccacacccgtcttgactctggccgtctctattctccaagtcccaatccaccgacgaattccaaaccctgcctaggacctcggcgccactcgccgcacgtcgtccacgtccgcctccaccccaatccgatggggtatgaagagagcaaaaaacatctcctcagtctcagctaccctgagctgcaatgtttgtgcaaaaggtataaccttcctgctaagaagacccactctcagttagcaagttcgctcgcctcgctgcttgaggcatctccatctcctgctcctcctcctgtccaattagcaaatatgaaagaagcatccacatgcaatcatgctaacaacaaaagaggcccatacaatggcagggatgatggtaaaccacttgtgcatgcgaaacatcaaaaaggagatcagacacctgttgatgaaacatctaaaaaggggattgacactggtacgagtatacctccagtttctatgaaccatggaagaccagaatatcatggccatctatcttctgacctgagaactgctcataatttacagtcccaatgtgacgtgggaattgcaactaatacaacaaatctagaatttgttggcaaacatgattgttcacctgctaacgtaattgatcaaatctgtccccctattattcaaaaatatccttctaatggtaatggtcaggcttccactaagttcggccgtatgaatgataacacagaaaagggttgtcggctgtctgataagatatcagcaaatgctgctgctgttcaattttctgtaatgtcagatgagggcattgatcttcttgttgatctgaactccagttcagcaacatgggccaagaacttcatggcagaaatgcacattacccctccgtctgaacatgggaatttctctagcttcattagcagtttgtcaactaaggatgatcatagcactgcgtcaccatctggaaatatcattgttgacattcagaacaagggagctgagaacattgttccttccactgattcatcacttgcttcagatgttggtgagagctcccgttcagtgctctatccagttgatacgactactgtgaactcagtgtcatccacgtctacagtggctggtaccccagttgaactttctgggtatcaggagggtgctccagtggtatgttcttcatgtttaacagctgatgttcagaacaatgtgacatctgatatgccaggtgcttcggataacgaggtgcttcctccagaacctgctgatgtctttttgcagtctgaaagaatcactgcaccagctgtatgtggttcagtgcaaccaattggcaataaatgcacaatgagttctggggatgaggttagaagtggctccaatgaagactcctgtccaaaatcttcaggaaaacaaactggagatgaaaccctaatggaaaatgaacctgtgaaggcagtagcagtggaagaaaatataggtcgtgatgacagtttgtccatttcttatcaactagcctgtaagacagtagcagaactgcctgttacagatgcccagtcgcctgctagttcttctggtcattttattgctggaaattttgacaacacacatccaacatcttccgccacttcgtaaaaggggaagagaatgaaagctgctaaacgtattattttggtcaatggcaaagtctacgtgtctcacttttagctccgcaactgcaaacctgcttatttggacaatgctattaattctctgacttcaaagttcggtgcagagctagcacaaagtcatgattctacggacaaaaagggacagaatgatgctgaggaggttgaggagttagagagtatgacaccagcagcctatagtgaacctcccagaaatatacaacttagcttacgaagtgcttccgctaaggtcaagccttctacactaccaagacgatcagcgaggcttcttcctaagtaaccgccgtaaatgatacagatgagatccagtgtgagaatagcctcactaccggcttagtcagattccatgaggatgaagggatagaaaacagttaacaagcttagattctaattttgtatgttcttgttaattcttttttgttccagcaactgagtagaacttggtttctgaagcttaggctgcgtgactttttatctcctcgtgtccatcaacatctgttacagttacagtcgtactgtcgagctttcatacactattgtacaaacgactcctacttttacagcatctgtttcctctggtctgcgacttgttggatgatgtcttctgtgttttatatcaatgcaatataactattggtgcaggagcaatgatatttccgattccacaagttaaccggaaatcttcatgggtgatagctgtgtcagattctttcgcgcatagtgatagctgtgtcagtttacccccattttcttgggcatcacttgtctcaaatgaagttcattggaggttcgcaatttatgttccgtggcatcacaccggcacctacctatttgctggttatctaattttacatacggaggacctggattgccacctgctaattgctatcgcggccttgaccaaaaaggtaagagcatcccttctcaatcagagccgtggaaccatagccaaatttgccaagtgttaa

SEQ ID NO: 66371 - DNA, 2517 bp, Zea Mays
gtctctattctccaagtcccaatccaccgacgaattccaaaccctgcctaggacctcggcgccactcgccgcacgtcgtccacgtccgcctccaccccaatccgatggggtatgaagagagcaaaaaacatctcctcagtctcagctaccctgagctgcaatgtttgtgcaaaaggtataaccttcctgctaagaagacccactctcagttagcaagttcgctcgcctcgctgcttgaggcatctccatctcctgctcctcctcctgtccaattagcaaatatgaaagaagcatccacatgcaatcatgctaacaacaaaagaggcccatacaatggcagggatgatggtaaaccacttgtgcatgcgaaacatcaaaaaggagatcagacacctgttgatgaaacatctaaaaagcaggggattgacactggtacgagtatacctccagtttctatgaaccatggaagaccagaatatcatggccatctatcttctgacctgagaactgctcataatttacagtcccaatgtgacgtgggaattgcaactaatacaacaaatctagaatttgttggcaaacatgattgttcacctgctaacgtaattgatcaaatctgtccccctattattcaaaaatatccttctaatggtaatggtcaggcttccactaagttcggccgtatgaatgataacacagaaaagggttgtcggctgtctgataagatatcagcaaatgctgctgctgttcaattttctgtaatgtcagatgagggcattgatcttcttgttgatctgaactccagttcagcaacatgggccaagaacttcatggcagaaatgcacattacccctccgtctgaacatgggaatttctctagcttcattagcagtttgtcaactaaggatgatcatagcactgcgtcaccatctggaaatatcattgttgacattcagaacaagggagctgagaacattgttccttccactgattcatcacttgcttcagatgttggtgagagctcccgttcagtgctctatccagttgatacgactactgtgaactcagtgtcatccacgtctacagtggctggtaccccagttgaactttctgggtatcaggagggtgctccagtggtatgttcttcatgtttaacagctgatgttcagaacaatgtgacatctgatatgccaggtgcttcggataacgaggtgcttcctccagaacctgctgatgtctttttgcagtctgaaagaatcactgcaccagctgtatgtggttcagtgcaaccaattggcaataaatgcacaatgagttctggggatgaggttagaagtggctccaatgaagactcctgtccaaaatcttcaggaaaacaaactggagatgaaaccctaatggaaaatgaacctgtgaaggcagtagcagtggaagaaaatataggtcgtgatgacagtttgtccatttcttatcaactagcctgtaagacagtagcagaactgcctgttacagatgcccagtcgcctgctagttcttctggtcattttattgctggaaattttgacaacacacatccaacatcttccgccacttcggacaatgctattaattctctgacttcaaagttcggtgcagagctagcacaaagtcatgattctacggacaaaaagggacagaatgatgctgaggaggttgaggagttagagagtatgacaccagcagcctatagtgaacctcccagaaatatacaacttagcttacgaagtgcttccgctaaggtcaagccttctacactaccaagacgatcagcgaggcttcttcctaagtaaccgccgtaaatgatacagatgagatccagtgtgagaatagcctcactaccggcttagtcagattccatgaggatgaagggatagaaaacagttaacaagcttagattctaattttgtatgttcttgttaattcttttttgttccagcaactgagtagaacttggtttctgaagcttaggctgcgtgactttttatctcctcgtgtccatcaacatctgttacagttacagtcgtactgtcgagctttcatacactattgtacaaacgactcctacttttacagcatctgtttcctctggtctgcgacttgttggatgatgtcttctgtgttttatatcaatgcaatataactattggtgcaggagcaatgatatttccgattccacaagttaaccggaaatcttcatgggtgatagctgtgtcagattctttcgcgcatagtgatagctgtgtcagtttacccccattttcttgggcatcacttgtctcaaatgaagttcattggaggttcgcaatttatgttccgtggcatcacaccggcacctacctatttgctggttatctaattttacatacggaggacctggattgccacctgctaattgctatcgcggccttgaccaaaaaggtaagagcatcccttctcaatcagagccgtggaaccatagccaaatttgccaagtgttaa

SEQ ID NO: 66372 - DNA, 2326 bp, Zea Mays
ctattctccaagtcccaatccaccgacgaattccaaaccctgcctaggacctcggcgccactcgccgcacgtcgtccacgtccgcctccaccccaatccgatggggtatgaagagagcaaaaaacatctcctcagtctcagctaccctgagctgcaatgtttgtgcaaaaggtataaccttcctgctaagaagacccactctcagttagcaagttcgctcgcctcgctgcttgaggcatctccatctcctgctcctcctcctgtccaattagcaaatatgaaagaagcatccacatgcaatcatgctaacaacaaaagaggcccatacaatggcagggatgatggtaaaccacttgtgcatgcgaaacatcaaaaaggagatcagacacctgttgatgaaacatctaaaaaggggattgacactggtacgagtatacctccagtttctatgaaccatggaagaccagaatatcatggccatctatcttctgacctgagaactgctcataatttacagtcccaatgtgacgtgggaattgcaactaatacaacaaatctagaatttgttggcaaacatgattgttcacctgctaacgtaattgatcaaatctgtccccctattattcaaaaatatccttctaatggtaatggtcaggcttccactaagttcggccgtatgaatgataacacagaaaagggttgtcggctgtctgataagatatcagcaaatgctgctgctgttcaattttctgtaatgtcagatgagggcattgatcttcttgttgatctgaactccagttcagcaacatgggccaagaacttcatggcagaaatgcacattacccctccgtctgaacatgggaatttctctagcttcattagcagtttgtcaactaaggatgatcatagcactgcgtcaccatctggaaatatcattgttgacattcagaacaagggagctgagaacattgttccttccactgattcatcacttgcttcagatgttggtgagagctcccgttcagtgctctatccagttgatacgactactgtgaactcagtgtcatccacgtctacagtggctggtaccccagttgaactttctgggtatcaggagggtgctccagtggtatgttcttcatgtttaacagctgatgttcagaacaatgtgacatctgatatgccaggtgcttcggataacgaggtgcttcctccagaacctgctgatgtctttttgcagtctgaaagaatcactgcaccagctgtatgtggttcagtgcaaccaattggcaataaatgcacaatgagttctggggatgaggttagaagtggctccaatgaagactcctgtccaaaatcttcaggaaaacaaactggagatgaaaccctaatggaaaatgaacctgtgaaggcagtagcagtggaagaaaatataggtcgtgatgacagtttgtccatttcttatcaactagcctgtaagacagtagcagaactgcctgttacagatgcccagtcgcctgctagttcttctggtcattttattgctggaaattttgacaacacacatccaacatcttccgccacttcgtaaaaggggaagagaatgaaagctgctaaacgtattattttggtcaatggcaaagtctacgtgtctcacttttagctccgcaactgcaaacctgcttatttggacaatgctattaattctctgacttcaaagttcggtgcagagctagcacaaagtcatgattctacggacaaaaagggacagaatgatgctgaggaggttgaggagttagagagtatgacaccagcagcctatagtgaacctcccagaaatatacaacttagcttacgaagtgcttccgctaaggtcaagccttctacactaccaagacgatcagcgaggcttcttcctaagcatctgtttcctctggtctgcgacttgttggatgatgtcttctgtgttttatatcaatgcaatataactattggtgcaggagcaatgatatttccgattccacaagttaaccggaaatcttcatgggtgatagctgtgtcagattctttcgcgcatagtgatagctgtgtcagtttacccccattttcttgggcatcacttgtctcaaatgaagttcattggaggttcgcaatttatgttccgtggcatcacaccggcacctacctatttgctggttatctaattttacatacggaggacctggattgccacctgctaattgctatcgcggccttgaccaaaaaggtaagagcatcccttctcaatcagagccgtggaaccatagccaaatttgccaagtgttaa

SEQ ID NO: 66373 - DNA, 2500 bp, Zea Mays
ctcccatttggatttgacgcctcggcactcccggcgtccacttcccttcacccctctcggcggagggcaggatggcgccgcgccaatccgatggggtatgaagagagcaaaaaacatctcctcagtctcagctaccctgagctgcaatgtttgtgcaaaaggtataaccttcctgctaagaagacccactctcagttagcaagttcgctcgcctcgctgcttgaggcatctccatctcctgctcctcctcctgtccaattagcaaatatgaaagaagcatccacatgcaatcatgctaacaacaaaagaggcccatacaatggcagggatgatggtaaaccacttgtgcatgcgaaacatcaaaaaggagatcagacacctgttgatgaaacatctaaaaaggggattgacactggtacgagtatacctccagtttctatgaaccatggaagaccagaatatcatggccatctatcttctgacctgagaactgctcataatttacagtcccaatgtgacgtgggaattgcaactaatacaacaaatctagaatttgttggcaaacatgattgttcacctgctaacgtaattgatcaaatctgtccccctattattcaaaaatatccttctaatggtaatggtcaggcttccactaagttcggccgtatgaatgataacacagaaaagggttgtcggctgtctgataagatatcagcaaatgctgctgctgttcaattttctgtaatgtcagatgagggcattgatcttcttgttgatctgaactccagttcagcaacatgggccaagaacttcatggcagaaatgcacattacccctccgtctgaacatgggaatttctctagcttcattagcagtttgtcaactaaggatgatcatagcactgcgtcaccatctggaaatatcattgttgacattcagaacaagggagctgagaacattgttccttccactgattcatcacttgcttcagatgttggtgagagctcccgttcagtgctctatccagttgatacgactactgtgaactcagtgtcatccacgtctacagtggctggtaccccagttgaactttctgggtatcaggagggtgctccagtggtatgttcttcatgtttaacagctgatgttcagaacaatgtgacatctgatatgccaggtgcttcggataacgaggtgcttcctccagaacctgctgatgtctttttgcagtctgaaagaatcactgcaccagctgtatgtggttcagtgcaaccaattggcaataaatgcacaatgagttctggggatgaggttagaagtggctccaatgaagactcctgtccaaaatcttcaggaaaacaaactggagatgaaaccctaatggaaaatgaacctgtgaaggcagtagcagtggaagaaaatataggtcgtgatgacagtttgtccatttcttatcaactagcctgtaagacagtagcagaactgcctgttacagatgcccagtcgcctgctagttcttctggtcattttattgctggaaattttgacaacacacatccaacatcttccgccacttcggacaatgctattaattctctgacttcaaagttcggtgcagagctagcacaaagtcatgattctacggacaaaaagggacagaatgatgctgaggaggttgaggagttagagagtatgacaccagcagcctatagtgaacctcccagaaatatacaacttagcttacgaagtgcttccgctaaggtcaagccttctacactaccaagacgatcagcgaggcttcttcctaagtaaccgccgtaaatgatacagatgagatccagtgtgagaatagcctcactaccggcttagtcagattccatgaggatgaagggatagaaaacagttaacaagcttagattctaattttgtatgttcttgttaattcttttttgttccagcaactgagtagaacttggtttctgaagcttaggctgcgtgactttttatctcctcgtgtccatcaacatctgttacagttacagtcgtactgtcgagctttcatacactattgtacaaacgactcctacttttacagcatctgtttcctctggtctgcgacttgttggatgatgtcttctgtgttttatatcaatgcaatataactattggtgcaggagcaatgatatttccgattccacaagttaaccggaaatcttcatgggtgatagctgtgtcagattctttcgcgcatagtgatagctgtgtcagtttacccccattttcttgggcatcacttgtctcaaatgaagttcattggaggttcgcaatttatgttccgtggcatcacaccggcacctacctatttgctggttatctaattttacatacggaggacctggattgccacctgctaattgctatcgcggccttgaccaaaaaggtaagagcatcccttctcaatcagagccgtggaaccatagccaaatttgccaagtgttaa

SEQ ID NO: 66374 - DNA, 2462 bp, Zea Mays
ctctctcgctctctcccgagttccattgcaaaacctcgggcgatttgttagtgttggcataaggagaaggtctagctctttccggtttggaccatgcaacatccaatccgatggggtatgaagagagcaaaaaacatctcctcagtctcagctaccctgagctgcaatgtttgtgcaaaaggtataaccttcctgctaagaagacccactctcagttagcaagttcgctcgcctcgctgcttgaggcatctccatctcctgctcctcctcctgtccaattagcaaatatgaaagaagcatccacatgcaatcatgctaacaacaaaagaggcccatacaatggcagggatgatggtaaaccacttgtgcatgcgaaacatcaaaaaggagatcagacacctgttgatgaaacatctaaaaaggggattgacactggtacgagtatacctccagtttctatgaaccatggaagaccagaatatcatggccatctatcttctgacctgagaactgctcataatttacagtcccaatgtgacgtgggaattgcaactaatacaacaaatctagaatttgttggcaaacatgattgttcacctgctaacgtaattgatcaaatctgtccccctattattcaaaaatatccttctaatggtaatggtcaggcttccactaagttcggccgtatgaatgataacacagaaaagggttgtcggctgtctgataagatatcagcaaatgctgctgctgttcaattttctgtaatgtcagatgagggcattgatcttcttgttgatctgaactccagttcagcaacatgggccaagaacttcatggcagaaatgcacattacccctccgtctgaacatgggaatttctctagcttcattagcagtttgtcaactaaggatgatcatagcactgcgtcaccatctggaaatatcattgttgacattcagaacaagggagctgagaacattgttccttccactgattcatcacttgcttcagatgttggtgagagctcccgttcagtgctctatccagttgatacgactactgtgaactcagtgtcatccacgtctacagtggctggtaccccagttgaactttctgggtatcaggagggtgctccagtggtgcttcggataacgaggtgcttcctccagaacctgctgatgtctttttgcagtctgaaagaatcactgcaccagctgtatgtggttcagtgcaaccaattggcaataaatgcacaatgagttctggggatgaggttagaagtggctccaatgaagactcctgtccaaaatcttcaggaaaacaaactggagatgaaaccctaatggaaaatgaacctgtgaaggcagtagcagtggaagaaaatataggtcgtgatgacagtttgtccatttcttatcaactagcctgtaagacagtagcagaactgcctgttacagatgcccagtcgcctgctagttcttctggtcattttattgctggaaattttgacaacacacatccaacatcttccgccacttcggacaatgctattaattctctgacttcaaagttcggtgcagagctagcacaaagtcatgattctacggacaaaaagggacagaatgatgctgaggaggttgaggagttagagagtatgacaccagcagcctatagtgaacctcccagaaatatacaacttagcttacgaagtgcttccgctaaggtcaagccttctacactaccaagacgatcagcgaggcttcttcctaagtaaccgccgtaaatgatacagatgagatccagtgtgagaatagcctcactaccggcttagtcagattccatgaggatgaagggatagaaaacagttaacaagcttagattctaattttgtatgttcttgttaattcttttttgttccagcaactgagtagaacttggtttctgaagcttaggctgcgtgactttttatctcctcgtgtccatcaacatctgttacagttacagtcgtactgtcgagctttcatacactattgtacaaacgactcctacttttacagcatctgtttcctctggtctgcgacttgttggatgatgtcttctgtgttttatatcaatgcaatataactattggtgcaggagcaatgatatttccgattccacaagttaaccggaaatcttcatgggtgatagctgtgtcagattctttcgcgcatagtgatagctgtgtcagtttacccccattttcttgggcatcacttgtctcaaatgaagttcattggaggttcgcaatttatgttccgtggcatcacaccggcacctacctatttgctggttatctaattttacatacggaggacctggattgccacctgctaattgctatcgcggccttgaccaaaaaggtaagagcatcccttctcaatcagagccgtggaaccatagccaaatttgccaagtgttaa

SEQ ID NO: 66375 - DNA, 2177 bp, Zea Mays
cataaggagaaggtctagctctttccggtttggaccatgcaacatccaatccgatggggtatgaagagagcaaaaaacatctcctcagtctcagctaccctgagctgcaatgtttgtgcaaaaggtataaccttcctgctaagaagacccactctcagttagcaagttcgctcgcctcgctgcttgaggcatctccatctcctgctcctcctcctgtccaattagcaaatatgaaagaagcatccacatgcaatcatgctaacaacaaaagaggcccatacaatggcagggatgatggtaaaccacttgtgcatgcgaaacatcaaaaaggagatcagacacctgttgatgaaacatctaaaaaggggattgacactggtacgagtatacctccagtttctatgaaccatggaagaccagaatatcatggccatctatcttctgacctgagaactgctcataatttacagtcccaatgtgacgtgggaattgcaactaatacaacaaatctagaatttgttggcaaacatgattgttcacctgctaacgtaattgatcaaatctgtccccctattattcaaaaatatccttctaatggtaatggtcaggcttccactaagttcggccgtatgaatgataacacagaaaagggttgtcggctgtctgataagatatcagcaaatgctgctgctgttcaattttctgtaatgtcagatgagggcattgatcttcttgttgatctgaactccagttcagcaacatgggccaagaacttcatggcagaaatgcacattacccctccgtctgaacatgggaatttctctagcttcattagcagtttgtcaactaaggatgatcatagcactgcgtcaccatctggaaatatcattgttgacattcagaacaagggagctgagaacattgttccttccactgattcatcacttgcttcagatgttggtgagagctcccgttcagtgctctatccagttgatacgactactgtgaactcagtgtcatccacgtctacagtggctggtaccccagttgaactttctgggtatcaggagggtgctccagtggtatgttcttcatgtttaacagctgatgttcagaacaatgtgacatctgatatgccaggtgcttcggataacgaggtgcttcctccagaacctgctgatgtctttttgcagtctgaaagaatcactgcaccagctgtatgtggttcagtgcaaccaattggcaataaatgcacaatgagttctggggatgaggttagaagtggctccaatgaagactcctgtccaaaatcttcaggaaaacaaactggagatgaaaccctaatggaaaatgaacctgtgaaggcagtagcagtggaagaaaatataggtcgtgatgacagtttgtccatttcttatcaactagcctgtaagacagtagcagaactgcctgttacagatgcccagtcgcctgctagttcttctggtcattttattgctggaaattttgacaacacacatccaacatcttccgccacttcggacaatgctattaattctctgacttcaaagttcggtgcagagctagcacaaagtcatgattctacggacaaaaagggacagaatgatgctgaggaggttgaggagttagagagtatgacaccagcagcctatagtgaacctcccagaaatatacaacttagcttacgaagtgcttccgctaaggtcaagccttctacactaccaagacgatcagcgaggcttcttcctaagcatctgtttcctctggtctgcgacttgttggatgatgtcttctgtgttttatatcaatgcaatataactattggtgcaggagcaatgatatttccgattccacaagttaaccggaaatcttcatgggtgatagctgtgtcagattctttcgcgcatagtgatagctgtgtcagtttacccccattttcttgggcatcacttgtctcaaatgaagttcattggaggttcgcaatttatgttccgtggcatcacaccggcacctacctatttgctggttatctaattttacatacggaggacctggattgccacctgctaattgctatcgcggccttgaccaaaaaggtaagagcatcccttctcaatcagagccgtggaaccatagccaaatttgccaagtgttaa

SEQ ID NO: 66376 - DNA, 2558 bp, Zea Mays
agaaggtctagctctttccggtttggaccatgcaacatccaatccgatggggtatgaagagagcaaaaaacatctcctcagtctcagctaccctgagctgcaatgtttgtgcaaaaggtataaccttcctgctaagaagacccactctcagttagcaagttcgctcgcctcgctgcttgaggcatctccatctcctgctcctcctcctgtccaattagcaaatatgaaagaagcatccacatgcaatcatgctaacaacaaaagaggcccatacaatggcagggatgatggtaaaccacttgtgcatgcgaaacatcaaaaaggagatcagacacctgttgatgaaacatctaaaaaggggattgacactggtacgagtatacctccagtttctatgaaccatggaagaccagaatatcatggccatctatcttctgacctgagaactgctcataatttacagtcccaatgtgacgtgggaattgcaactaatacaacaaatctagaatttgttggcaaacatgattgttcacctgctaacgtaattgatcaaatctgtccccctattattcaaaaatatccttctaatggtaatggtcaggcttccactaagttcggccgtatgaatgataacacagaaaagggttgtcggctgtctgataagatatcagcaaatgctgctgctgttcaattttctgtaatgtcagatgagggcattgatcttcttgttgatctgaactccagttcagcaacatgggccaagaacttcatggcagaaatgcacattacccctccgtctgaacatgggaatttctctagcttcattagcagtttgtcaactaaggatgatcatagcactgcgtcaccatctggaaatatcattgttgacattcagaacaagggagctgagaacattgttccttccactgattcatcacttgcttcagatgttggtgagagctcccgttcagtgctctatccagttgatacgactactgtgaactcagtgtcatccacgtctacagtggctggtaccccagttgaactttctgggtatcaggagggtgctccagtggtatgttcttcatgtttaacagctgatgttcagaacaatgtgacatctgatatgccaggtgcttcggataacgaggtgcttcctccagaacctgctgatgtctttttgcagtctgaaagaatcactgcaccagctgtatgtggttcagtgcaaccaattggcaataaatgcacaatgagttctggggatgaggttagaagtggctccaatgaagactcctgtccaaaatcttcaggaaaacaaactggagatgaaaccctaatggaaaatgaacctgtgaaggcagtagcagtggaagaaaatataggtcgtgatgacagtttgtccatttcttatcaactagcctgtaagacagtagcagaactgcctgttacagatgcccagtcgcctgctagttcttctggtcattttattgctggaaattttgacaacacacatccaacatcttccgccacttcgtaaaaggggaagagaatgaaagctgctaaacgtattattttggtcaatggcaaagtctacgtgtctcacttttagctccgcaactgcaaacctgcttatttggacaatgctattaattctctgacttcaaagttcggtgcagagctagcacaaagtcatgattctacggacaaaaagggacagaatgatgctgaggaggttgaggagttagagagtatgacaccagcagcctatagtgaacctcccagaaatatacaacttagcttacgaagtgcttccgctaaggtcaagccttctacactaccaagacgatcagcgaggcttcttcctaagtaaccgccgtaaatgatacagatgagatccagtgtgagaatagcctcactaccggcttagtcagattccatgaggatgaagggatagaaaacagttaacaagcttagattctaattttgtatgttcttgttaattcttttttgttccagcaactgagtagaacttggtttctgaagcttaggctgcgtgactttttatctcctcgtgtccatcaacatctgttacagttacagtcgtactgtcgagctttcatacactattgtacaaacgactcctacttttacagcatctgtttcctctggtctgcgacttgttggatgatgtcttctgtgttttatatcaatgcaatataactattggtgcaggagcaatgatatttccgattccacaagttaaccggaaatcttcatgggtgatagctgtgtcagattctttcgcgcatagtgatagctgtgtcagtttacccccattttcttgggcatcacttgtctcaaatgaagttcattggaggttcgcaatttatgttccgtggcatcacaccggcacctacctatttgctggttatctaattttacatacggaggacctggattgccacctgctaattgctatcgcggccttgaccaaaaaggtaagagcatcccttctcaatcagagccgtggaaccatagccaaatttgccaagtgttaa

SEQ ID NO: 66377 - DNA, 2450 bp, Zea Mays
agctctttccggtttggaccatgcaacatccaatccgatggggtatgaagagagcaaaaaacatctcctcagtctcagctaccctgagctgcaatgtttgtgcaaaaggtataaccttcctgctaagaagacccactctcagttagcaagttcgctcgcctcgctgcttgaggcatctccatctcctgctcctcctcctgtccaattagcaaatatgaaagaagcatccacatgcaatcatgctaacaacaaaagaggcccatacaatggcagggatgatggtaaaccacttgtgcatgcgaaacatcaaaaaggagatcagacacctgttgatgaaacatctaaaaagcaggggattgacactggtacgagtatacctccagtttctatgaaccatggaagaccagaatatcatggccatctatcttctgacctgagaactgctcataatttacagtcccaatgtgacgtgggaattgcaactaatacaacaaatctagaatttgttggcaaacatgattgttcacctgctaacgtaattgatcaaatctgtccccctattattcaaaaatatccttctaatggtaatggtcaggcttccactaagttcggccgtatgaatgataacacagaaaagggttgtcggctgtctgataagatatcagcaaatgctgctgctgttcaattttctgtaatgtcagatgagggcattgatcttcttgttgatctgaactccagttcagcaacatgggccaagaacttcatggcagaaatgcacattacccctccgtctgaacatgggaatttctctagcttcattagcagtttgtcaactaaggatgatcatagcactgcgtcaccatctggaaatatcattgttgacattcagaacaagggagctgagaacattgttccttccactgattcatcacttgcttcagatgttggtgagagctcccgttcagtgctctatccagttgatacgactactgtgaactcagtgtcatccacgtctacagtggctggtaccccagttgaactttctgggtatcaggagggtgctccagtggtatgttcttcatgtttaacagctgatgttcagaacaatgtgacatctgatatgccaggtgcttcggataacgaggtgcttcctccagaacctgctgatgtctttttgcagtctgaaagaatcactgcaccagctgtatgtggttcagtgcaaccaattggcaataaatgcacaatgagttctggggatgaggttagaagtggctccaatgaagactcctgtccaaaatcttcaggaaaacaaactggagatgaaaccctaatggaaaatgaacctgtgaaggcagtagcagtggaagaaaatataggtcgtgatgacagtttgtccatttcttatcaactagcctgtaagacagtagcagaactgcctgttacagatgcccagtcgcctgctagttcttctggtcattttattgctggaaattttgacaacacacatccaacatcttccgccacttcggacaatgctattaattctctgacttcaaagttcggtgcagagctagcacaaagtcatgattctacggacaaaaagggacagaatgatgctgaggaggttgaggagttagagagtatgacaccagcagcctatagtgaacctcccagaaatatacaacttagcttacgaagtgcttccgctaaggtcaagccttctacactaccaagacgatcagcgaggcttcttcctaagtaaccgccgtaaatgatacagatgagatccagtgtgagaatagcctcactaccggcttagtcagattccatgaggatgaagggatagaaaacagttaacaagcttagattctaattttgtatgttcttgttaattcttttttgttccagcaactgagtagaacttggtttctgaagcttaggctgcgtgactttttatctcctcgtgtccatcaacatctgttacagttacagtcgtactgtcgagctttcatacactattgtacaaacgactcctacttttacagcatctgtttcctctggtctgcgacttgttggatgatgtcttctgtgttttatatcaatgcaatataactattggtgcaggagcaatgatatttccgattccacaagttaaccggaaatcttcatgggtgatagctgtgtcagattctttcgcgcatagtgatagctgtgtcagtttacccccattttcttgggcatcacttgtctcaaatgaagttcattggaggttcgcaatttatgttccgtggcatcacaccggcacctacctatttgctggttatctaattttacatacggaggacctggattgccacctgctaattgctatcgcggccttgaccaaaaaggtaagagcatcccttctcaatcagagccgtggaaccatagccaaatttgccaagtgttaa

SEQ ID NO: 66378 - DNA, 1550 bp, Zea Mays
ctctttccggtttggaccatgcaacatccaatccgatggggtatgaagagagcaaaaaacatctcctcagtctcagctaccctgagctgcaatgtttgtgcaaaaggtataaccttcctgctaagaagacccactctcagttagcaagttcgctcgcctcgctgcttgaggcatctccatctcctgctcctcctcctgtccaattagcaaatatgaaagaagcatccacatgcaatcatgctaacaacaaaagaggcccatacaatggcagggatgatggtaaaccacttgtgcatgcgaaacatcaaaaaggagatcagacacctgttgatgaaacatctaaaaaggggattgacactggtacgagtatacctccagtttctatgaaccatggaagaccagaatatcatggccatctatcttctgacctgagaactgctcataatttacagtcccaatgtgacgtgggaattgcaactaatacaacaaatctagaatttgttggcaaacatgattgttcacctgctaacgtaattgatcaaatctgtccccctattattcaaaaatatccttctaatggtaatggtcaggcttccactaagttcggccgtatgaatgataacacagaaaagggttgtcggctgtctgataagatatcagcaaatgctgctgctgttcaattttctgtaatgtcagatgagggcattgatcttcttgttgatctgaactccagttcagcaacatgggccaagaacttcatggcagaaatgcacattacccctccgtctgaacatgggaatttctctagcttcattagcagtttgtcaactaaggatgatcatagcactgcgtcaccatctggaaatatcattgttgacattcagaacaagggagctgagaacattgttccttccactgattcatcacttgcttcagatgttggtgagagctcccgttcagtgctctatccagttgatacgactactgtgaactcagtgtcatccacgtctacagtggctggtaccccagttgaactttctgggtatcaggagggtgctccagtggtatgttcttcatgtttaacagctgatgttcagaacaatgtgacatctgatatgccaggtgcttcggataacgaggtgcttcctccagaacctgctgatgtctttttgcagtctgaaagaatcactgcaccagctgtatgtggttcagtgcaaccaattggcaataaatgcacaatgagttctggggatgaggttagaagtggctccaatgaagactcctgtccaaaatcttcaggaaaacaaactggagatgaaaccctaatggaaaatgaacctgtgaaggcagtagcagtggaagaaaatataggtcgtgatgacagtttgtccatttcttatcaactagcctgtaagacagtagcagaactgcctgttacagatgcccagtcgcctgctagttcttctggtcattttattgctggaaattttgacaacacacatccaacatcttccgccacttcgatcttggtgtacccagagcagttcact

SEQ ID NO: 66379 - DNA, 2390 bp, Zea Mays
tctgatttcacagcagttgcctgatggctgccaatccgatggggtatgaagagagcaaaaaacatctcctcagtctcagctaccctgagctgcaatgtttgtgcaaaaggtataaccttcctgctaagaagacccactctcagttagcaagttcgctcgcctcgctgcttgaggcatctccatctcctgctcctcctcctgtccaattagcaaatatgaaagaagcatccacatgcaatcatgctaacaacaaaagaggcccatacaatggcagggatgatggtaaaccacttgtgcatgcgaaacatcaaaaaggagatcagacacctgttgatgaaacatctaaaaaggggattgacactggtacgagtatacctccagtttctatgaaccatggaagaccagaatatcatggccatctatcttctgacctgagaactgctcataatttacagtcccaatgtgacgtgggaattgcaactaatacaacaaatctagaatttgttggcaaacatgattgttcacctgctaacgtaattgatcaaatctgtccccctattattcaaaaatatccttctaatggtaatggtcaggcttccactaagttcggccgtatgaatgataacacagaaaagggttgtcggctgtctgataagatatcagcaaatgctgctgctgttcaattttctgtaatgtcagatgagggcattgatcttcttgttgatctgaactccagttcagcaacatgggccaagaacttcatggcagaaatgcacattacccctccgtctgaacatgggaatttctctagcttcattagcagtttgtcaactaaggatgatcatagcactgcgtcaccatctggaaatatcattgttgacattcagaacaagggagctgagaacattgttccttccactgattcatcacttgcttcagatgttggtgagagctcccgttcagtgctctatccagttgatacgactactgtgaactcagtgtcatccacgtctacagtggctggtaccccagttgaactttctgggtatcaggagggtgctccagtggtgcttcggataacgaggtgcttcctccagaacctgctgatgtctttttgcagtctgaaagaatcactgcaccagctgtatgtggttcagtgcaaccaattggcaataaatgcacaatgagttctggggatgaggttagaagtggctccaatgaagactcctgtccaaaatcttcaggaaaacaaactggagatgaaaccctaatggaaaatgaacctgtgaaggcagtagcagtggaagaaaatataggtcgtgatgacagtttgtccatttcttatcaactagcctgtaagacagtagcagaactgcctgttacagatgcccagtcgcctgctagttcttctggtcattttattgctggaaattttgacaacacacatccaacatcttccgccacttcggacaatgctattaattctctgacttcaaagttcggtgcagagctagcacaaagtcatgattctacggacaaaaagggacagaatgatgctgaggaggttgaggagttagagagtatgacaccagcagcctatagtgaacctcccagaaatatacaacttagcttacgaagtgcttccgctaaggtcaagccttctacactaccaagacgatcagcgaggcttcttcctaagtaaccgccgtaaatgatacagatgagatccagtgtgagaatagcctcactaccggcttagtcagattccatgaggatgaagggatagaaaacagttaacaagcttagattctaattttgtatgttcttgttaattcttttttgttccagcaactgagtagaacttggtttctgaagcttaggctgcgtgactttttatctcctcgtgtccatcaacatctgttacagttacagtcgtactgtcgagctttcatacactattgtacaaacgactcctacttttacagcatctgtttcctctggtctgcgacttgttggatgatgtcttctgtgttttatatcaatgcaatataactattggtgcaggagcaatgatatttccgattccacaagttaaccggaaatcttcatgggtgatagctgtgtcagattctttcgcgcatagtgatagctgtgtcagtttacccccattttcttgggcatcacttgtctcaaatgaagttcattggaggttcgcaatttatgttccgtggcatcacaccggcacctacctatttgctggttatctaattttacatacggaggacctggattgccacctgctaattgctatcgcggccttgaccaaaaaggtaagagcatcccttctcaatcagagccgtggaaccatagccaaatttgccaagtgttaa

SEQ ID NO: 66380 - DNA, 3962 bp, Zea Mays
ccgaaacccttgtggtcgtctcggcacccctctccgcttcgaaacccccgacgcgaaggaagctagggaaccctcgcgagtcgcgttgcctcgcccccgtccccttcagctggcccgccgccgcctcgaatccgccctggctcggagggcctcgcgcccccacggatcggattctcgaggttggtggatttggggctagggtttggggattgactacaatcgtggggttgtttggcgtaatttgaggagcaatgtacaacatggttaggaagtggacctgaggaggacggagggatggtggcgatggagggtaagggggacgcgtcagtgacgccggtgaggactagtgaccggctgcggcagcgtccaaaattgctaagaaactgcttcgcaagccagctgcacggccaccacctgccgattgtgttgcagcaaatttgcgccgttcaacgagaaagcgaaggatttctgtaaatctggagggctatgatacagatagttccagtatggaagatgacgatcttatgagacctagatatcgatcttcaaagagtaaggggggaaacaatgctgcacataatgaagtgtcagctagaccaaagcgccagaagttgtctaactccatacctcgtcgtgaaggtttacggcctagaagatctttgcgaggacaaagactgcatccataccatgaatctgaggatgaccaggaaagctctgatgaacaaggtgcagaagatcaaagagaaaatggcaatgagattgaagaggatgttggtgatgaggaggaggttgatggaggtgatgaagctgaaggagatggagatgacgaagatggtgaggaagagcaagaaggaaggaggagatatgatttaagggaacgttcagaggttcgtagaccatcccctcgtaaggaaggaaagcacagaccacaatctcctcgtagagtactagttcacggaattggtccaaagaacagcaagtatttaaaaaaaggtgggtcgcgcatgcataagcgccctcgtttctctttgccagatgattcagatgattcccttcttgtggatgagccggacgagggcccatccatgccatggatgcgcagtgggaggggaagtatgccatggttgatgggtgggttggacatgcatagtccagcagcatggggcctgagtgttggagcatctggttggggtcatcagggtgacacttctacttcactcatgcctggggtgcaaactgctggaccaagttctaagggaggagccgacattcaacctctgcaggttgacgagaatgtgagctttaaagatataggtggactttcggagtacattgatgctctaaaggaaatggttttctttccattattgtatccagatttttttgcaaactatcacatcactcctcccagaggtgttctgctttgtggcccaccaggcacaggaaaaacattgattgcccgtgccttagcctgtgctgcctctaaagctggccagaaggtcagtttttatatgcgcaaaggagctgatgttcttagtaaatgggtgggtgaggctgaaaggcagctaaagttactttttgaggaagctcaaaagaatcagccgtcaattatattttttgatgaaatagatggcctggcacctgtgaggtctagcaagcaagagcagattcacaattcaattgtttcgacattgcttgctttgatggatggccttgattcacgtgggcaagttgttttgattggagcaactaacagaattgatgccattgatggagcattgcgtagacctggccgatttgatcgtgagttttattttcctttacctggctatgaggctcgagcagaaatactggatattcatacaaggaaatggaaggatcctccaccgaaggaactaaagatggaacttgctgctagctgtgtgggctattgtggagctgatttgaaggcattatgtacagaagcagctattagagcatttagagagaagtatcctcaggtctacactagtgatgacaagtttgtcattgatgttgattcggtcagtgtcgagaagtaccactttttggaagctatgtctacaataactcctgctgctcacaggggatctattgtgcattcaaggccactttcaacaattttagcaagttctctgctctctcctatggatcttccatccctcttgtttatagacctcgccttttgatatgtggtggtgaaagtgtcggactggatcatgtgggaccagctgttttgcatgagcttgagaagttctctgttcactctttgggactgccgtctcttctctctgatccaagtgcgaagacacctgaagaagctcttgtgcatatctttggggaagccaagagaacaaccccgtccattctatacatacctcagttccatctttggtgggatacggcacacgaacaactaagggctgtgttgttgactctgttgaacgagttgccctccaaccttccagttttattgcttggaacatcatcagtggtttttactgaccttgaagaagagtgtgcttccatattctcttctcgcaatgtgtatcaagtggatcaaccaagttttgacgatagattgaggtacttcagtatattgtttgagtcattgctctctttccaaatggaagaatcaagaaacaagtcaaagaaacagaagtctgctattgaccttcccaaagccccgaaagaagtggagggccctaaggtttctgagctaaaggctagggcagaagctgagcagcatgctgttcgtcgaatgaggatgtgcctccgagatatctgtaatcgcattttgtacaacaaaaggttcaatgtatttcacttcccagtattagaagatgaggtgcctgactatcgatcaataatccacaagcctatggatatggctactgtcttgcagcgggtggactctggacagtaccttaccagggcagcatttataaaggatattgatcttattgtctcaaacgcaaagacttacaacggggatgactacaatggatctaggattgtcagtagagcatgtgaactcagagatgtggtccaaggcatgttgtcacaaatggacccatctttggtgtccttctgtgataaaattgcttcacaaggggggccactgcaggctgtggatgatgaagatagagctattcttcaagcagcacctgttgctcagctggtttctggtactagaataagtgcaaggcttcgaaatgtacagcctgaagtaaacctgtcacaaagttatgaagtgctaaggcggcaaaagaaaagtgcagaaaatgaacaaagcatgactagagatgaaaagtctcctgaagatgtagatttgtcgaagccaactgacgcagaagaagctgcaaaagaaccagagtcaaatggcactacgaaagaagccaacgattcaccagccaaagaaccagaagtatctacttcccctgaacccatggagagtgacaacggcaaaattgccgcggctactggcgacgacttgttagaacagctagaagccctgaagcaacgcttcatggaactcactgcaagctatggcgtgccgcagctcgagaggctgtattccaagataatgaaaggagcaatagagttgacaagtaaagaaagcaacgaggatcataggcggttagtagttaggtatttgtggacattcgttgagaacagcaacaatttttaacctggcgccaataagattcttgttttccttgtacatcctctttggaacgaaacaatagtagccgttcatcttgggagttgtccccgttccatgccttgtaacaaatcttccaaatgctctagtgtcagtgacacagttttgccatgaaatgatgtagcaagtgaacccttcctagatttgtacctcagtttgatgaatttatgaggtggaattccctcttaatgcataacatgtgttaccatgcttgttatct

SEQ ID NO: 66381 - DNA, 4011 bp, Zea Mays
aaacccttgtggtcgtctcggcacccctctccgcttcgaaacccccgacgcgaaggaagctagggaaccctcgcgagtcgcgttgcctcgcccccgtccccttcagctggcccgccgccgcctcgaatccgccctggctcggagggcctcgcgcccccacggatcggattctcgaggttggtggatttggggctagggtttggggattgactacaatcgtggggttgtttggcgtaatttgaggagcaatgtacaacatggttaggaagtggacctgaggaggacggagggatggtggcgatggagggtaagggggacgcgtcagtgacgccggtgaggactagtgaccggctgcggcagcgtccaaagtactatgctcgtggctatatgtactacaatccagccatgaggaagaaggttaagtctaagaagcgaactgctgcatcacagattgctaagaaactgcttcgcaagccagctgcacggccaccacctgccgattgtgttgcagcaaatttgcgccgttcaacgagaaagcgaaggatttctgtaaatctggagggctatgatacagatagttccagtatggaagatgacgatcttatgagacctagatatcgatcttcaaagagtaaggggggaaacaatgctgcacataatgaagtgtcagctagaccaaagcgccagaagttgtctaactccatacctcgtcgtgaaggtttacggcctagaagatctttgcgaggacaaagactgcatccataccatgaatctgaggatgaccaggaaagctctgatgaacaaggtgcagaagatcaaagagaaaatggcaatgagattgaagaggatgttggtgatgaggaggaggttgatggaggtgatgaagctgaaggagatggagatgacgaagatggtgaggaagagcaagaaggaaggaggagatatgatttaagggaacgttcagaggttcgtagaccatcccctcgtaaggaaggaaagcacagaccacaatctcctcgtagagtactagttcacggaattggtccaaagaacagcaagtatttaaaaaaaggtgggtcgcgcatgcataagcgccctcgtttctctttgccagatgattcagatgattcccttcttgtggatgagccggacgagggcccatccatgccatggatgcgcagtgggaggggaagtatgccatggttgatgggtgggttggacatgcatagtccagcagcatggggcctgagtgttggagcatctggttggggtcatcagggtgacacttctacttcactcatgcctggggtgcaaactgctggaccaagttctaagggaggagccgacattcaacctctgcaggttgacgagaatgtgagctttaaagatataggtggactttcggagtacattgatgctctaaaggaaatggttttctttccattattgtatccagatttttttgcaaactatcacatcactcctcccagaggtgttctgctttgtggcccaccaggcacaggaaaaacattgattgcccgtgccttagcctgtgctgcctctaaagctggccagaaggtcagtttttatatgcgcaaaggagctgatgttcttagtaaatgggtgggtgaggctgaaaggcagctaaagttactttttgaggaagctcaaaagaatcagccgtcaattatattttttgatgaaatagatggcctggcacctgtgaggtctagcaagcaagagcagattcacaattcaattgtttcgacattgcttgctttgatggatggccttgattcacgtgggcaagttgttttgattggagcaactaacagaattgatgccattgatggagcattgcgtagacctggccgatttgatcgtgagttttattttcctttacctggctatgaggctcgagcagaaatactggatattcatacaaggaaatggaaggatcctccaccgaaggaactaaagatggaacttgctgctagctgtgtgggctattgtggagctgatttgaaggcattatgtacagaagcagctattagagcatttagagagaagtatcctcaggtctacactagtgatgacaagtttgtcattgatgttgattcggtcagtgtcgagaagtaccactttttggaagctatgtctacaataactcctgctgctcacaggggatctattgtgcattcaaggccactttcaacagttatcgctccatgtctgaagagtcatcttgagaaaataatggaacatatttctgatattttccctttcctttcatccatagattttagcaagttctctgctctctcctatggatcttccatccctcttgtttatagacctcgccttttgatatgtggtggtgaaagtgtcggactggatcatgtgggaccagctgttttgcatgagcttgagaagttctctgttcactctttgggactgccgtctcttctctctgatccaagtgcgaagacacctgaagaagctcttgtgcatatctttggggaagccaagagaacaaccccgtccattctatacatacctcagttccatctttggtgggatacggcacacgaacaactaagggctgtgttgttgactctgttgaacgagttgccctccaaccttccagttttattgcttggaacatcatcagtggtttttactgaccttgaagaagagtgtgcttccatattctcttctcgcaatgtgtatcaagtggatcaaccaagttttgacgatagattgaggtacttcagtatattgtttgagtcattgctctctttccaaatggaagaatcaagaaacaagtcaaagaaacagaagtctgctattgaccttcccaaagccccgaaagaagtggagggccctaaggtttctgagctaaaggctagggcagaagctgagcagcatgctgttcgtcgaatgaggatgtgcctccgagatatctgtaatcgcgggtggactctggacagtaccttaccagggcagcatttataaaggatattgatcttattgtctcaaacgcaaagacttacaacggggatgactacaatggatctaggattgtcagtagagcatgtgaactcagagatgtggtccaaggcatgttgtcacaaatggacccatctttggtgtccttctgtgataaaattgcttcacaaggggggccactgcaggctgtggatgatgaagatagagctattcttcaagcagcacctgttgctcagctggtttctggtactagaataagtgcaaggcttcgaaatgtacagcctgaagtaaacctgtcacaaagttatgaagtgctaaggcggcaaaagaaaagtgcagaaaatgaacaaagcatgactagagatgaaaagtctcctgaagatgtagatttgtcgaagccaactgacgcagaagaagctgcaaaagaaccagagtcaaatggcactacgaaagaagccaacgattcaccagccaaagaaccagaagtatctacttcccctgaacccatggagagtgacaacggcaaaattgccgcggctactggcgacgacttgttagaacagctagaagccctgaagcaacgcttcatggaactcactgcaagctatggcgtgccgcagctcgagaggctgtattccaagataatgaaaggagcaatagagttgacaagtaaagaaagcaacgaggatcataggcggttagtagttaggtatttgtggacattcgttgagaacagcaacaatttttaacctggcgccaataagattcttgttttccttgtacatcctctttggaacgaaacaatagtagccgttcatcttgggagttgtccccgttccatgccttgtaacaaatcttccaaatgctctagtgtcagtgacacagttttgccatgaaatgatgtagcaagtgaacccttcctagatttgtacctcagtttgatgaatttatgaggtggaattccctcttaatgcataacatgtgttaccatgcttgttatct

SEQ ID NO: 66382 - DNA, 4023 bp, Zea Mays
gtcgtctcggcacccctctccgcttcgaaacccccgacgcgaaggaagctagggaaccctcgcgagtcgcgttgcctcgcccccgtccccttcagctggcccgccgccgcctcgaatccgccctggctcggagggcctcgcgcccccacggatcggattctcgaggaagtggacctgaggaggacggagggatggtggcgatggagggtaagggggacgcgtcagtgacgccggtgaggactagtgaccggctgcggcagcgtccaaagtactatgctcgtggctatatgtactacaatccagccatgaggaagaaggttaagtctaagaagcgaactgctgcatcacagattgctaagaaactgcttcgcaagccagctgcacggccaccacctgccgattgtgttgcagcaaatttgcgccgttcaacgagaaagcgaaggatttctgtaaatctggagggctatgatacagatagttccagtatggaagatgacgatcttatgagacctagatatcgatcttcaaagagtaaggggggaaacaatgctgcacataatgaagtgtcagctagaccaaagcgccagaagttgtctaactccatacctcgtcgtgaaggtttacggcctagaagatctttgcgaggacaaagactgcatccataccatgaatctgaggatgaccaggaaagctctgatgaacaaggtgcagaagatcaaagagaaaatggcaatgagattgaagaggatgttggtgatgaggaggaggttgatggaggtgatgaagctgaaggagatggagatgacgaagatggtgaggaagagcaagaaggaaggaggagatatgatttaagggaacgttcagaggttcgtagaccatcccctcgtaaggaaggaaagcacagaccacaatctcctcgtagagtactagttcacggaattggtccaaagaacagcaagtatttaaaaaaaggtgggtcgcgcatgcataagcgccctcgtttctctttgccagatgattcagatgattcccttcttgtggatgagccggacgagggcccatccatgccatggatgcgcagtgggaggggaagtatgccatggttgatgggtgggttggacatgcatagtccagcagcatggggcctgagtgttggagcatctggttggggtcatcagggtgacacttctacttcactcatgcctggggtgcaaactgctggaccaagttctaagggaggagccgacattcaacctctgcaggttgacgagaatgtgagctttaaagatataggtggactttcggagtacattgatgctctaaaggaaatggttttctttccattattgtatccagatttttttgcaaactatcacatcactcctcccagaggtgttctgctttgtggcccaccaggcacaggaaaaacattgattgcccgtgccttagcctgtgctgcctctaaagctggccagaaggtcagtttttatatgcgcaaaggagctgatgttcttagtaaatgggtgggtgaggctgaaaggcagctaaagttactttttgaggaagctcaaaagaatcagccgtcaattatattttttgatgaaatagatggcctggcacctgtgaggtctagcaagcaagagcagattcacaattcaattgtttcgacattgcttgctttgatggatggccttgattcacgtgggcaagttgttttgattggagcaactaacagaattgatgccattgatggagcattgcgtagacctggccgatttgatcgtgagttttattttcctttacctggctatgaggctcgagcagaaatactggatattcatacaaggaaatggaaggatcctccaccgaaggaactaaagatggaacttgctgctagctgtgtgggctattgtggagctgatttgaaggcattatgtacagaagcagctattagagcatttagagagaagtatcctcaggtctacactagtgatgacaagtttgtcattgatgttgattcggtcagtgtcgagaagtaccactttttggaagctatgtctacaataactcctgctgctcacaggggatctattgtgcattcaaggccactttcaacagttatcgctccatgtctgaagagtcatcttgagaaaataatggaacatatttctgatattttccctttcctttcatccatagattttagcaagttctctgctctctcctatggatcttccatccctcttgtttatagacctcgccttttgatatgtggtggtgaaagtgtcggactggatcatgtgggaccagctgttttgcatgagcttgagaagttctctgttcactctttgggactgccgtctcttctctctgatccaagtgcgaagacacctgaagaagctcttgtgcatatctttggggaagccaagagaacaaccccgtccattctatacatacctcagttccatctttggtgggatacggcacacgaacaactaagggctgtgttgttgactctgttgaacgagttgccctccaaccttccagttttattgcttggaacatcatcagtggtttttactgaccttgaagaagagtgtgcttccatattctcttctcgcaatgtgtatcaagtggatcaaccaagttttgacgatagattgaggtacttcagtatattgtttgagtcattgctctctttccaaatggaagaatcaagaaacaagtcaaagaaacagaagtctgctattgaccttcccaaagccccgaaagaagtggagggccctaaggtttctgagctaaaggctagggcagaagctgagcagcatgctgttcgtcgaatgaggatgtgcctccgagatatctgtaatcgcattttgtacaacaaaaggttcaatgtatttcacttcccagtattagaagatgaggtgcctgactatcgatcaataatccacaagcctatggatatggctactgtcttgcagcgggtggactctggacagtaccttaccagggcagcatttataaaggatattgatcttattgtctcaaacgcaaagacttacaacggggatgactacaatggatctaggattgtcagtagagcatgtgaactcagagatgtggtccaaggcatgttgtcacaaatggacccatctttggtgtccttctgtgataaaattgcttcacaaggggggccactgcaggctgtggatgatgaagatagagctattcttcaagcagcacctgttgctcagctggtttctggtactagaataagtgcaaggcttcgaaatgtacagcctgaagtaaacctgtcacaaagttatgaagtgctaaggcggcaaaagaaaagtgcagaaaatgaacaaagcatgactagagatgaaaagtctcctgaagatgtagatttgtcgaagccaactgacgcagaagaagctgcaaaagaaccagagtcaaatggcactacgaaagaagccaacgattcaccagccaaagaaccagaagtatctacttcccctgaacccatggagagtgacaacggcaaaattgccgcggctactggcgacgacttgttagaacagctagaagccctgaagcaacgcttcatggaactcactgcaagctatggcgtgccgcagctcgagaggctgtattccaagataatgaaaggagcaatagagttgacaagtaaagaaagcaacgaggatcataggcggttagtagttaggtatttgtggacattcgttgagaacagcaacaatttttaacctggcgccaataagattcttgttttccttgtacatcctctttggaacgaaacaatagtagccgttcatcttgggagttgtccccgttccatgccttgtaacaaatcttccaaatgctctagtgtcagtgacacagttttgccatgaaatgatgtagcaagtgaacccttcctagatttgtacctcagtttgatgaatttatgaggtggaattccctcttaatgcataacatgtgttaccatgcttgttatct

SEQ ID NO: 66383 - DNA, 4036 bp, Zea Mays
cacccctctccgcttcgaaacccccgacgcgaaggaagctagggaaccctcgcgagtcgcgttgcctcgcccccgtccccttcagctggcccgccgccgcctcgaatccgccctggctcggagggcctcgcgcccccacggatcggattctcgaggttggtggatttggggctagggtttggggattgactacaatcgtggggttgtttggcgtaatttgaggagcaatgtacaacatggttaggaagtggacctgaggaggacggagggatggtggcgatggagggtaagggggacgcgtcagtgacgccggtgaggactagtgaccggctgcggcagcgtccaaagtactatgctcgtggctatatgtactacaatccagccatgaggaagaaggttaagtctaagaagcgaactgctgcatcacagattgctaagaaactgcttcgcaagccagctgcacggccaccacctgccgattgtgttgcagcaaatttgcgccgttcaacgagaaagcgaaggatttctgtaaatctggagggctatgatacagatagttccagtatggaagatgacgatcttatgagacctagatatcgatcttcaaagagtaaggggggaaacaatgctgcacataatgaagtgtcagctagaccaaagcgccagaagttgtctaactccatacctcgtcgtgaaggtttacggcctagaagatctttgcgaggacaaagactgcatccataccatgaatctgaggatgaccaggaaagctctgatgaacaaggtgcagaagatcaaagagaaaatggcaatgagattgaagaggatgttggtgatgaggaggaggttgatggaggtgatgaagctgaaggagatggagatgacgaagatggtgaggaagagcaagaaggaaggaggagatatgatttaagggaacgttcagaggttcgtagaccatcccctcgtaaggaaggaaagcacagaccacaatctcctcgtagagtactagttcacggaattggtccaaagaacagcaagtatttaaaaaaaggtgggtcgcgcatgcataagcgccctcgtttctctttgccagatgattcagatgattcccttcttgtggatgagccggacgagggcccatccatgccatggatgcgcagtgggaggggaagtatgccatggttgatgggtgggttggacatgcatagtccagcagcatggggcctgagtgttggagcatctggttggggtcatcagggtgacacttctacttcactcatgcctggggtgcaaactgctggaccaagttctaagggaggagccgacattcaacctctgcaggttgacgagaatgtgagctttaaagatataggtggactttcggagtacattgatgctctaaaggaaatggttttctttccattattgtatccagatttttttgcaaactatcacatcactcctcccagaggtgttctgctttgtggcccaccaggcacaggaaaaacattgattgcccgtgccttagcctgtgctgcctctaaagctggccagaaggtcagtttttatatgcgcaaaggagctgatgttcttagtaaatgggtgggtgaggctgaaaggcagctaaagttactttttgaggaagctcaaaagaatcagccgtcaattatattttttgatgaaatagatggcctggcacctgtgaggtctagcaagcaagagcagattcacaattcaattgtttcgacattgcttgctttgatggatggccttgattcacgtgggcaagttgttttgattggagcaactaacagaattgatgccattgatggagcattgcgtagacctggccgatttgatcgtgagttttattttcctttacctggctatgaggctcgagcagaaatactggatattcatacaaggaaatggaaggatcctccaccgaaggaactaaagatggaacttgctgctagctgtgtgggctattgtggagctgatttgaaggcattatgtacagaagcagctattagagcatttagagagaagtatcctcaggtctacactagtgatgacaagtttgtcattgatgttgattcggtcagtgtcgagaagtaccactttttggaagctatgtctacaataactcctgctgctcacaggggatctattgtgcattcaaggccactttcaacagttatcgctccatgtctgaagagtcatcttgagaaaataatggaacatatttctgatattttccctttcctttcatccatagattttagcaagttctctgctctctcctatggatcttccatccctcttgtttatagacctcgccttttgatatgtggtggtgaaagtgtcggactggatcatgtgggaccagctgttttgcatgagcttgagaagttctctgttcactctttgggactgccgtctcttctctctgatccaagtgcgaagacacctgaagaagctcttgtgcatatctttggggaagccaagagaacaaccccgtccattctatacatacctcagttccatctttggtgggatacggcacacgaacaactaagggctgtgttgttgactctgttgaacgagttgccctccaaccttccagttttattgcttggaacatcatcagtggtttttactgaccttgaagaagagtgtgcttccatattctcttctcgcaatgtgtatcaagtggatcaaccaagttttgacgatagattgaggtacttcagtatattgtttgagtcattgctctctttccaaatggaagaatcaagaaacaagtcaaagaaacagaagtctgctattgaccttcccaaagccccgaaagaagtggagggccctaaggtttctgagctaaaggctagggcagaagctgagcagcatgctgttcgtcgaatgaggatgtgcctccgagatatctgtaatcgcattttgtacaacaaaaggttcaatgtatttcacttcccagtattagaagatgaggtgcctgactatcgatcaataatccacaagcctatggatatggctactgtcttgcagcgggtggactctggacagtaccttaccagggcagcatttataaaggatattgatcttattgtctcaaacgcaaaggtccaaggcatgttgtcacaaatggacccatctttggtgtccttctgtgataaaattgcttcacaaggggggccactgcaggctgtggatgatgaagatagagctattcttcaagcagcacctgttgctcagctggtttctggtactagaataagtgcaaggcttcgaaatgtacagcctgaagtaaacctgtcacaaagttatgaagtgctaaggcggcaaaagaaaagtgcagaaaatgaacaaagcatgactagagatgaaaagtctcctgaagatgtagatttgtcgaagccaactgacgcagaagaagctgcaaaagaaccagagtcaaatggcactacgaaagaagccaacgattcaccagccaaagaaccagaagtatctacttcccctgaacccatggagagtgacaacggcaaaattgccgcggctactggcgacgacttgttagaacagctagaagccctgaagcaacgcttcatggaactcactgcaagctatggcgtgccgcagctcgagaggctgtattccaagataatgaaaggagcaatagagttgacaagtaaagaaagcaacgaggatcataggcggttagtagttaggtatttgtggacattcgttgagaacagcaacaatttttaacctggcgccaataagattcttgttttccttgtacatcctctttggaacgaaacaatagtagccgttcatcttgggagttgtccccgttccatgccttgtaacaaatcttccaaatgctctagtgtcagtgacacagttttgccatgaaatgatgtagcaagtgaacccttcctagatttgtacctcagtttgatgaatttatgaggtggaattccctcttaatgcataacatgtgttaccatgcttgttatct

SEQ ID NO: 66384 - DNA, 4190 bp, Zea Mays
cacccctctccgcttcgaaacccccgacgcgaaggaagctagggaaccctcgcgagtcgcgttgcctcgcccccgtccccttcagctggcccgccgccgcctcgaatccgccctggctcggagggcctcgcgcccccacggatcggattctcgaggttggtggatttggggctagggtttggggattgactacaatcgtggggttgtttggcgtaatttgaggagcaatgtacaacatggttaggaagtggacctgaggaggacggagggatggtggcgatggagggtaagggggacgcgtcagtgacgccggtgaggactagtgaccggctgcggcagcgtccaaagtactatgctcgtggctatatgtactacaatccagccatgaggaagaaggttaagtctaagaagcgaactgctgcatcacagattgctaagaaactgcttcgcaagccagctgcacggccaccacctgccgattgtgttgcagcaaatttgcgccgttcaacgagaaagcgaaggatttctgtaaatctggagggctatgatacagatagttccagtatggaagatgacgatcttatggacctagatatcgatcttcaaagagtaaggggggaaacaatgctgcacataatgaagtgtcagctagaccaaagcgccagaagttgtctaactccatacctcgtcgtgaaggtttacggcctagaagatctttgcgaggacaaagactgcatccataccatgaatctgaggatgaccaggaaagctctgatgaacaaggtgcagaagatcaaagagaaaatggcaatgagattgaagaggatgttggtgatgaggaggaggttgatggaggtgatgaagctgaaggagatggagatgacgaagatggtgaggaagagcaagaaggaaggaggagatatgatttaagggaacgttcagaggttcgtagaccatcccctcgtaaggaaggaaagcacagaccacaatctcctcgtagagtactagttcacggaattggtccaaagaacagcaagtatttaaaaaaaggtgggtcgcgcatgcataagcgccctcgtttctctttgccagatgattcagatgattcccttcttgtggatgagccggacgagggcccatccatgccatggatgcgcagtgggaggggaagtatgccatggttgatgggtgggttggacatgcatagtccagcagcatggggcctgagtgttggagcatctggttggggtcatcagggtgacacttctacttcactcatgcctggggtgcaaactgctggaccaagttctaagggaggagccgacattcaacctctgcaggttgacgagaatgtgagctttaaagatataggtggactttcggagtacattgatgctctaaaggaaatggttttctttccattattgtatccagatttttttgcaaactatcacatcactcctcccagaggtgttctgctttgtggcccaccaggcacaggaaaaacattgattgcccgtgccttagcctgtgctgcctctaaagctggccagaaggtcagtttttatatgcgcaaaggagctgatgttcttagtaaatgggtgggtgaggctgaaaggcagctaaagttactttttgaggaagctcaaaagaatcagccgtcaattatattttttgatgaaatagatggcctggcacctgtgaggtctagcaagcaagagcagattcacaattcaattgtttcgacattgcttgctttgatggatggccttgattcacgtgggcaagttgttttgattggagcaactaacagaattgatgccattgatggagcattgcgtagacctggccgatttgatcgtgagttttattttcctttacctggctatgaggctcgagcagaaatactggatattcatacaaggaaatggaaggatcctccaccgaaggaactaaagatggaacttgctgctagctgtgtgggctattgtggagctgatttgaaggcattatgtacagaagcagctattagagcatttagagagaagtatcctcaggtctacactagtgatgacaagtttgtcattgatgttgattcggtcagtgtcgagaagtaccactttttggaagctatgtctacaataactcctgctgctcacaggggatctattgtgcattcaaggccactttcaacagttatcgctccatgtctgaagagtcatcttgagaaaataatggaacatatttctgatattttccctttcctttcatccatagattttagcaagttctctgctctctcctatggatcttccatccctcttgtttatagacctcgccttttgatatgtggtggtgaaagtgtcggactggatcatgtgggaccagctgttttgcatgagcttgagaagttctctgttcactctttgggactgccgtctcttctctctgatccaagtgcgaagacacctgaagaagctcttgtgcatatctttggggaagccaagagaacaaccccgtccattctatacatacctcagttccatctttggtgggatacggcacacgaacaactaagggctgtgttgttgactctgttgaacgagttgccctccaaccttccagttttattgcttggaacatcatcagtggtttttactgaccttgaagaagagtgtgcttccatattctcttctcgcaatgtgtatcaagtggatcaaccaagttttgacgatagattgaggtacttcagtatattgtttgagtcattgctctctttccaaatggaagaatcaagaaacaagtcaaagaaacagaagtctgctattgaccttcccaaagccccgaaagaagtggagggccctaaggtttctgagctaaaggctagggcagaagctgagcagcatgctgttcgtcgaatgaggatgtgcctccgagatatctgtaatcgcattttgtacaacaaaaggttcaatgtatttcacttcccagtattagaagatgaggtgcctgactatcgatcaataatccacaagcctatggatatggctactgtcttgcagcgggtggactctggacagtaccttaccagggcagcatttataaaggatattgatcttattgtctcaaacgcaaagacttacaacggggatgactacaatggatctaggattgtcagtagagcatgtgaactcagagatgtggtccaaggcatgttgtcacaaatggacccatctttggtgtccttctgtgataaaattgcttcacaaggggggccactgcaggctgtggatgatgaagatagagctattcttcaagcagcacctgttgctcagctggtttctggtactagaataagtgcaaggcttcgaaatgtacagcctgaagtaaacctgtcacaaagttatgaagtgctaaggcggcaaaagaaaagtgcagaaaatgaacaaagtcagttttacgatctgaactataacacttgcatttgcttgttaactgtgattgcaatgattatggaaaatattgaactgtcgtttcaggcatgactagagatgaaaagtctcctgaagatgtagatttgtcgaagccaactgacgcagaagaagctgcaaaagaaccagagtcaaatggcactacgaaagaagccaacgattcaccagccaaagaaccagaagtatctacttcccctgaacccatggagagtgacaacggcaaaattgccgcggctactggcgacgacttgttagaacagctagaagccctgaagcaacgcttcatggaactcactgcaagctatggcgtgccgcagctcgagaggctgtattccaagataatgaaaggagcaatagagttgacaagtaaagaaagcaacgaggatcataggcggttagtagttaggtatttgtggacattcgttgagaacagcaacaatttttaacctggcgccaataagattcttgttttccttgtacatcctctttggaacgaaacaatagtagccgttcatcttgggagttgtccccgttccatgccttgtaacaaatcttccaaatgctctagtgtcagtgacacagttttgccatgaaatgatgtagcaagtgaacccttcctagatttgtacctcagtttgatgaatttatgaggtggaattccctcttaatgcataacatgtgttaccatgcttgttatct

SEQ ID NO: 66385 - DNA, 3682 bp, Zea Mays
ctaaaatatcaccatggagccacatgttgttttgtgacatcatctttctctcacagacagtgtgttgcagcaaatttgcgccgttcaacgagaaagcgaaggatttctgtaaatctggagggctatgatacagatagttccagtatggaagatgacgatcttatgagacctagatatcgatcttcaaagagtaaggggggaaacaatgctgcacataatgaagtgtcagctagaccaaagcgccagaagttgtctaactccatacctcgtcgtgaaggtttacggcctagaagatctttgcgaggacaaagactgcatccataccatgaatctgaggatgaccaggaaagctctgatgaacaaggtgcagaagatcaaagagaaaatggcaatgagattgaagaggatgttggtgatgaggaggaggttgatggaggtgatgaagctgaaggagatggagatgacgaagatggtgaggaagagcaagaaggaaggaggagatatgatttaagggaacgttcagaggttcgtagaccatcccctcgtaaggaaggaaagcacagaccacaatctcctcgtagagtactagttcacggaattggtccaaagaacagcaagtatttaaaaaaaggtgggtcgcgcatgcataagcgccctcgtttctctttgccagatgattcagatgattcccttcttgtggatgagccggacgagggcccatccatgccatggatgcgcagtgggaggggaagtatgccatggttgatgggtgggttggacatgcatagtccagcagcatggggcctgagtgttggagcatctggttggggtcatcagggtgacacttctacttcactcatgcctggggtgcaaactgctggaccaagttctaagggaggagccgacattcaacctctgcaggttgacgagaatgtgagctttaaagatataggtggactttcggagtacattgatgctctaaaggaaatggttttctttccattattgtatccagatttttttgcaaactatcacatcactcctcccagaggtgttctgctttgtggcccaccaggcacaggaaaaacattgattgcccgtgccttagcctgtgctgcctctaaagctggccagaaggtcagtttttatatgcgcaaaggagctgatgttcttagtaaatgggtgggtgaggctgaaaggcagctaaagttactttttgaggaagctcaaaagaatcagccgtcaattatattttttgatgaaatagatggcctggcacctgtgaggtctagcaagcaagagcagattcacaattcaattgtttcgacattgcttgctttgatggatggccttgattcacgtgggcaagttgttttgattggagcaactaacagaattgatgccattgatggagcattgcgtagacctggccgatttgatcgtgagttttattttcctttacctggctatgaggctcgagcagaaatactggatattcatacaaggaaatggaaggatcctccaccgaaggaactaaagatggaacttgctgctagctgtgtgggctattgtggagctgatttgaaggcattatgtacagaagcagctattagagcatttagagagaagtatcctcaggtctacactagtgatgacaagtttgtcattgatgttgattcggtcagtgtcgagaagtaccactttttggaagctatgtctacaataactcctgctgctcacaggggatctattgtgcattcaaggccactttcaacagttatcgctccatgtctgaagagtcatcttgagaaaataatggaacatatttctgatattttccctttcctttcatccatagattttagcaagttctctgctctctcctatggatcttccatccctcttgtttatagacctcgccttttgatatgtggtggtgaaagtgtcggactggatcatgtgggaccagctgttttgcatgagcttgagaagttctctgttcactctttgggactgccgtctcttctctctgatccaagtgcgaagacacctgaagaagctcttgtgcatatctttggggaagccaagagaacaaccccgtccattctatacatacctcagttccatctttggtgggatacggcacacgaacaactaagggctgtgttgttgactctgttgaacgagttgccctccaaccttccagttttattgcttggaacatcatcagtggtttttactgaccttgaagaagagtgtgcttccatattctcttctcgcaatgtgtatcaagtggatcaaccaagttttgacgatagattgaggtacttcagtatattgtttgagtcattgctctctttccaaatggaagaatcaagaaacaagtcaaagaaacagaagtctgctattgaccttcccaaagccccgaaagaagtggagggccctaaggtttctgagctaaaggctagggcagaagctgagcagcatgctgttcgtcgaatgaggatgtgcctccgagatatctgtaatcgcattttgtacaacaaaaggttcaatgtatttcacttcccagtattagaagatgaggtgcctgactatcgatcaataatccacaagcctatggatatggctactgtcttgcagcgggtggactctggacagtaccttaccagggcagcatttataaaggatattgatcttattgtctcaaacgcaaagacttacaacggggatgactacaatggatctaggattgtcagtagagcatgtgaactcagagatgtggtccaaggcatgttgtcacaaatggacccatctttggtgtccttctgtgataaaattgcttcacaaggggggccactgcaggctgtggatgatgaagatagagctattcttcaagcagcacctgttgctcagctggtttctggtactagaataagtgcaaggcttcgaaatgtacagcctgaagtaaacctgtcacaaagttatgaagtgctaaggcggcaaaagaaaagtgcagaaaatgaacaaagcatgactagagatgaaaagtctcctgaagatgtagatttgtcgaagccaactgacgcagaagaagctgcaaaagaaccagagtcaaatggcactacgaaagaagccaacgattcaccagccaaagaaccagaagtatctacttcccctgaacccatggagagtgacaacggcaaaattgccgcggctactggcgacgacttgttagaacagctagaagccctgaagcaacgcttcatggaactcactgcaagctatggcgtgccgcagctcgagaggctgtattccaagataatgaaaggagcaatagagttgacaagtaaagaaagcaacgaggatcataggcggttagtagttaggtatttgtggacattcgttgagaacagcaacaatttttaacctggcgccaataagattcttgttttccttgtacatcctctttggaacgaaacaatagtagccgttcatcttgggagttgtccccgttccatgccttgtaacaaatcttccaaatgctctagtgtcagtgacacagttttgccatgaaatgatgtagcaagtgaacccttcctagatttgtacctcagtttgatgaatttatgaggtggaattccctcttaatgcataacatgtgttaccatgcttgttatct

SEQ ID NO: 66386 - DNA, 3647 bp, Zea Mays
gttgttttgtgacatcatctttctctcacagacagcaaatttgcgccgttcaacgagaaagcgaaggatttctgtaaatctggagggctatgatacagatagttccagtatggaagatgacgatcttatgagacctagatatcgatcttcaaagagtaaggggggaaacaatgctgcacataatgaagtgtcagctagaccaaagcgccagaagttgtctaactccatacctcgtcgtgaaggtttacggcctagaagatctttgcgaggacaaagactgcatccataccatgaatctgaggatgaccaggaaagctctgatgaacaaggtgcagaagatcaaagagaaaatggcaatgagattgaagaggatgttggtgatgaggaggaggttgatggaggtgatgaagctgaaggagatggagatgacgaagatggtgaggaagagcaagaaggaaggaggagatatgatttaagggaacgttcagaggttcgtagaccatcccctcgtaaggaaggaaagcacagaccacaatctcctcgtagagtactagttcacggaattggtccaaagaacagcaagtatttaaaaaaaggtgggtcgcgcatgcataagcgccctcgtttctctttgccagatgattcagatgattcccttcttgtggatgagccggacgagggcccatccatgccatggatgcgcagtgggaggggaagtatgccatggttgatgggtgggttggacatgcatagtccagcagcatggggcctgagtgttggagcatctggttggggtcatcagggtgacacttctacttcactcatgcctggggtgcaaactgctggaccaagttctaagggaggagccgacattcaacctctgcaggttgacgagaatgtgagctttaaagatataggtggactttcggagtacattgatgctctaaaggaaatggttttctttccattattgtatccagatttttttgcaaactatcacatcactcctcccagaggtgttctgctttgtggcccaccaggcacaggaaaaacattgattgcccgtgccttagcctgtgctgcctctaaagctggccagaaggtcagtttttatatgcgcaaaggagctgatgttcttagtaaatgggtgggtgaggctgaaaggcagctaaagttactttttgaggaagctcaaaagaatcagccgtcaattatattttttgatgaaatagatggcctggcacctgtgaggtctagcaagcaagagcagattcacaattcaattgtttcgacattgcttgctttgatggatggccttgattcacgtgggcaagttgttttgattggagcaactaacagaattgatgccattgatggagcattgcgtagacctggccgatttgatcgtgagttttattttcctttacctggctatgaggctcgagcagaaatactggatattcatacaaggaaatggaaggatcctccaccgaaggaactaaagatggaacttgctgctagctgtgtgggctattgtggagctgatttgaaggcattatgtacagaagcagctattagagcatttagagagaagtatcctcaggtctacactagtgatgacaagtttgtcattgatgttgattcggtcagtgtcgagaagtaccactttttggaagctatgtctacaataactcctgctgctcacaggggatctattgtgcattcaaggccactttcaacagttatcgctccatgtctgaagagtcatcttgagaaaataatggaacatatttctgatattttccctttcctttcatccatagattttagcaagttctctgctctctcctatggatcttccatccctcttgtttatagacctcgccttttgatatgtggtggtgaaagtgtcggactggatcatgtgggaccagctgttttgcatgagcttgagaagttctctgttcactctttgggactgccgtctcttctctctgatccaagtgcgaagacacctgaagaagctcttgtgcatatctttggggaagccaagagaacaaccccgtccattctatacatacctcagttccatctttggtgggatacggcacacgaacaactaagggctgtgttgttgactctgttgaacgagttgccctccaaccttccagttttattgcttggaacatcatcagtggtttttactgaccttgaagaagagtgtgcttccatattctcttctcgcaatgtgtatcaagtggatcaaccaagttttgacgatagattgaggtacttcagtatattgtttgagtcattgctctctttccaaatggaagaatcaagaaacaagtcaaagaaacagaagtctgctattgaccttcccaaagccccgaaagaagtggagggccctaaggtttctgagctaaaggctagggcagaagctgagcagcatgctgttcgtcgaatgaggatgtgcctccgagatatctgtaatcgcattttgtacaacaaaaggttcaatgtatttcacttcccagtattagaagatgaggtgcctgactatcgatcaataatccacaagcctatggatatggctactgtcttgcagcgggtggactctggacagtaccttaccagggcagcatttataaaggatattgatcttattgtctcaaacgcaaagacttacaacggggatgactacaatggatctaggattgtcagtagagcatgtgaactcagagatgtggtccaaggcatgttgtcacaaatggacccatctttggtgtccttctgtgataaaattgcttcacaaggggggccactgcaggctgtggatgatgaagatagagctattcttcaagcagcacctgttgctcagctggtttctggtactagaataagtgcaaggcttcgaaatgtacagcctgaagtaaacctgtcacaaagttatgaagtgctaaggcggcaaaagaaaagtgcagaaaatgaacaaagcatgactagagatgaaaagtctcctgaagatgtagatttgtcgaagccaactgacgcagaagaagctgcaaaagaaccagagtcaaatggcactacgaaagaagccaacgattcaccagccaaagaaccagaagtatctacttcccctgaacccatggagagtgacaacggcaaaattgccgcggctactggcgacgacttgttagaacagctagaagccctgaagcaacgcttcatggaactcactgcaagctatggcgtgccgcagctcgagaggctgtattccaagataatgaaaggagcaatagagttgacaagtaaagaaagcaacgaggatcataggcggttagtagttaggtatttgtggacattcgttgagaacagcaacaatttttaacctggcgccaataagattcttgttttccttgtacatcctctttggaacgaaacaatagtagccgttcatcttgggagttgtccccgttccatgccttgtaacaaatcttccaaatgctctagtgtcagtgacacagttttgccatgaaatgatgtagcaagtgaacccttcctagatttgtacctcagtttgatgaatttatgaggtggaattccctcttaatgcataacatgtgttaccatgcttgttatct

SEQ ID NO: 66387 - DNA, 2335 bp, Zea Mays
aaacgctctgtcaggtaagtggtgtgctgaacatagtttcagttaactggaacttatttctgtattggggaaactagcgtcgaggatctttcattcttcacgtagtggaatttggacattaaaaagtgttcaactttttattttgggaatttaaaagtgaattagtgaaaagaaatggagaaggaaagatcctctcatccttatcatgggtcgccgctcaacaggagatatttttccaatcgttcgtatcctttcggaccaagtgttgtgcaccagttctctggaagaattcctgccgctcaccagactccacgttcctcatgtcttcttcctccccagcactctctcattcatgtcacctcttttcctcactgtccctctctgttccctcgacggtcagacctctccttaaccgcggatgccgatctctgccaccagcgcacggtagaccatcatcctcctcccttttgctgcgtgcctaggtcggacctcaccttgccaccgtgccgtaatatctctggcgcatgcgcccagcaccgcgcaccgggcgctcggctactccttgcctcatctacaccaggccatggctccctgatgtactccccattccggccatcgatccctagtgttggtgctccctttctcctgtgctcgctaggtattcggtgggacgcctgagccatgtgattgacgtcgttcttgtgtattcggaattgattgatgttggtacgctagttgatcacgtgatatggaggactagaaccgagtcgaccacaagatgttgttaagcgcgggtttcttcgtaaggtgatgctgatggataaacttaaggatggatggcctgatcaagtgtcaggacaaggaagatcatcaagagatcgtcgtctaaccaacactgacttagtgttattccaggcaagccccggtgcatttgccacctccttgctgttttaaaatctttatcaccttatatgatgcattaggtgataggagttgtgtgctaaacaattgatgcatttccttccttgaaaattgattacccttccttaatacccgttttgaaaagaattttatgatgcttagccttgctttagcaaacaaaaatgttttgttttaaaacaaaagtgatgcttcagtgggtgggaatgttttcaaaaataaaacttgatgttggatccatcatggccgtgatgggttcaacgtcgaaaaagatgtacctctgccaggtaccaaagtttgggtttaaattataaagctgagaccgggcgggtgacttgcacgagaaaggagtctcggtgtagtgtctccgtctgtgtcgattaaggaccgtactgattgttggcctgctgatctaggaccctttatctggccacatacctcatcatgggtaagcttgaacccggctattccatacatgaaaagacaatcgcgcactgggagtggagagatggcgagagtggcacgtaccctcctggcaaaggaccgcctaaaaggggtggtgtgctctcgggtggcgcggacctgttcatgtggtggaggatccgtgggaatggtagacatgtgcaaaatagttaagagaagcatatgtcgtgtggttggagatccccagctgggtattaatctattcggatcgccgaacttctcggatatgaagactggatcttcgaccctcatcgtagataacaagcaaaacaaaggttggattttaaaagaaagctagtgtaggacaagtgaatgctctagattaggcaaatctagattcagaaaaagtacttaacttatgatgtaaaattttggcttaaggacccacttctagtaagcttttctgcaaatgagtctttgattcttgataagccataccttgaatccctctagccagcatacccttgagagtcttttctttagtcgggtaagtcttgctgagtaattccgtactcagggttttattccctgttgtttttcaggttctaactttgtgctattgttgatggtgttaagtgccggtgggctcggccttcttataagtctaagtaactcttctatacttcttattgaggatgttcacttgagctagcatatattttaaaactataaataatttataatagtttaaagttatttctttgaaccacttctgtaaccactccgataaatataatgtaaaacttgatgtaacttgtaaaatttggtaaaaagatttccgctgcaaaatgttggtgtgtgatttgtgtttacttaatcttgtgatcctggttgttcgtggtttatccggggtccctgggacactcggacagatcctgttaagttatctggtgcacatgcatagccgtctgag

SEQ ID NO: 66388 - DNA, 955 bp, Zea Mays
gtcgggtgtgtccccactctccatttctcagcgtgcgcgctctcttctctctcttttgtggtaactggcggcggccgacgccgacgccctagctcacgtcttcgtcggtcccttcccagccttcgtcgcgtccttcgccgtcgacgagaacacacgaggaaacacttgcaggactgaagaatagagaaacatgtcgtctggtggtgtgaaagatttttaccggcagaaaaagaaaggaggcgtggcgaagacagcttcatcctcaaagaataagacacggcattacactggtggggcttctgttggtgcctcagatgcagctcagacatcagctctagtttctcatggctcctgggatctcaaagatgactttggtgatgaagaagagcagctgcgacagtttgacgtggacatgaagtttggtccttgcatcggtgttactcggcttcagcgctgggagcgagcctctgccatgggcctccagccaccagctcatctccgggacctcctactgcacgcggcatcgacaaagaatcgcggtggcggtagcccctctgtcgagtgcctttgggagggtaaagtctagaagaaatatcttctaatcccccatcccaggtcaacttcaggtggttaactggagacgcttgttgtaccatgcagcctcttgttgatgtatgttggcactcgtttgtttctccaaggcacgtgttcggtaacagtatatagatggctacctgtgcgtatgttggcgcacttcatgctgaattctcttctcgtattgagatcctgttgcgttgtctgtatctgagtgcgtcaagcacgcacatgaacacatctcctatgtgctgccagttgcattgtgatcgaccgttttgggtgctgcgatttgacgcttatttagcagtcaaatcacgtgggtagcggtccatctacctcacgagtgtttttttcccgg

SEQ ID NO: 66389 - DNA, 1358 bp, Zea Mays
ctggatcgaaggggatcaaaccaaacaagcccggtacggttgcagtttaatttgaaaagacatcgggattcaaccgaacatccaatccgtgctctggaagcgcaatggattggcgaccgaggagcatttctaatgtttccttcaggacatgagcatgatgattgtcattattcaagatcgttctttcttgaaaacattgcctatgcatatccaagtgaccataatatatatgatgataatattagattactgctacattagatccgactgtatgcattttagctctactacaatgatgctaacagtttagtgaacagtgactggaccaatgtttcactacctaagggctgactatatgcaaattggttatattgcaatgatgctagcagcttcgtaaacatcgaccgggggtccggggccagtgtttcactacctacagcagtacagctgcccattttcagttctttatttacacaatagtacaataccatgtttcatgctcaggattagagctcttgatgttagggtttctggtggctctttggatgcactcttgtagtgtaggagtatatatacctttcaaccaaaggggaaaaaaaatccagagtaggtctgattccaaattttctgctggaaggaattcaaggaaacacttgcaggactgaagaatagagaaacatgtcgtctggtggtgtgaaagatttttaccggcagaaaaagaaaggaggcgtggcgaagacagcttcatcctcaaagaataagacacggcattacactggtggggcttctgttggtgcctcagatgcagctcagacatcagctctagtttctcatggctcctgggatctcaaagatgactttggtgatgaagaagagcagctgcgacagtttgacgtggacatgaagtttggtccttgcatcggtgttactcggcttcagcgctgggagcgagcctctgccatgggcctccagccaccagctcatctccgggacctcctactgcacgcggcatcgacaaagaatcgcggtggcggtagcccctctgtcgagtgcctttgggaggcctcttgttgatgtatgttggcactcgtttgtttctccaaggcacgtgttcggtaacagtatatagatggctacctgtgcgtatgttggcgcacttcatgctgaattctcttctcgtattgagatcctgttgcgttgtctgtatctgagtgcgtcaagcacgcacatgaacacatctcctatgtgctgccagttgcattgtgatcgaccgttttgggtgctgcgatttgacgcttatttagcagtcaaatcacgtgggtagcggtccatctacctcacgagtgtttttttcccgg

SEQ ID NO: 66390 - DNA, 827 bp, Zea Mays
gtaaaggcatcgctccttggcagggttgggcatatactgaacggatatttatatgttcctagtgccttatcttgcctgaagcttttgcaaccaatgataccaagcacgagtgcagcaatggcgcatcccatgcctcccctctcagcatcacagagcacaatcaccaccgttctgaagatccttccaaaacctcctgctgctccggagagcagaagcaataattgtgcttttggggccaaattcgacagtaggagggcacttctatgcggcttggtcgctgctgctgctgctgctggcaccatgctgggcgctgacatcgctggtgctgcttcgaagaggcggcctccaccgccagcgccggcagaggcgaagaaagacccgaacgtcagcggagtgcaggctaaagtgcttgctagcaggaagaggaaggaggccatgaaggaagctgtggccaagctgagggagaaaggtaagccggttgataagtgaaggccagaaccagtgacccttgatcaagaaatgtaacttattgttaaataatatactccctctattcttctaaagtaataagccattaatttgaatagtctactcactttatgtgtacagatgagaataaaaatacaactattttgcttgtatgtattttgtcccagcctatctgttgcgtgtaatccagtttttgccacatgctctgatttggcgaaaaaactaatcatttttttaatcgccgtgcaatgaaactaacaaaaagcacaaaaaaactatgtcaatctatcagatttatagttctaattcattatatattaagggataaaaaacagaaa

SEQ ID NO: 66391 - DNA, 2535 bp, Zea Mays
cgaagtccattatctccggcctccgcagacggcagaactgaaccgaaccgcaccgtcgaattccccgtccgaccccactggtcccggcctctgcagggtggcccacccatgacccatcccgcgaccgcgacccgaccgctcccaccttccccgcctcgtcgtccccctgcataaccaccaccccaccaggccaccattccttcctcccctggtcgcccccgcctccatggccctcgcgtgcgcgcccataccgctcccgagtccctaggacgcggcacgcacccttctcgcgggcgcgggcgcgggcgcggggcgcgggagcaggcatggcgtcgcaggtcgctgggtcaaccccggcggtggcggcgcttgggttccttctcccgaccttctgggagatcgaggtcacgtgcgccgccgcgatgatcctcgtggcgctttacgttgcctacgagctcctcaacccgcgctcctcgcaggcggcagcggcgggcgacgccgacgagctcctcgtgcgggggctggacggcgccgacaagttcaaggggggtgtgagcggcccctctgcctatgtagtgaagctcgaattgttggctgcaaaaaatttgatggcggcgaacttaaatgggacatctgacccatatgcattgatcacttgtggtgcagagaagcgtttcagctccatggtccctggctcaagaaacccaatgtggggagaggaattcaatttttttgttgatagtcttcctgtaaagataaatgtcacgatatatgactgggacattgtatggaaaagcacaatccttggctcttttactgttactgttgaatctgaggtaccgagtggaccaatttggcatacacttgacagcacatcaggccaggtgtgtcttcatattaaagtaatcaaggttcatgaaagttcctccagctcagctgaggctggtgctcgtagaaggatttccttggataagcaaggtcctactgtagttcatcaaaagccaggtcctttgcagacaatttttgaactgcctccagatgaggttgttgaccacagttattcatgtgcacttgaaaggtcatttctgtaccatggacgcatgtatgtctcttcatggcatatttgctttcattcaaatgtcttttcaaagcaaatcaaggttgtgattcctttgagagatattgatgagataaggagaagtcagcatgcagttattaatccagctattacaatttttcttcgaatgggagctggaggatttggtgttcctccgttaggatgtccagatggaagagtcaggtacaaatttgcatcgttttggaacagaaaccatacatttagagcattgcatcgagctatgaagaacttcgtaatgatgatagacgctgagaaacaggaacgtgctcagtctgcattacgtgcacacagtagttcaagaaaaaatagcaagaaggagataaatgtaccagaagattgtgctgcattaacagggaagttacaaccttttgtcaaagaagaagttttggtccctgtattcaatggaacttttccctgtactgcagaacagttcttcagtattcttttaagtgatgattcaaattacataacagagtatcgaacggatcggaaggataaagatataaatctgggccaatggcacgttgcagatgagtatgatggccaggtgagggaacttaattgtaaatcaatatgccatagtccaatgtgtcctccttattcagcaatgacagagtggcagcatatagttctttcagctgacaaaatggatctggtatttgagacagtacagcaagtacatgatgttccatttggttccttctttgaggtgcactgtaggtggtgtgtgaaaactatcagttctaactcgtgcagtctcaacataagtgctggtgcgcatttcaagaaatggtgcatcatgcaatctaagataaagagtggtgctgtggatgagctgaagaaagaagtgaaggtgatgttagactttgcgcaggggtatatgctcaaagttagctctcctgaccaagagaacagtaatctcgcgcagcaagacaacacggcgccggatgcgccttctgatacagggtgacagccgccatcacatgacaacgaatcatgccattacgatgttatacacagaagggcaggtggaccagtaactagtagtccacatgaaccacatctaacatgttaagctgacttccaaaagaatgggtggaccgtgtgtagcgtgttaagttcgtttcctgccattgctctatccgtttttggcagtttggctgatgtatatatatagctgtaaacacacgcaaatataaagtggtggctgtggcaggccagtgtgttgtttgagtataaaaacaaagaaagaaacggaagagagaaatatttgccacagaaccaacgcttctcgagtcacagactcacaggggggcatatgttgtgcaaataaaagcttgatgtcctagaaacaactttgcaactgtcagtttgttaaggccttgtttaaatgcact

SEQ ID NO: 66392 - DNA, 1983 bp, Zea Mays
gaaccgcaccgtcgaattccccgtccgaccccactggtcccggcctctgcagggtggcccacccatgacccatcccgcgaccgcgacccgaccgctcccaccttccccgcctcgtcgtccccctgcataaccaccaccccaccaggccaccattccttcctcccctggtcgcccccgcctccatggccctcgcgtgcgcgcccataccgctcccgagtccctaggacgcggcacgcacccttctcgcgggcgcgggcgcgggcgcggggcgcgggagcaggcatggcgtcgcaggtcgctgggtcaaccccggcggtggcggcgcttgggttccttctcccgaccttctgggagatcgaggtcacgtgcgccgccgcgatgatcctcgtggcgctttacgttgcctacgagctcctcaacccgcgctcctcgcaggcggcagcggcgggcgacgccgacgagctcctcgtgcgggggctggacggcgccgacaagttcaaggggggtgtgagcggcccctctgcctatgtagtgaagctcgaattgttggctgcaaaaaatttgatggcggcgaacttaaatgggacatctgacccatatgcattgatcacttgtggtgcagagaagcgtttcagctccatggtccctggctcaagaaacccaatgtggggagaggaattcaatttttttgttgatagtcttcctgtaaagataaatgtcacgatatatgactgggacattgtatggaaaagcacaatccttggctcttttactgttactgttgaatctgaggtaccgagtggaccaatttggcatacacttgacagcacatcaggccaggtgtgtcttcatattaaagtaatcaaggttcatgaaagttcctccagggcaataaatagctcagctgaggctggtgctcgtagaaggatttccttggataagcaaggtcctactgtagttcatcaaaagccaggtcctttgcagacaatttttgaactgcctccagatgaggttgttgaccacagttattcatgtgcacttgaaaggtcatttctgtaccatggacgcatgtatgtctcttcatggcatatttgctttcattcaaatgtcttttcaaagcaaatcaaggttgtgattcctttgagagatattgatgagataaggagaagtcagcatgcagttattaatccagctattacaatttttcttcgaatgggagctggaggatttggtgttcctccgttaggatgtccagatggaagagtcaggtacaaatttgcatcgttttggaacagaaaccatacatttagagcattgcatcgagctatgaagaacttcgtaatgatgatagacgctgagaaacaggaacgtgctcagtctgcattacgtgcacacagtagttcaagaaaaaatagcaagaaggagataaatgtaccagaagattgtgctgcattaacagggaagttacaaccttttgtcaaagaagaagttttggtccctgtattcaatggaacttttccctgtactgcagaacagttcttcagtattcttttaagtgatgattcaaattacataacagagtatcgaacggatcggaaggataaagatataaatctgggccaatggcacgttgcagatgagtatgatggccaggtgagggaacttaattgtaaatcaatatgccatagtccaatgtgtcctccttattcagcaatgacagagtggcagcatatagttctttcagctgacaaaatggatctggtatttgagacagtacagcaagtacatgatgttccatttggttccttctttgaggtgcactgtaggtggtgtgtgaaaactatcagttctaactcgtgcagtctcaacataagtgctggtgcgcatttcaagaaatggtgcatcatgcaatctaagataaagagtggtgctgtggatgagaaattcgactcaattcatgaacaaacacaaaatatatctgag

SEQ ID NO: 66393 - DNA, 2457 bp, Zea Mays
cgcaccgtcgaattccccgtccgaccccactggtcccggcctctgcagggtggcccacccatgacccatcccgcgaccgcgacccgaccgctcccaccttccccgcctcgtcgtccccctgcataaccaccaccccaccaggccaccattccttcctcccctggtcgcccccgcctccatggccctcgcgtgcgcgcccataccgctcccgagtccctaggacgcggcacgcacccttctcgcgggcgcgggcgcgggcgcggggcgcgggagcaggcatggcgtcgcaggtcgctgggtcaaccccggcggtggcggcgcttgggttccttctcccgaccttctgggagatcgaggtcacgtgcgccgccgcgatgatcctcgtggcgctttacgttgcctacgagctcctcaacccgcgctcctcgcaggcggcagcggcgggcgacgccgacgagctcctcgtgcgggggctggacggcgccgacaagctcgaattgttggctgcaaaaaatttgatggcggcgaacttaaatgggacatctgacccatatgcattgatcacttgtggtgcagagaagcgtttcagctccatggtccctggctcaagaaacccaatgtggggagaggaattcaatttttttgttgatagtcttcctgtaaagataaatgtcacgatatatgactgggacattgtatggaaaagcacaatccttggctcttttactgttactgttgaatctgaggtaccgagtggaccaatttggcatacacttgacagcacatcaggccaggtgtgtcttcatattaaagtaatcaaggttcatgaaagttcctccagggcaataaatagctcagctgaggctggtgctcgtagaaggatttccttggataagcaaggtcctactgtagttcatcaaaagccaggtcctttgcagacaatttttgaactgcctccagatgaggttgttgaccacagttattcatgtgcacttgaaaggtcatttctgtaccatggacgcatgtatgtctcttcatggcatatttgctttcattcaaatgtcttttcaaagcaaatcaaggttgtgattcctttgagagatattgatgagataaggagaagtcagcatgcagttattaatccagctattacaatttttcttcgaatgggagctggaggatttggtgttcctccgttaggatgtccagatggaagagtcaggtacaaatttgcatcgttttggaacagaaaccatacatttagagcattgcatcgagctatgaagaacttcgtaatgatgatagacgctgagaaacaggaacgtgctcagtctgcattacgtgcacacagtagttcaagaaaaaatagcaagaaggagataaatgtaccagaagattgtgctgcattaacagggaagttacaaccttttgtcaaagaagaagttttggtccctgtattcaatggaacttttccctgtactgcagaacagttcttcagtattcttttaagtgatgattcaaattacataacagagtatcgaacggatcggaaggataaagatataaatctgggccaatggcacgttgcagatgagtatgatggccaggtgagggaacttaattgtaaatcaatatgccatagtccaatgtgtcctccttattcagcaatgacagagtggcagcatatagttctttcagctgacaaaatggatctggtatttgagacagtacagcaagtacatgatgttccatttggttccttctttgaggtgcactgtaggtggtgtgtgaaaactatcagttctaactcgtgcagtctcaacataagtgctggtgcgcatttcaagaaatggtgcatcatgcaatctaagataaagagtggtgctgtggatgagctgaagaaagaagtgaaggtgatgttagactttgcgcaggggtatatgctcaaagttagctctcctgaccaagagaacagtaatctcgcgcagcaagacaacacggcgccggatgcgccttctgatacagggtgacagccgccatcacatgacaacgaatcatgccattacgatgttatacacagaagggcaggtggaccagtaactagtagtccacatgaaccacatctaacatgttaagctgacttccaaaagaatgggtggaccgtgtgtagcgtgttaagttcgtttcctgccattgctctatccgtttttggcagtttggctgatgtatatatatagctgtaaacacacgcaaatataaagtggtggctgtggcaggccagtgtgttgtttgagtataaaaacaaagaaagaaacggaagagagaaatatttgccacagaaccaacgcttctcgagtcacagactcacaggggggcatatgttgtgcaaataaaagcttgatgtcctagaaacaactttgcaactgtcagtttgttaaggccttgtttaaatgcact

SEQ ID NO: 66394 - DNA, 2464 bp, Zea Mays
cgcaccgtcgaattccccgtccgaccccactggtcccggcctctgcagggtggcccacccatgacccatcccgcgaccgcgacccgaccgctcccaccttccccgcctcgtcgtccccctgcataaccaccaccccaccaggccaccattccttcctcccctggtcgcccccgcctccatggccctcgcgtgcgcgcccataccgctcccgagtccctaggacgcggcacgcacccttctcgcgggcgcgggcgcgggcgcggggcgcgggagcaggcatggcgtcgcaggtcgctgggtcaaccccggcggtggcggcgcttgggttccttctcccgaccttctgggagatcgaggtcacgtgcgccgccgcgatgatcctcgtggcgctttacgttgcctacgagctcctcaacccgcgctcctcgcaggcggcagcggcgggcgacgccgacgagctcctcgtgcgggggctggacggcgccgacaagttcaaggggggtgtgagcggcccctctgcctatgtagtgaagctcgaattgttggctgcaaaaaatttgatggcggcgaacttaaatgggacatctgacccatatgcattgatcacttgtggtgcagagaagcgtttcagctccatggtccctggctcaagaaacccaatgtggggagaggaattcaatttttttgttgatagtcttcctgtaaagataaatgtcacgatatatgactgggacattgtatggaaaagcacaatccttggctcttttactgttactgttgaatctgaggtaccgagtggaccaatttggcatacacttgacagcacatcaggccaggtgtgtcttcatattaaagtaatcaaggttcatgaaagttcctccagggcaataaatagctcagctgaggctggtgctcgtagaaggatttccttggataagcaaggtcctactgtagttcatcaaaagccaggtcctttgcagacaatttttgaactgcctccagatgaggtcatttctgtaccatggacgcatgtatgtctcttcatggcatatttgctttcattcaaatgtcttttcaaagcaaatcaaggttgtgattcctttgagagatattgatgagataaggagaagtcagcatgcagttattaatccagctattacaatttttcttcgaatgggagctggaggatttggtgttcctccgttaggatgtccagatggaagagtcaggtacaaatttgcatcgttttggaacagaaaccatacatttagagcattgcatcgagctatgaagaacttcgtaatgatgatagacgctgagaaacaggaacgtgctcagtctgcattacgtgcacacagtagttcaagaaaaaatagcaagaaggagataaatgtaccagaagattgtgctgcattaacagggaagttacaaccttttgtcaaagaagaagttttggtccctgtattcaatggaacttttccctgtactgcagaacagttcttcagtattcttttaagtgatgattcaaattacataacagagtatcgaacggatcggaaggataaagatataaatctgggccaatggcacgttgcagatgagtatgatggccaggtgagggaacttaattgtaaatcaatatgccatagtccaatgtgtcctccttattcagcaatgacagagtggcagcatatagttctttcagctgacaaaatggatctggtatttgagacagtacagcaagtacatgatgttccatttggttccttctttgaggtgcactgtaggtggtgtgtgaaaactatcagttctaactcgtgcagtctcaacataagtgctggtgcgcatttcaagaaatggtgcatcatgcaatctaagataaagagtggtgctgtggatgagctgaagaaagaagtgaaggtgatgttagactttgcgcaggggtatatgctcaaagttagctctcctgaccaagagaacagtaatctcgcgcagcaagacaacacggcgccggatgcgccttctgatacagggtgacagccgccatcacatgacaacgaatcatgccattacgatgttatacacagaagggcaggtggaccagtaactagtagtccacatgaaccacatctaacatgttaagctgacttccaaaagaatgggtggaccgtgtgtagcgtgttaagttcgtttcctgccattgctctatccgtttttggcagtttggctgatgtatatatatagctgtaaacacacgcaaatataaagtggtggctgtggcaggccagtgtgttgtttgagtataaaaacaaagaaagaaacggaagagagaaatatttgccacagaaccaacgcttctcgagtcacagactcacaggggggcatatgttgtgcaaataaaagcttgatgtcctagaaacaactttgcaactgtcagtttgttaaggccttgtttaaatgcact

SEQ ID NO: 66395 - DNA, 1941 bp, Zea Mays
agtagggtaaagtgtaaatgatggatacacatgctatcctgaaactgttctgtgggaaaagcaatggtggaagctccatggtccctggctcaagaaacccaatgtggggagaggaattcaatttttttgttgatagtcttcctgtaaagataaatgtcacgatatatgactgggacattgtatggaaaagcacaatccttggctcttttactgttactgttgaatctgaggtaccgagtggaccaatttggcatacacttgacagcacatcaggccaggtgtgtcttcatattaaagtaatcaaggttcatgaaagttcctccagggcaataaatagctcagctgaggctggtgctcgtagaaggatttccttggataagcaaggtcctactgtagttcatcaaaagccaggtcctttgcagacaatttttgaactgcctccagatgaggttgttgaccacagttattcatgtgcacttgaaaggtcatttctgtaccatggacgcatgtatgtctcttcatggcatatttgctttcattcaaatgtcttttcaaagcaaatcaaggttgtgattcctttgagagatattgatgagataaggagaagtcagcatgcagttattaatccagctattacaatttttcttcgaatgggagctggaggatttggtgttcctccgttaggatgtccagatggaagagtcaggtacaaatttgcatcgttttggaacagaaaccatacatttagagcattgcatcgagctatgaagaacttcgtaatgatgatagacgctgagaaacaggaacgtgctcagtctgcattacgtgcacacagtagttcaagaaaaaatagcaagaaggagataaatgtaccagaagattgtgctgcattaacagggaagttacaaccttttgtcaaagaagaagttttggtccctgtattcaatggaacttttccctgtactgcagaacagttcttcagtattcttttaagtgatgattcaaattacataacagagtatcgaacggatcggaaggataaagatataaatctgggccaatggcacgttgcagatgagtatgatggccaggtgagggaacttaattgtaaatcaatatgccatagtccaatgtgtcctccttattcagcaatgacagagtggcagcatatagttctttcagctgacaaaatggatctggtatttgagacagtacagcaagtacatgatgttccatttggttccttctttgaggtgcactgtaggtggtgtgtgaaaactatcagttctaactcgtgcagtctcaacataagtgctggtgcgcatttcaagaaatggtgcatcatgcaatctaagataaagagtggtgctgtggatgagctgaagaaagaagtgaaggtgatgttagactttgcgcaggggtatatgctcaaagttagctctcctgaccaagagaacagtaatctcgcgcagcaagacaacacggcgccggatgcgccttctgatacagggtgacagccgccatcacatgacaacgaatcatgccattacgatgttatacacagaagggcaggtggaccagtaactagtagtccacatgaaccacatctaacatgttaagctgacttccaaaagaatgggtggaccgtgtgtagcgtgttaagttcgtttcctgccattgctctatccgtttttggcagtttggctgatgtatatatatagctgtaaacacacgcaaatataaagtggtggctgtggcaggccagtgtgttgtttgagtataaaaacaaagaaagaaacggaagagagaaatatttgccacagaaccaacgcttctcgagtcacagactcacaggggggcatatgttgtgcaaataaaagcttgatgtcctagaaacaactttgcaactgtcagtttgttaaggccttgtttaaatgcact

SEQ ID NO: 66396 - DNA, 1265 bp, Zea Mays
gtggggttggcttatcaaaggaagagtcaggtacaaatttgcatcgttttggaacagaaaccatacatttagagcattgcatcgagctatgaagaacttcgtaatgatgatagacgctgagaaacaggaacgtgctcagtctgcattacgtgcacacagtagttcaagaaaaaatagcaagaaggagataaatgtaccagaagattgtgctgcattaacagggaagttacaaccttttgtcaaagaagaagttttggtccctgtattcaatggaacttttccctgtactgcagaacagttcttcagtattcttttaagtgatgattcaaattacataacagagtatcgaacggatcggaaggataaagatataaatctgggccaatggcacgttgcagatgagtatgatggccaggtgagggaacttaattgtaaatcaatatgccatagtccaatgtgtcctccttattcagcaatgacagagtggcagcatatagttctttcagctgacaaaatggatctggtatttgagacagtacagcaagtacatgatgttccatttggttccttctttgaggtgcactgtaggtggtgtgtgaaaactatcagttctaactcgtgcagtctcaacataagtgctggtgcgcatttcaagaaatggtgcatcatgcaatctaagataaagagtggtgctgtggatgagctgaagaaagaagtgaaggtgatgttagactttgcgcaggggtatatgctcaaagttagctctcctgaccaagagaacagtaatctcgcgcagcaagacaacacggcgccggatgcgccttctgatacagggtgacagccgccatcacatgacaacgaatcatgccattacgatgttatacacagaagggcaggtggaccagtaactagtagtccacatgaaccacatctaacatgttaagctgacttccaaaagaatgggtggaccgtgtgtagcgtgttaagttcgtttcctgccattgctctatccgtttttggcagtttggctgatgtatatatatagctgtaaacacacgcaaatataaagtggtggctgtggcaggccagtgtgttgtttgagtataaaaacaaagaaagaaacggaagagagaaatatttgccacagaaccaacgcttctcgagtcacagactcacaggggggcatatgttgtgcaaataaaagcttgatgtcctagaaacaactttgcaactgtcagtttgttaaggccttgtttaaatgcact

SEQ ID NO: 66397 - DNA, 585 bp, Zea Mays
gtcagctaggacagcttgagcaactgaagaaagaagtgaaggtgatgttagactttgcgcaggggtatatgctcaaagttagctctcctgaccaagagaacagtaatctcgcgcagcaagacaacacggcgccggatgcgccttctgatacagggtgacagccgccatcacatgacaacgaatcatgccattacgatgttatacacagaagggcaggtggaccagtaactagtagtccacatgaaccacatctaacatgttaagctgacttccaaaagaatgggtggaccgtgtgtagcgtgttaagttcgtttcctgccattgctctatccgtttttggcagtttggctgatgtatatatatagctgtaaacacacgcaaatataaagtggtggctgtggcaggccagtgtgttgtttgagtataaaaacaaagaaagaaacggaagagagaaatatttgccacagaaccaacgcttctcgagtcacagactcacaggggggcatatgttgtgcaaataaaagcttgatgtcctagaaacaactttgcaactgtcagtttgttaaggccttgtttaaatgcact

SEQ ID NO: 66398 - DNA, 3468 bp, Zea Mays
cttcactccacatcctagtatcccacaggccacacagccaacttggctggagaaagaggtgtagagagactcgtctctagctctctgctcctctcggctggagcgagcggtccactccagggctggaggcagccacagccaagccgaaggcaacgagtggagaccggacaccggagccgcggagcgggagaccatccttgacttgttttttccgccccttggatgtgacgactgaccggatgagacgcgcgcggccgcgcctctccccactccgctgaccggacctgcgtgccctgcgaccgcaccagcgcggagctgcgtatcccgccagcggtgagccggtggaaggaccccgcccgccctgctcttctctgctccaaatccaaaccagcctttttccccctccgtgcgcccacagcaaagcccgatgaggagacgagagtgaagaagaagaagaaaccactaggcgcggcaaggatttgctccgagaggttccattccgtatccggatcaccgtgcggaaattcttggttggtatggtatgagtaaatgcgatctgcagtgacttgtgagacaggtttctgcacattagattcacgaaaaagttgcgacctttattgcattcaggagtgttggtcggaactgccagagtgatgcgcttaaggattcacgacaatggcttcattggtgcccggtgtcctcgtgaagctccttcagcatatgaacacggatgtaaaagtcgccggcgagcatcgctcctcgctccttcaggttgtcagcatcgtcccagcgctcgccgggagcgatcttttcaccaacaaaggcttctacctcaaggtgtcggattcatcccatgcgacctacgtttcccttccagaggaacagcatgatctcatcttgagcgacaagattcagctgggccagttcatccatgtagaccgtctagaggctgccactcctgttcccatccttagaggagttcgcccagttccgggtcgccatgcttgcgttggcacccctgaggatcttgtggtgaccagctcctccagttttcatggcagcaagaaagcgcaaccatcaaatggaacgaatgatgccagcatcttgtcgctagaaaaggaaacgagcaaattggagaaaataaatgcttcacgtaagcttaccgggacggaaaataagaagccgatgctcaccaaatcaaactcttcactgtcaagacaagctttgaatgtgattggtgataagaaggaagcggttaaatcaaagaggaacagagtaaaaggagcagagaaagcttcatcttctaggctttccttgttagaaaaggctgcttctgttttgaaggctactagtgccgggagaaagccctctgctgccaattcgatcagtagctctgtgttaagtattggatcagggccaaaggccttgagaagaagctgggaaggaaacacggatattaaaggaaaaggcaattcagaatcaaagacagccaaacctgacaagaagtctgataacaagatgccaatgactcctagacgaaaatcaccagtggaccagaaggtgccacctaaagatgatagccagaaagctgctaggaagagcaccgcaagtgctccctcagatgacgctgacaaagcagccaagaagcatattcctactgtaaagagaacatctggggtcttaggaaactcgaatgttacaaatctagtgaagattcctcccaaccgcaaaaaactaacagatattagcacttcatggacatcactccctccatcacttgccaaactaggaaaggagcttcttaagtacagggaatcggcacaaatagctgctgctgaagccatgcaagaagcttccgctgcagagagcttgctcagatgtttgagatggtccaggacatggatcaacacgtttctgaactgtctccgaatgctattgtactgcataatgatgcttacagatgctgtacaggaagtttctcctgctgtacttgtagctgcatgctgttgtcttctactgaaagtacctgtttatttacattgctagctgtatattctccagttaatccaatggttgataatctcgaaatcactgtatagatttcaacttggtgtcttgagtcagaagaacctgccacttttagcttaccgcgattatttgtgttggaaagttcacggcagagctgcagcatttttttttgctaccaatgttgattccagttactaaccgtacatatatctaactgcattgtatgtattggccggagcagctcgtacgcggaggtgagctccacggcggaggagcacaacccgcagccagccgtagagaagttcttcaccctccacgccgcgctttcgcgcgccacggtgatcaccgacaccctcaccaagtctgccacatctgcagcatcgccagattgctcggcagctagcgacgctggaactgtgggctccgctacagacgaggagaccgctgccgtcacagccgagcgccggcgccgagctacgtcctgggtgagcgccgctctcgctacggacctgtccgccttcggcatctacaacctcaaaccggtccccgccaccgtctcctcgccgctggccgtggtcgtcgttgacgagtccgcgaagccggcgacggccgcagccacggctacgaaatcatcgccgtcgccgaagtcgcggatgtcccctgcgaaggggaaagcgaggacgggcgctgcgacggcagcagcagcggcgctgacgaagacgtccgcgccgacggagtgggagagaggagaaggggcagaggagaggggcgaactggcgaaacggctcggagaggagtcaaggggttggttcctcggcttcgtggagcggttcctggactctgacgtggcggcgtccgcgccgtgggaccgcgagcgtgcggccaggatgctcccgcagctaaagcgggtcaacgactggctcggcgagatcgcaaagcgcagcgagactcagtcgctgccgcctgccgacgcggacggtgaggcgaccaccacgagcaccgcccctgtccccccgaacgacggctgcggcgtgcccgaggagacgatagagcggttaaggaagaagatctacgaatatctcctcaccaatgtcgactctgccgccgcaatgcttggcggtggcggaggcagcgcggcggccgccctgacgaacgggaaaaagggctgacgcgtaaacgggacgaacgggaaaaagagctgacaggtaaacgtgtggtctaattgggccgttagttgtgtggaatttgattgggccaaaaaatgggctggatgagctaatgtaggcttagtttctgttgtttctttgctgggctttgagcctttctgcttctcttagtgtttcttattatggctacagggaaaaaaaaggtggtgaaaatttgacttgtattcccctttctctcaaattataagtcattttatttttaaaagttaaaata

SEQ ID NO: 66399 - DNA, 3233 bp, Zea Mays
cacacagccaacttggctggagaaagaggtgtagagagactcgtctctagctctctgctcctctcggctggagcgagcggtccactccagggctggaggcagccacagccaagccgaaggcaacgagtggagaccggacaccggagccgcggagcgggagaccatccttgacttgttttttccgccccttggatgtgacgactgaccggatgagacgcgcgcggccgcgcctctccccactccgctgaccggacctgcgtgccctgcgaccgcaccagcgcggagctgcgtatcccgccagcggtgagccggtggaaggaccccgcccgccctgctcttctctgctccaaatccaaaccagcctttttccccctccgtgcgcccacagcaaagcccgatgaggagacgagagtgaagaagaagaagaaaccactaggcgcggcaaggatttgctccgagaggttcgcgttcccccgattccctatcctcctcccctgctccaagatttttttcccttttccctttccttccctctccgagcgcttcgcttttgcgggtttttgccttctcttttgcacccaatcgactctctctctctctctctctctctctctctcttcccccgaaatattactatttgccattgcttgccttgccgcttcctccgacaaggaagaacacttgttcaggacaaccctgggagtgatgcgcttaaggattcacgacaatggcttcattggtgcccggtgtcctcgtgaagctccttcagcatatgaacacggatgtaaaagtcgccggcgagcatcgctcctcgctccttcaggttgtcagcatcgtcccagcgctcgccgggagcgatcttttcaccaacaaaggcttctacctcaaggtgtcggattcatcccatgcgacctacgtttcccttccagaggaacagcatgatctcatcttgagcgacaagattcagctgggccagttcatccatgtagaccgtctagaggctgccactcctgttcccatccttagaggagttcgcccagttccgggtcgccatgcttgcgttggcacccctgaggatcttgtggtgaccagctcctccagttttcatggcagcaagaaagcgcaaccatcaaatggaacgaatgatgccagcatcttgtcgctagaaaaggaaacgagcaaattggagaaaataaatgcttcacgtaagcttaccgggacggaaaataagaagccgatgctcaccaaatcaaactcttcactgtcaagacaagctttgaatgtgattggtgataagaaggaagcggttaaatcaaaggtgaagccagctattaccaggtctacaccttcatcaccaaccagtgtctattctttacctgcgtcattcgacagattctctaatgatctgaaacagaggaacagagtaaaaggagcagagaaagcttcatcttctaggctttccttgttagaaaaggctgcttctgttttgaaggctactagtgccgggagaaagccctctgctgccaattcgatcagtagctctgtgttaagtattggatcagggccaaaggccttgagaagaagctgggaaggaaacacggatattaaaggaaaaggcaattcagaatcaaagacagccaaacctgacaagaagtctgataacaagatgccaatgactcctagacgaaaatcaccagtggaccagaaggtgccacctaaagatgatagccagaaagctgctaggaagagcaccgcaagtgctccctcagatgacgctgacaaagcagccaagaagcatattcctactgtaaagagaacatctggggtcttaggaaactcgaatgttacaaatctagtgaagattcctcccaaccgcaaaaaactaacagatattagcacttcatggacatcactccctccatcacttgccaaactaggaaaggagcttcttaagtacagggaatcggcacaaatagctgctgctgaagccatgcaagaagcttccgctgcagagagcttgctcagatgtttgagctcgtacgcggaggtgagctccacggcggaggagcacaacccgcagccagccgtagagaagttcttcaccctccacgccgcgctttcgcgcgccacggtgatcaccgacaccctcaccaagtctgccacatctgcagcatcgccagattgctcggcagctagcgacgctggaactgtgggctccgctacagacgaggagaccgctgccgtcacagccgagcgccggcgccgagctacgtcctgggtgagcgccgctctcgctacggacctgtccgccttcggcatctacaacctcaaaccggtccccgccaccgtctcctcgccgctggccgtggtcgtcgttgacgagtccgcgaagccggcgacggccgcagccacggctacgaaatcatcgccgtcgccgaagtcgcggatgtcccctgcgaaggggaaagcgaggacgggcgctgcgacggcagcagcagcggcgctgacgaagacgtccgcgccgacggagtgggagagaggagaaggggcagaggagaggggcgaactggcgaaacggctcggagaggagtcaaggggttggttcctcggcttcgtggagcggttcctggactctgacgtggcggcgtccgcgccgtgggaccgcgagcgtgcggccaggatgctcccgcagctaaagcgggtcaacgactggctcggcgagatcgcaaagcgcagcgagactcagtcgctgccgcctgccgacgcggacggtgaggcgaccaccacgagcaccgcccctgtccccccgaacgacggctgcggcgtgcccgaggagacgatagagcggttaaggaagaagatctacgaatatctcctcaccaatgtcgactctgccgccgcaatgcttggcggtggcggaggcagcgcggcggccgccctgacgaacgggaaaaagggctgacgcgtaaacgggacgaacgggaaaaagagctgacaggtaaacgtgtggtctaattgggccgttagttgtgtggaatttgattgggccaaaaaatgggctggatgagctaatgtaggcttagtttctgttgtttctttgctgggctttgagcctttctgcttctcttagtgtttcttattatggctacagggaaaaaaaaggtggtgaaaatttgacttgtattcccctttctctcaaattataagtcattttatttttaaaagttaaaata

SEQ ID NO: 66400 - DNA, 2019 bp, Zea Mays
cacacagccaacttggctggagaaagaggtgtagagagactcgtctctagctctctgctcctctcggctggagcgagcggtccactccagggctggaggcagccacagccaagccgaaggcaacgagtggagaccggacaccggagccgcggagcgggagaccatccttgacttgttttttccgccccttggatgtgacgactgaccggatgagacgcgcgcggccgcgcctctccccactccgctgaccggacctgcgtgccctgcgaccgcaccagcgcggagctgcgtatcccgccagcggtgagccggtggaaggaccccgcccgccctgctcttctctgctccaaatccaaaccagcctttttccccctccgtgcgcccacagcaaagcccgatgaggagacgagagtgaagaagaagaagaaaccactaggcgcggcaaggatttgctccgagagactcctagacgaaaatcaccagtggaccagaaggtgccacctaaagatgatagccagaaagctgctaggaagagcaccgcaagtgctccctcagatgacgctgacaaagcagccaagaagcatattcctactgtaaagagaacatctggggtcttaggaaactcgaatgttacaaatctagtgaagattcctcccaaccgcaaaaaactaacagatattagcacttcatggacatcactccctccatcacttgccaaactaggaaaggagcttcttaagtacagggaatcggcacaaatagctgctgctgaagccatgcaagaagcttccgctgcagagagcttgctcagatgtttgagctcgtacgcggaggtgagctccacggcggaggagcacaacccgcagccagccgtagagaagttcttcaccctccacgccgcgctttcgcgcgccacggtgatcaccgacaccctcaccaagtctgccacatctgcagcatcgccagattgctcggcagctagcgacgctggaactgtgggctccgctacagacgaggagaccgctgccgtcacagccgagcgccggcgccgagctacgtcctgggtgagcgccgctctcgctacggacctgtccgccttcggcatctacaacctcaaaccggtccccgccaccgtctcctcgccgctggccgtggtcgtcgttgacgagtccgcgaagccggcgacggccgcagccacggctacgaaatcatcgccgtcgccgaagtcgcggatgtcccctgcgaaggggaaagcgaggacgggcgctgcgacggcagcagcagcggcgctgacgaagacgtccgcgccgacggagtgggagagaggagaaggggcagaggagaggggcgaactggcgaaacggctcggagaggagtcaaggggttggttcctcggcttcgtggagcggttcctggactctgacgtggcggcgtccgcgccgtgggaccgcgagcgtgcggccaggatgctcccgcagctaaagcgggtcaacgactggctcggcgagatcgcaaagcgcagcgagactcagtcgctgccgcctgccgacgcggacggtgaggcgaccaccacgagcaccgcccctgtccccccgaacgacggctgcggcgtgcccgaggagacgatagagcggttaaggaagaagatctacgaatatctcctcaccaatgtcgactctgccgccgcaatgcttggcggtggcggaggcagcgcggcggccgccctgacgaacgggaaaaagggctgacgcgtaaacgggacgaacgggaaaaagagctgacaggtaaacgtgtggtctaattgggccgttagttgtgtggaatttgattgggccaaaaaatgggctggatgagctaatgtaggcttagtttctgttgtttctttgctgggctttgagcctttctgcttctcttagtgtttcttattatggctacagggaaaaaaaaggtggtgaaaatttgacttgtattcccctttctctcaaattataagtcattttatttttaaaagttaaaata

SEQ ID NO: 66401 - DNA, 3223 bp, Zea Mays
cacacagccaacttggctggagaaagaggtgtagagagactcgtctctagctctctgctcctctcggctggagcgagcggtccactccagggctggaggcagccacagccaagccgaaggcaacgagtggagaccggacaccggagccgcggagcgggagaccatccttgacttgttttttccgccccttggatgtgacgactgaccggatgagacgcgcgcggccgcgcctctccccactccgctgaccggacctgcgtgccctgcgaccgcaccagcgcggagctgcgtatcccgccagcggtgagccggtggaaggaccccgcccgccctgctcttctctgctccaaatccaaaccagcctttttccccctccgtgcgcccacagcaaagcccgatgaggagacgagagtgaagaagaagaagaaaccactaggcgcggcaaggatttgctccgagagagtgatgcgcttaaggattcacgacaatggcttcattggtgcccggtgtcctcgtgaagctccttcagcatatgaacacggatgtaaaagtcgccggcgagcatcgctcctcgctccttcaggttgtcagcatcgtcccagcgctcgccgggagcgatcttttcaccaacaaaggcttctacctcaaggtgtcggattcatcccatgcgacctacgtttcccttccagaggaacagcatgatctcatcttgagcgacaagattcagctgggccagttcatccatgtagaccgtctagaggctgccactcctgttcccatccttagaggagttcgcccagttccgggtcgccatgcttgcgttggcacccctgaggatcttgtggtgaccagctcctccagttttcatggcagcaagaaagcgcaaccatcaaatggaacgaatgatgccagcatcttgtcgctagaaaaggaaacgagcaaattggagaaaataaatgcttcacgtaagcttaccgggacggaaaataagaagccgatgctcaccaaatcaaactcttcactgtcaagacaagctttgaatgtgattggtgataagaaggaagcggttaaatcaaaggtgaagccagctattaccaggtctacaccttcatcaccaaccagtgtctattctttacctgcgtcattcgacagattctctaatgatctgaaacagaggaacagagtaaaaggagcagagaaagcttcatcttctaggctttccttgttagaaaaggctgcttctgttttgaaggctactagtgccgggagaaagccctctgctgccaattcgatcagtagctctgtgttaagtattggatcagggccaaaggccttgagaagaagctgggaaggaaacacggatattaaaggaaaaggcaattcagaatcaaagacagccaaacctgacaagaagtctgataacaagatgccaatgactcctagacgaaaatcaccagtggaccagaaggtgccacctaaagatgatagccagaaagctgctaggaagagcaccgcaagtgctccctcagatgacgctgacaaagcagccaagaagcatattcctactgtaaagagaacatctggggtcttaggaaactcgaatgttacaaatctagtgaagattcctcccaaccgcaaaaaactaacagatattagcacttcatggacatcactccctccatcacttgccaaactaggaaaggagcttcttaagtacagggaatcggcacaaatagctgctgctgaagccatgcaagaagcttccgctgcagagagcttgctcagatgtttgagatggtccaggacatggatcaacacgtttctgaactgtctccgaatgctattgtactgcataatgatgcttacagatgctgtacaggaagtttctcctgctgtacttgtagctgcatgctgttgtcttctactgaaagtacctgtttatttacattgctagctgtatattctccagttaatccaatggttgataatctcgaaatcactgtatagatttcaacttggtgtcttgagtcagaagaacctgccacttttagcttaccgcgattatttgtgttggaaagttcacggcagagctgcagcatttttttttgctaccaatgttgattccagttactaaccgtacatatatctaactgcattgtatgtattggccggagcagctcgtacgcggaggtgagctccacggcggaggagcacaacccgcagccagccgtagagaagttcttcaccctccacgccgcgctttcgcgcgccacggtgatcaccgacaccctcaccaagtctgccacatctgcagcatcgccagattgctcggcagctagcgacgctggaactgtgggctccgctacagacgaggagaccgctgccgtcacagccgagcgccggcgccgagctacgtcctgggtgagcgccgctctcgctacggacctgtccgccttcggcatctacaacctcaaaccggtccccgccaccgtctcctcgccgctggccgtggtcgtcgttgacgagtccgcgaagccggcgacggccgcagccacggctacgaaatcatcgccgtcgccgaagtcgcggatgtcccctgcgaaggggaaagcgaggacgggcgctgcgacggcagcagcagcggcgctgacgaagacgtccgcgccgacggagtgggagagaggagaaggggcagaggagaggggcgaactggcgaaacggctcggagaggagtcaaggggttggttcctcggcttcgtggagcggttcctggactctgacgtggcggcgtccgcgccgtgggaccgcgagcgtgcggccaggatgctcccgcagctaaagcgggtcaacgactggctcggcgagatcgcaaagcgcagcgagactcagtcgctgccgcctgccgacgcggacggtgaggcgaccaccacgagcaccgcccctgtccccccgaacgacggctgcggcgtgcccgaggagacgatagagcggttaaggaagaagatctacgaatatctcctcaccaatgtcgactctgccgccgcaatgcttggcggtggcggaggcagcgcggcggccgccctgacgaacgggaaaaagggctgacgcgtaaacgggacgaacgggaaaaagagctgacagggaaaaaaaaggtggtgaaaatttgacttgtattcccctttctctcaaattataagtcattttatttttaaaagttaaaata

SEQ ID NO: 66402 - DNA, 3299 bp, Zea Mays
cacacagccaacttggctggagaaagaggtgtagagagactcgtctctagctctctgctcctctcggctggagcgagcggtccactccagggctggaggcagccacagccaagccgaaggcaacgagtggagaccggacaccggagccgcggagcgggagaccatccttgacttgttttttccgccccttggatgtgacgactgaccggatgagacgcgcgcggccgcgcctctccccactccgctgaccggacctgcgtgccctgcgaccgcaccagcgcggagctgcgtatcccgccagcggtgagccggtggaaggaccccgcccgccctgctcttctctgctccaaatccaaaccagcctttttccccctccgtgcgcccacagcaaagcccgatgaggagacgagagtgaagaagaagaagaaaccactaggcgcggcaaggatttgctccgagaggttcgcgttcccccgattccctatcctcctcccctgctccaagatttttttcccttttccctttccttccctctccgagcgcttcgcttttgcgggtttttgccttctcttttgcacccaatcgactctctctctctctctctctctctctctctcttcccccgaaatattactatttgccattgcttgccttgccgcttcctccgacaaggaagaacacttgttcaggacaaccctggggtgagggttggtgcgaagtgtctgctccttgctgttatatcctccgctaattgctttgcgtccaagagtgatgcgcttaaggattcacgacaatggcttcattggtgcccggtgtcctcgtgaagctccttcagcatatgaacacggatgtaaaagtcgccggcgagcatcgctcctcgctccttcaggttgtcagcatcgtcccagcgctcgccgggagcgatcttttcaccaacaaaggcttctacctcaaggtgtcggattcatcccatgcgacctacgtttcccttccagaggaacagcatgatctcatcttgagcgacaagattcagctgggccagttcatccatgtagaccgtctagaggctgccactcctgttcccatccttagaggagttcgcccagttccgggtcgccatgcttgcgttggcacccctgaggatcttgtggtgaccagctcctccagttttcatggcagcaagaaagcgcaaccatcaaatggaacgaatgatgccagcatcttgtcgctagaaaaggaaacgagcaaattggagaaaataaatgcttcacgtaagcttaccgggacggaaaataagaagccgatgctcaccaaatcaaactcttcactgtcaagacaagctttgaatgtgattggtgataagaaggaagcggttaaatcaaaggtgaagccagctattaccaggtctacaccttcatcaccaaccagtgtctattctttacctgcgtcattcgacagattctctaatgatctgaaacagaggaacagagtaaaaggagcagagaaagcttcatcttctaggctttccttgttagaaaaggctgcttctgttttgaaggctactagtgccgggagaaagccctctgctgccaattcgatcagtagctctgtgttaagtattggatcagggccaaaggccttgagaagaagctgggaaggaaacacggatattaaaggaaaaggcaattcagaatcaaagacagccaaacctgacaagaagtctgataacaagatgccaatgactcctagacgaaaatcaccagtggaccagaaggtgccacctaaagatgatagccagaaagctgctaggaagagcaccgcaagtgctccctcagatgacgctgacaaagcagccaagaagcatattcctactgtaaagagaacatctggggtcttaggaaactcgaatgttacaaatctagtgaagattcctcccaaccgcaaaaaactaacagatattagcacttcatggacatcactccctccatcacttgccaaactaggaaaggagcttcttaagtacagggaatcggcacaaatagctgctgctgaagccatgcaagaagcttccgctgcagagagcttgctcagatgtttgagctcgtacgcggaggtgagctccacggcggaggagcacaacccgcagccagccgtagagaagttcttcaccctccacgccgcgctttcgcgcgccacggtgatcaccgacaccctcaccaagtctgccacatctgcagcatcgccagattgctcggcagctagcgacgctggaactgtgggctccgctacagacgaggagaccgctgccgtcacagccgagcgccggcgccgagctacgtcctgggtgagcgccgctctcgctacggacctgtccgccttcggcatctacaacctcaaaccggtccccgccaccgtctcctcgccgctggccgtggtcgtcgttgacgagtccgcgaagccggcgacggccgcagccacggctacgaaatcatcgccgtcgccgaagtcgcggatgtcccctgcgaaggggaaagcgaggacgggcgctgcgacggcagcagcagcggcgctgacgaagacgtccgcgccgacggagtgggagagaggagaaggggcagaggagaggggcgaactggcgaaacggctcggagaggagtcaaggggttggttcctcggcttcgtggagcggttcctggactctgacgtggcggcgtccgcgccgtgggaccgcgagcgtgcggccaggatgctcccgcagctaaagcgggtcaacgactggctcggcgagatcgcaaagcgcagcgagactcagtcgctgccgcctgccgacgcggacggtgaggcgaccaccacgagcaccgcccctgtccccccgaacgacggctgcggcgtgcccgaggagacgatagagcggttaaggaagaagatctacgaatatctcctcaccaatgtcgactctgccgccgcaatgcttggcggtggcggaggcagcgcggcggccgccctgacgaacgggaaaaagggctgacgcgtaaacgggacgaacgggaaaaagagctgacaggtaaacgtgtggtctaattgggccgttagttgtgtggaatttgattgggccaaaaaatgggctggatgagctaatgtaggcttagtttctgttgtttctttgctgggctttgagcctttctgcttctcttagtgtttcttattatggctacagggaaaaaaaaggtggtgaaaatttgacttgtattcccctttctctcaaattataagtcattttatttttaaaagttaaaata

SEQ ID NO: 66403 - DNA, 1435 bp, Zea Mays
cgcaaagatgccgagctgtttatcggttctataatgagggggcagccgtccttgctgccaagcgtgcggaagcaatggcccgggaagccactgctgtatggaatcggcaccctgttggtcatgccactgaggacactgtatggagtgggtcgtgtttttggcgcaggacggtttctctgcaacatgaccaacgtctcttcgtcgctgcaaattgagcttgtaccatgccttcgagataactatgcgtatatcctgcatgatgttgatactggaacagttggagtagtggatccttctgaggctatgcctattataaatgcattggaaaagagaaaccagaacttgacttatatactgaacacccatcatcactatgatcatactggtggaaacttggaattgaaggcaaaatatggtgcaaaggtaattggttctgagaaggataaggacagaatacctggcattgacatcacgcttaaggagggtgacacatggatgttcgctggccatcaagttcttgtactggaaactcctgggcatacaacaggtcatgtgtgctattatttcgctggttctggagctatatttacaggtgacaccttgttcaatctatcatgcggaaagctttttgaagggactccacagcagatgtatgcctcactccagaaaattacagctctacccgatgatacaaaagtatactgtgggcatgaatataccttgagtaatgcaaagtttgccttgagtgtagaaccgggaaataaagcattgcaggaatatgctgcaaatgcagctgagctgcgtaataagaatatacccacggtgccaacaacaattggaagggagaaggaatgcaatcctttcttgcggacctccaatccagaaattaagagaacactgtccgttccagatcatttcgatgaagatcgggtgcttggagttgtccgtcgagcaaaagataacttctgactaacaaaaggaaatgctcgtgacgtatgacccatatcttgttaaagttcagacagagaacctaagtcacaataaacataggaggaaatgaaggtatatatgtttgagctagattttgaaatgcttcggcaaaattatgtcgagtgtatgtagcttgggcagtgcagtgcttgtctatagcaaccaatgattcttttgaccactacaaataagcgtgttctgctatcatctactctctgtaaaaaaaacgccacgtagccgtttcatagtcgatcttcagttcttattcaatacttcaacttggcggtttgcactgtggcagtggatattacttgaatgcattgcactgcgatctgtagggatccatgtttgttcgctgcatgaatatggtatcaacagtgcagtgcttggaaatgtacatataggctaatatgaaaaggtgcttattgggggcctttgcttgatg

SEQ ID NO: 66404 - DNA, 1465 bp, Zea Mays
catccctacttccctttactcgagctaaatgagggggcagccgtccttgctgccaagcgtgcggaagcaatggcccgggaagccactgctgtatggaatcggcaccctgttggtcatgccactgaggacactgtatggagtgggtcgtgtttttggcgcaggacggtttctctgcaacatgaccaacgtctcttcgtcgctgcaaattgagcttgtaccatgccttcgagataactatgcgtatatcctgcatgatgttgatactggaacagttggagtagtggatccttctgaggctatgcctattataaatgcattggaaaagagaaaccagaacttgacttatatactgaacacccatcatcactatgatcatactggtggaaacttggaattgaaggcaaaatatggtgcaaaggtaattggttctgagaaggataaggacagaatacctggcattgacatcacgcttaaggagggtgacacatggatgttcgctggccatcaagttcttgtactggaaactcctgggcatacaacaggtcatgtgtgctattatttcgctggttctggagctatatttacaggtgacaccttgttcaatctatcatgcggaaagctttttgaagggactccacagcaggtttttcacttgcttgcaaatatcttcatttacatatgtatgcctcactccagaaaattacagctctacccgatgatacaaaagtatactgtgggcatgaatataccttgagtaatgcaaagtttgccttgagtgtagaaccgggaaataaagcattgcaggaatatgctgcaaatgcagctgagctgcgtaataagaatatacccacggtgccaacaacaattggaagggagaaggaatgcaatcctttcttgcggacctccaatccagaaattaagagaacactgtccgttccagatcatttcgatgaagatcgggtgcttggagttgtccgtcgagcaaaagataacttctgactaacaaaaggaaatgctcgtgacgtatgacccatatcttgttaaagttcagacagagaacctaagtcacaataaacataggaggaaatgaaggtatatatgtttgagctagattttgaaatgcttcggcaaaattatgtcgagtgtatgtagcttgggcagtgcagtgcttgtctatagcaaccaatgattcttttgaccactacaaataagcgtgttctgctatcatctactctctgtaaaaaaaacgccacgtagccgtttcatagtcgatcttcagttcttattcaatacttcaacttggcggtttgcactgtggcagtggatattacttgaatgcattgcactgcgatctgtagggatccatgtttgttcgctgcatgaatatggtatcaacagtgcagtgcttggaaatgtacatataggctaatatgaaaaggtgcttattgggggcctttgcttgatg

SEQ ID NO: 66405 - DNA, 3673 bp, Zea Mays
cacactgcagagccccctcttgttcgcgtccgaaccagattccccgtcccctctagggttacgcccactctcccccgccgctccggcgatgtcgtcggagcctctacccgcggagtcacccgaggcgcccgcttccgcctctggctccccttcgaaggacgccgtcggcactgaggtcggcgccgctgcggggtccccggaaacgaacacgctctgggtgggcaacctgccctcgcacgtgaccgagggcgatttgttggcgctgtttgggccgcacggcgcgctcgattgcgcccttgcacgagccggatctcgcagctacgcgttcgtcctcttccgttccccagccgaggctcgcgaagccgtcgaggccacccggggtgaaaaggtcaagggggccgccatgcgcaccgagttcgcgcggccggctagagctgttagaaatctgtgggttggtggcattagcccatcgatttcaaaggaggagcttgagggggagtttctgaagttcggaaaagttgaagatccttgaatggaaaaatgctaggtggcaaggaattgtgtgttgatttccagaggtccaagggaagagcggaatggtcagaagctagcagcttcaatggtagagtaccagggccagtgggtgataagagaggcagtggccctctgaagagttctgctggagtgcggatgcgagaggcacagcctaccaatgttctctgggttggttttccaggttcttatagagtcattgatgaggaggcacttaagcatgccatgtcagtattcggtgtcgttacgaagataaaagttttccagacaaggcagtatgcttttgttgagtttgcaaatgttgcggaagcttgtaatgctaagatgaatctagatggtcatcttttcaatgatcccaggattcagattcttttctcaaacagtgggcttgcaccaaacaaattggacaacccaacatcggttgctggatttcctagttcagaaatctattccagtgatggtcgtctaggccctggtattggcagtggaactttgcaagggtatgatccaccaagaggaggaagaacaagatattacgattatgcgggtatgcctactccaggtggtatcctttcacaacctgaaccatttgatccaagagaagcaaaaagaatgaggcttgctgctggtgctgacccttacgatgtaagggcaggcagcacaggtctttattctgctggataccgtcatcagggcagttctgtgcacgctgagggaagctcaagtcctgttattcgagtccggggcacagtgcatcgtacatcatacattgagcactgttggcgtggcagtattgccaaaggtggatcccctgtttgtcgtgctcgttgtttgcctataacaaagggcagtgacatacctttaccggatgttatgaattgctcagctcggactggattggatatgctggcgaagcactacgcagatgccactggatttgacattgtctttttcttgccagatagtgaagatgactttgtttcttatactgagttcttgcgttacctgggctcaaaaagtcgggcaggggttgtaaaagttgatgcagggactacattatttttggttccaccatcagatttcctaacaaatgtgttacaagttgatggtccagagcgcctttatggtgtggtattacacattccacaaatctctgctgctgctgcactgaggccacagttaactgggaccgaacaacaaccttactatgatgaaaggggaactctgcctacttcacaaagaaagtatagtatcatttctcctaatgacagtggccaccttgatgctgattatcggacatctttgcatgaggattcaatgcatcggttggggcatattcctggaaggcctcgggtggatgaaggacaagcagttcaaccagctcttgcaggttttcctgctaatcaagcagctgggctgcaagtacaatcttcactcaagcctgacattatggctacattagcaaaacttctgcctagtgtgcaatcgtcaccgctggtaagtggtcagatgaatgccatagacagaacatcgcagatacaggatccatccatgctttcaaaagtatggaatcctgaaaaccaagttactgcttcaaattcatcctttgggcaaatggctaatgttcagcatccaggacagcagtttagtggccaagcttcagctgctcatttgacaaactatgggaacatggtgagtgctcaggagcgctcaatacaacatactgcttacaaccctgaagttactttgaacttgccaccaccacctccacttccaacaataccacacagttctgctacattacagtctcaaggtggccacagtttgccctcacagacaaaccagcaactgtatcagccagagcagtattatgtgccccaaaacaactatggtccattagttccagttagccattctaaccttcaaatcagcaacactaacaaccccacccttaccatcccacaagtgaaccctggacctccaacaaataatcagattgggaatttggcccagccacagcattctatgccactgcatgttgatagagcaagtcaggatttctcttctcaggggcaacaacaaaatcgtggtcctggtgctgcacaagctcccgaggaggataaaagcaagaagtaccaggcgacactccagttagctcaaaacctactgcttcagttacagcagcgtggatctggaaatcaatcctgagacctaattattgcttcaggtaagtgcacctcgtcatttaatattttctgtttgctacattttatctgcttgcgcaatcttcatctaattattttcaacctaatcctagcgtagcttgcatttcaaaatgtaatttaatgaaatgagttgttttaaacaatgctagcaacagagggctactgcaaatgaccaatgtttgccatctcaagattgtgctaggttggcttagaatttgcacgccacacacaattaacactgaaacactagagaaacgtttaatcttagagattcatctcctagcaagtaaggccaggttgaacacttgatcttagttttattttgcgtgcataatacatctcttgccagtttgcttgcattgatatgttgttatctgtgtattctagcttgactgtcttgctagatctgatctgcacagttccttgatagtctagtgagagtttcagcattagagtaaaacagtagataaagtcgttgctaaaacaccacgttgcttacatgaggcaatattagatctttaattgattaatgtatggacatctttaatgtaatggttttatgatatctatacttgagaagcagtggggataccttgaaacaaaaagcttctctttcaccagctttaacgcagttcttggttctcgtggtaaagtgtgagtacccatttctcacaatacgatgagaaaccatgcttcagtatggtgattcgtctacctctgcgaaccctgctgccttctgcgtgactcggttacccccctgccgctttcttctatgtagtatcggacaatctttcgtagacaataatgcagtcaacgccttatccaaagcaccatgaccccgtagtatattcatccttggcatgcaaccaacctcgtttcggtcgaacaaaaaaaaa

SEQ ID NO: 66406 - DNA, 2987 bp, Zea Mays
cacactgcagagccccctcttgttcgcgtccgaaccagattccccgtcccctctagggttacgcccactctcccccgccgctccggcgatgtcgtcggagcctctacccgcggagtcacccgaggcgcccgcttccgcctctggctccccttcgaaggacgccgtcggcactgaggctagagctgttagaaatctgtgggttggtggcattagcccatcgatttcaaaggaggagcttgagggggagtttctgaagttcggaaaagttgaaggtgttgcattctcccaagatcagacttcagcatacatagattttgagaagcttgaagacgcaatttctgctcacagatccttgaatggaaaaatgctaggtggcaaggaattgtgtgttgatttccagaggtccaagggaagagcggaatggtcagaagctagcagcttcaatggtagagtaccagggccagtgggtgataagagaggcagtggccctctgaagagttctgctggagtgcggatgcgagaggcacagcctaccaatgttctctgggttggttttccaggttcttatagagtcattgatgaggaggcacttaagcatgccatgtcagtattcggtgtcgttacgaagataaaagttttccagacaaggcagtatgcttttgttgagtttgcaaatgttgcggaagcttgtaatgctaagatgaatctagatggtcatcttttcaatgatcccaggattcagattcttttctcaaacagtgggcttgcaccaaacaaattggacaacccaacatcggttgctggatttcctagttcagaaatctattccagtgatggtcgtctaggccctggtattggcagtggaactttgcaagggtatgatccaccaagaggaggaagaacaagatattacgattatgcgggtatgcctactccaggtggtatcctttcacaacctgaaccatttgatccaagagaagcaaaaagaatgaggcttgctgctggtgctgacccttacgatgtaagggcaggcagcacaggtctttattctgctggataccgtcatcagggcagttctgtgcacgctgagggaagctcaagtcctgttattcgagtccggggcacagtgcatcgtacatcatacattgagcactgttggcgtggcagtattgccaaaggtggatcccctgtttgtcgtgctcgttgtttgcctataacaaagggcagtgacatacctttaccggatgttatgaattgctcagctcggactggattggatatgctggcgaagcactacgcagatgccactggatttgacattgtctttttcttgccagatagtgaagatgactttgtttcttatactgagttcttgcgttacctgggctcaaaaagtcgggcaggggttgtaaaagttgatgcagggactacattatttttggttccaccatcagatttcctaacaaatgtgttacaagttgatggtccagagcgcctttatggtgtggtattacacattccacaaatctctgctgctgctgcactgaggccacagttaactgggaccgaacaacaaccttactatgatgaaaggggaactctgcctacttcacaaagaaagtatagtatcatttctcctaatgacagtggccaccttgatgctgattatcggacatctttgcatgaggattcaatgcatcggttggggcatattcctggaaggcctcgggtggatgaaggacaagcagttcaaccagctcttgcaggttttcctgctaatcaagcagctgggctgcaagtacaatcttcactcaagcctgacattatggctacattagcaaaacttctgcctagtgtgcaatcgtcaccgctggtaagtggtcagatgaatgccatagacagaacatcgcagatacaggatccatccatgctttcaaaagtatggaatcctgaaaaccaagttactgcttcaaattcatcctttgggcaaatggctaatgttcagcatccaggacagcagtttagtggccaagcttcagctgctcatttgacaaactatgggaacatggtgagtgctcaggagcgctcaatacaacatactgcttacaaccctgaagttactttgaacttgccaccaccacctccacttccaacaataccacacagttctgctacattacagtctcaaggtggccacagtttgccctcacagacaaaccagcaactgtatcagccagagcagtattatgtgccccaaaacaactatggtccattagttccagttagccattctaaccttcaaatcagcaacactaacaaccccacccttaccatcccacaagtgaaccctggacctccaacaaataatcagattgggaatttggcccagccacagcattctatgccactgcatgttgatagagcaagtcaggatttctcttctcaggggcaacaacaaaatcgtggtcctggtgctgcacaagctcccgaggaggataaaagcaagaagtaccaggcgacactccagttagctcaaaacctactgcttcagttacagcagcgtggatctggaaatcaatcctgagacctaattattgcttcaggtaccctcgtctcgtctcagctggtcgcaaacaactgaaaatatatatcccaactcgacggcttcgcctccactctacaatcgaagcggcccatggtgtgtcagctcgttggcctacacctacttgccccagttctcccttttcaaggacatacattaccagaaaacgatttctttttctcctttttattttatcgtgtatttgatatggataatccggcctgaattttgtactcgtttgttagtatggcctcgtgttatgttgttatttactctgaaaccatatgttattgtgtacggtgccgtggttccaacacaagggaagcttgttcagagacccgtttcacatgaagaatcgtatgctcgaaagagatcccacatacca

SEQ ID NO: 66407 - DNA, 3239 bp, Zea Mays
cacactgcagagccccctcttgttcgcgtccgaaccagattccccgtcccctctagggttacgcccactctcccccgccgctccggcgatgtcgtcggagcctctacccgcggagtcacccgaggcgcccgcttccgcctctggctccccttcgaaggacgccgtcggcactgaggtcggcgccgctgcggggtccccggaaacgaacacgctctgggtgggcaacctgccctcgcacgtgaccgagggcgatttgttggcgctgtttgggccgcacggcgcgctcgattgcgcccttgcacgagccggatctcgcagctacgcgttcgtcctcttccgttccccagccgaggctcgcgaagccgtcgaggccacccggggtgaaaaggtcaagggggccgccatgcgcaccgagttcgcgcggccggctagagctgttagaaatctgtgggttggtggcattagcccatcgatttcaaaggaggagcttgagggggagtttctgaagttcggaaaagttgaaggtgttgcattctcccaagatcagacttcagcatacatagattttgagaagcttgaagacgcaatttctgctcacagatccttgaatggaaaaatgctaggtggcaaggaattgtgtgttgatttccagaggtccaagggaagagcggaatggtcagaagctagcagcttcaatggtagagtaccagggccagtgggtgataagagaggcagtggccctctgaagagttctgctggagtgcggatgcgagaggcacagcctaccaatgttctctgggttggttttccaggttcttatagagtcattgatgaggaggcacttaagcatgccatgtcagtattcggtgtcgttacgaagataaaagttttccagacaaggcagtatgcttttgttgagtttgcaaatgttgcggaagcttgtaatgctaagatgaatctagatggtcatcttttcaatgatcccaggattcagattcttttctcaaacagtgggcttgcaccaaacaaattggacaacccaacatcggttgctggatttcctagttcagaaatctattccagtgatggtcgtctaggccctggtattggcagtggaactttgcaagggtatgatccaccaagaggaggaagaacaagatattacgattatgcgggtatgcctactccaggtggtatcctttcacaacctgaaccatttgatccaagagaagcaaaaagaatgaggcttgctgctggtgctgacccttacgatgtaagggcaggcagcacaggtctttattctgctggataccgtcatcagggcagttctgtgcacgctgagggaagctcaagtcctgttattcgagtccggggcacagtgcatcgtacatcatacattgagcactgttggcgtggcagtattgccaaaggtggatcccctgtttgtcgtgctcgttgtttgcctataacaaagggcagtgacatacctttaccggatgttatgaattgctcagctcggactggattggatatgctggcgaagcactacgcagatgccactggatttgacattgtctttttcttgccagatagtgaagatgactttgtttcttatactgagttcttgcgttacctgggctcaaaaagtcgggcaggggttgtaaaagttgatgcagggactacattatttttggttccaccatcagatttcctaacaaatgtgttacaagttgatggtccagagcgcctttatggtgtggtattacacattccacaaatctctgctgctgctgcactgaggccacagttaactgggaccgaacaacaaccttactatgatgaaaggggaactctgcctacttcacaaagaaagtatagtatcatttctcctaatgacagtggccaccttgatgctgattatcggacatctttgcatgaggattcaatgcatcggttggggcatattcctggaaggcctcgggtggatgaaggacaagcagttcaaccagctcttgcaggttttcctgctaatcaagcagctgggctgcaagtacaatcttcactcaagcctgacattatggctacattagcaaaacttctgcctagtgtgcaatcgtcaccgctggtaagtggtcagatgaatgccatagacagaacatcgcagatacaggatccatccatgctttcaaaagtatggaatcctgaaaaccaagttactgcttcaaattcatcctttgggcaaatggctaatgttcagcatccaggacagcagtttagtggccaagcttcagctgctcatttgacaaactatgggaacatggtgagtgctcaggagcgctcaatacaacatactgcttacaaccctgaagttactttgaacttgccaccaccacctccacttccaacaataccacacagttctgctacattacagtctcaaggtggccacagtttgccctcacagacaaaccagcaactgtatcagccagagcagtattatgtgccccaaaacaactatggtccattagttccagttagccattctaaccttcaaatcagcaacactaacaaccccacccttaccatcccacaagtgaaccctggacctccaacaaataatcagattgggaatttggcccagccacagcattctatgccactgcatgttgatagagcaagtcaggatttctcttctcaggggcaacaacaaaatcgtggtcctggtgctgcacaagctcccgaggaggataaaagcaagaagtaccaggcgacactccagttagctcaaaacctactgcttcagttacagcagcgtggatctggaaatcaatcctgagacctaattattgcttcaggtaccctcgtctcgtctcagctggtcgcaaacaactgaaaatatatatcccaactcgacggcttcgcctccactctacaatcgaagcggcccatggtgtgtcagctcgttggcctacacctacttgccccagttctcccttttcaaggacatacattaccagaaaacgatttctttttctcctttttattttatcgtgtatttgatatggataatccggcctgaattttgtactcgtttgttagtatggcctcgtgttatgttgttatttactctgaaaccatatgttattgtgtacggtgccgtggttccaacacaagggaagcttgttcagagacccgtttcacatgaagaatcgtatgctcgaaagagatcccacatacca

SEQ ID NO: 66408 - DNA, 1915 bp, Zea Mays
gttaaaattaaattattgaagttaagttattccaaacaaaagtgtagatttttttttcgcttgttgcacctccagcgtttcgcttcacccgaaaaaattccccaaggatgaagtgacggacaggggaagtagagctcaaatctcaggcaaacgacagggtcactcacaagtcacaactcacaaatactcttctcatttcctctcggttctgctcggtggcaacccagcgcgtagatcttgttcttggacgagaattctcctcaagttctcggatttctgtttttgtgccgcttagcaattcaaccccgaaattgttttgcggcgcagtcttcacccgaatcttgggtcgtagccaagaagatgaacaaggataaggctccgatgccgggagacggcgaccccagcgacggcttgccgccgcagtccacgcgccgtgccggggcgccgccctcgtcgtctaccccgccgcgggagtacgacatcagccgcatgccggactttcctacccggagcaccggccaccggcgtgcgcactccgagatcctgggcctccccgacgacctcgacctcagcgcccctggaggcggcgacggaccgtcgctgtcggacgagaacgacgaggagctcttctctatgttccttgatgtggacaagctgaactcatcgtgcggggcgtcgtcggaggccgaggctgagtcctcgtccgttgcggatggcgtcggtgagggggctgagctgggccacgcgcccaggccaaggcatcagcatagccagtccatggatgagtccatgtcgatcaaggcggaacaactggtgggggcgccggggatggaggggatgtcgtctgcagaggccaagaaagcagtctctgcggcgaaactggctgagcttgctcttgttgacccaaagagggctaaaaggatatgggctaatagacaatctgctgcaagatcaaaggaaaggaagatgcgatatatttctgaacttgagcgcaaggtgcaaaccctgcaaacagaagccacaacattgtcagctcagctaacattgctgcagagagacaccactgggctaacgaccgagaacagtgagctgaagattcgcctgcagaccatggaacagcaagtccacttacaagatgctttgaacgacacactgaaagctgaggtccagcggctgaaggtggcaacagggcaggggccggccaatggtggtggaggcatgatgatgaactttggcgccgtgccacgcgcgtttggaggaggcaaccagcagacgttccacagcagccagagccaagcgatgcaatccatgctggcgacgcaccagctgcagcagctccagctccactcccagcctcagcagcagctgcaggcgcagcatctccagcaggtggcgagagacctcaaaatgaaagggcatctgggcgcccaaggccagtggggcggtgggaagtctgggagcagcggcagctgaggctactactggcactggagttttggtgtatgtggttactggttagctaggagtggagatccccttgttctaggggggggggggggggggggtgctgccgtgcatgtgtagttaccgttagctcgggctatctatctacaggctcagttcagcttcagttttactgttaactcggtggctcagctctcctgcagcgtactgtgtccagaaactcggatggtaacaggtgttttatctgtcggaatctgtctgtatctcttcgctagtttaaagggtaaaaatggttgggatttcagggcttcaaatgaaatctcccgtattgagcaagagtgtgtagttggatgtacaaaaagggatggaaaaaggcaacgtttgatgagagtcacggagtaattttttatggcggcgtgatcctaaaaatcgagggaacagtgttgtcccg

SEQ ID NO: 66409 - DNA, 2143 bp, Zea Mays
caaacgacagggtcactcacaagtcacaactcacaaatactcttctcatttcctctcggttctgctcggtggcaacccagcgcgtagatcttgttcttggacgagaattctcctcaagttctcggatttctgtttttgtgccgcttagcaattcaaccccgaaattgttttgcggcgcagtcttcacccgaatcttgggtcgtagccaagaagatgaacaaggataaggctccgatgccgggagacggcgaccccagcgacggcttgccgccgcagtccacgcgccgtgccggggcgccgccctcgtcgtctaccccgccgcgggagtacgacatcagccgcatgccggactttcctacccggagcaccggccaccggcgtgcgcactccgagatcctgggcctccccgacgacctcgacctcagcgcccctggaggcggcgacggaccgtcgctgtcggacgagaacgacgaggagctcttctctatgttccttgatgtggacaagctgaactcatcgtgcggggcgtcgtcggaggccgaggctgagtcctcgtccgttgcggatggcgtcggtgagggggctgagctgggccacgcgcccaggccaaggcatcagcatagccagtccatggatgagtccatgtcgatcaaggcggaacaactggtgggggcgccggggatggaggggatgtcgtctgcagaggccaagaaagcagtctctgcggcgaaactggctgagcttgctcttgttgacccaaagagggctaaaagggtagtcggtggtctatccaaaacaccccctaggtccgctcctggatggatatgggctaatagacaatctgctgcaagatcaaaggaaaggaagatgcgatatatttctgaacttgagcgcaaggtgcaaaccctgcaaacagaagccacaacattgtcagctcagctaacattgctgcaggtaggctggggttcttcctgagatcacggaggtttaggaactgatagacaattaatgtatactgaagaagcaatgaagcatgatttaagaaacaaaactggccaccaagtcgctggaattcagagtctgtgctcgggcttgcagttgagtagtttatgtaaaaagggatagacccagtgctggaggctcccacatgagttaggtctggagaagggaaaaactgaggcaagtcttcccctcgcaaatgcgaagagactgcttcgaactcgtgacctggtgactcagtaagacagctctcaccactgcaccaggcctgccctagttgatagagacaccactgggctaacgaccgagaacagtgagctgaagattcgcctgcagaccatggaacagcaagtccacttacaagatgctttgaacgacacactgaaagctgaggtccagcggctgaaggtggcaacagggcaggggccggccaatggtggtggaggcatgatgatgaactttggcgccgtgccacgcgcgtttggaggaggcaaccagcagacgttccacagcagccagagccaagcgatgcaatccatgctggcgacgcaccagctgcagcagctccagctccactcccagcctcagcagcagctgcaggcgcagcatctccagcaggtggcgagagacctcaaaatgaaagggcatctgggcgcccaaggccagtggggcggtgggaagtctgggagcagcggcagctgaggctactactggcactggagttttggtgtatgtggttactggttagctaggagtggagatccccttgttctaggggggggggggggggggggtgctgccgtgcatgtgtagttaccgttagctcgggctatctatctacaggctcagttcagcttcagttttactgttaactcggtggctcagctctcctgcagcgtactgtgtccagaaactcggatggtaacaggtgttttatctgtcggaatctgtctgtatctcttcgctagtttaaagggtaaaaatggttgggatttcagggcttcaaatgaaatctcccgtattgagcaagagtgtgtagttggatgtacaaaaagggatggaaaaaggcaacgtttgatgagagtcacggagtaattttttatggcggcgtgatcctaaaaatcgagggaacagtgttgtcccg

SEQ ID NO: 66410 - DNA, 2051 bp, Zea Mays
aaacgacagggtcactcacaagtcacaactcacaaatactcttctcatttcctctcggttctgctcggtggcaacccagcgcgtagatcttgttcttggacgagaattctcctcaagttctcggatttctgtttttgtgccgcttagcaattcaaccccgaaattgttttgcggcgcagtcttcacccgaatcttgggtcgtagccaagaagatgaacaaggataaggctccgatgccgggagacggcgaccccagcgacggcttgccgccgcagtccacgcgccgtgccggggcgccgccctcgtcgtctaccccgccgcgggagtacgacatcagccgcatgccggactttcctacccggagcaccggccaccggcgtgcgcactccgagatcctgggcctccccgacgacctcgacctcagcgcccctggaggcggcgacggaccgtcgctgtcggacgagaacgacgaggagctcttctctatgttccttgatgtggacaagctgaactcatcgtgcggggcgtcgtcggaggccgaggctgagtcctcgtccgttgcggatggcgtcggtgagggggctgagctgggccacgcgcccaggccaaggcatcagcatagccagtccatggatgagtccatgtcgatcaaggcggaacaactggtgggggcgccggggatggaggggatgtcgtctgcagaggccaagaaagcagtctctgcggcgaaactggctgagcttgctcttgttgacccaaagagggctaaaaggatatgggctaatagacaatctgctgcaagatcaaaggaaaggaagatgcgatatatttctgaacttgagcgcaaggtgcaaaccctgcaaacagaagccacaacattgtcagctcagctaacattgctgcaggtaggctggggttcttcctgagatcacggaggtttaggaactgatagacaattaatgtatactgaagaagcaatgaagcatgatttaagaaacaaaactggccaccaagtcgctggaattcagagtctgtgctcgggcttgcagttgagtagtttatgtaaaaagggatagacccagtgctggaggctcccacatgagttaggtctggagaagggaaaaactgaggcaagtcttcccctcgcaaatgcgaagagactgcttcgaactcgtgacctggtgactcaagagacaccactgggctaacgaccgagaacagtgagctgaagattcgcctgcagaccatggaacagcaagtccacttacaagatgctttgaacgacacactgaaagctgaggtccagcggctgaaggtggcaacagggcaggggccggccaatggtggtggaggcatgatgatgaactttggcgccgtgccacgcgcgtttggaggaggcaaccagcagacgttccacagcagccagagccaagcgatgcaatccatgctggcgacgcaccagctgcagcagctccagctccactcccagcctcagcagcagctgcaggcgcagcatctccagcaggtggcgagagacctcaaaatgaaagggcatctgggcgcccaaggccagtggggcggtgggaagtctgggagcagcggcagctgaggctactactggcactggagttttggtgtatgtggttactggttagctaggagtggagatccccttgttctaggggggggggggggggggggtgctgccgtgcatgtgtagttaccgttagctcgggctatctatctacaggctcagttcagcttcagttttactgttaactcggtggctcagctctcctgcagcgtactgtgtccagaaactcggatggtaacaggtgttttatctgtcggaatctgtctgtatctcttcgctagtttaaagggtaaaaatggttgggatttcagggcttcaaatgaaatctcccgtattgagcaagagtgtgtagttggatgtacaaaaagggatggaaaaaggcaacgtttgatgagagtcacggagtaattttttatggcggcgtgatcctaaaaatcgagggaacagtgttgtcccg

SEQ ID NO: 66411 - DNA, 1832 bp, Zea Mays
gacagggtcactcacaagtcacaactcacaaatactcttctcatttcctctcggttctgctcggtggcaacccagcgcgtagatcttgttcttggacgagaattctcctcaagttctcggatttctgtttttgtgccgcttagcaattcaaccccgaaattgttttgcggcgcagtcttcacccgaatcttgggtcgtagccaagaagatgaacaaggataaggctccgatgccgggagacggcgaccccagcgacggcttgccgccgcagtccacgcgccgtgccggggcgccgccctcgtcgtctaccccgccgcgggagtacgacatcagccgcatgccggactttcctacccggagcaccggccaccggcgtgcgcactccgagatcctgggcctccccgacgacctcgacctcagcgcccctggaggcggcgacggaccgtcgctgtcggacgagaacgacgaggagctcttctctatgttccttgatgtggacaagctgaactcatcgtgcggggcgtcgtcggaggccgaggctgagtcctcgtccgttgcggatggcgtcggtgagggggctgagctgggccacgcgcccaggccaaggcatcagcatagccagtccatggatgagtccatgtcgatcaaggcggaacaactggtgggggcgccggggatggaggggatgtcgtctgcagaggccaagaaagcagtctctgcggcgaaactggctgagcttgctcttgttgacccaaagagggctaaaagatttggctagatgtttttggaattggctgcattatttgttcgtcattttcatatcaaatgattgcatcggatatgggctaatagacaatctgctgcaagatcaaaggaaaggaagatgcgatatatttctgaacttgagcgcaaggtgcaaaccctgcaaacagaagccacaacattgtcagctcagctaacattgctgcagagagacaccactgggctaacgaccgagaacagtgagctgaagattcgcctgcagaccatggaacagcaagtccacttacaagatgctttgaacgacacactgaaagctgaggtccagcggctgaaggtggcaacagggcaggggccggccaatggtggtggaggcatgatgatgaactttggcgccgtgccacgcgcgtttggaggaggcaaccagcagacgttccacagcagccagagccaagcgatgcaatccatgctggcgacgcaccagctgcagcagctccagctccactcccagcctcagcagcagctgcaggcgcagcatctccagcaggtggcgagagacctcaaaatgaaagggcatctgggcgcccaaggccagtggggcggtgggaagtctgggagcagcggcagctgaggctactactggcactggagttttggtgtatgtggttactggttagctaggagtggagatccccttgttctaggggggggggggggggggggtgctgccgtgcatgtgtagttaccgttagctcgggctatctatctacaggctcagttcagcttcagttttactgttaactcggtggctcagctctcctgcagcgtactgtgtccagaaactcggatggtaacaggtgttttatctgtcggaatctgtctgtatctcttcgctagtttaaagggtaaaaatggttgggatttcagggcttcaaatgaaatctcccgtattgagcaagagtgtgtagttggatgtacaaaaagggatggaaaaaggcaacgtttgatgagagtcacggagtaattttttatggcggcgtgatcctaaaaatcgagggaacagtgttgtcccg

SEQ ID NO: 66412 - DNA, 2780 bp, Zea Mays
cgcgctcacgttttgctcgctgccttcgcgttcgcattcgctctcgccgtcaccaaacctcaccgccggcattccctagtcccaccttctcctcgacaaagtcctcctcctaaaccctatctctgtctcaatcctatcatttgacccctttccccgccgccatggacgaggaccggagcgccgatcccgctcgcagcggccgcctcctctcgccgacgagcggtcagccccaaacccagacacagtcacagcccccgctccccatggacctcgcctcccagtaccaacgcctctttgcaccgtcggttttcctcccaccgatggcgcccccgccgccccgcctggcgtccagctcctgcttctcggccttcagcaactatcagagcctaccgacgctcgcgcccgcggtgggcgccggatcgcatctcgctcgctcggtccctaagccgccgctcttctcagtggactctctagctccgcttccgtactccaccagtccagcggcgagggcagcggcaggggcaggggcggcggtcccgcgttccccgccgtcgccaggcagctccgagctgcaaggcccgtccgcgtccggcctgccgccgcgtggggcggggcaccggaggtcccgtagcgatttcctcgtcgggttctcgggggcgaaccagctgcacctgccgatgactcctgcggctggggcgtacaggccgagggacgcctccgcactggaggagctattccgctcatacagggatccgaatctcggctcctccggggataacaataatgaaaggaacgatcacttaagtagacaactgaccggccaacgcgcttggagccccggtgataacagcgacaacgaggctgagagctgggcggtcagtggcagcgcagacaccagcgctagccatcctcgccattgccgcagcctgtcggtggacagcatcatggccaatctcaattttggaggcctggaccaggtttctctgagagtgccacctctgtctccagtggcagacgccagtgtcagcctctcgcgcactggaaccggagcatcgggcggtgcggctgcggctgcttcttctgaacttaccaacggagagttcagcgaggctgagatgaagaagatcatggccaatgatcgcctagctgagatcgctctttctgatcctaagagggtcaagaggattctagctaatcggatctcggcagcaaagtctaaggagcgcaaggtgaagtacatgggtgagcttgagcgtaaagttcgtgtgctgcagacggaaactaatacattatcttcgaaagcagcattgtcgcagagggaatgcgaggcacttcgaactctgaacaatgagatgaagatcaggctgcaagcaatggagcagcaagcacagctgaaagatgctctgaatgaagcactgacagctgaagtgcagcgcctgaaacaaatggctggcgaggccagtgatcttcatgtgccgaacggttcgcatcatcatatgaaccgccagattctcgaacagcagctgcagcaggtacagaagcagccatcagaggcccagcaggctcagcagcagcagcagcagccacaggaaccagagcagttcaaagctcagcaaaagcagtggaaccattaagacgattgatttcacagagcacatgcttgaagagcacccaagagagctccaggagcctggtgatgtatgagcagacagcagagcacagacatggcggagcagccaagcagatagatacctaggagtccgctgtcctgcccacgcaactagcacaagcgccagcgagggaacgcaagctaagctagctactccatgctcagcaggcagcaagaggaagcaatctcacgcagctccagctcccgctcctgcctctggcacggccggcgtcttggacaggtcctggagcagcgcgaggttctcgcggcggagcgcgctggccctctcccgcagcctctcgttctccgcgatgatgcaccggttctccaggtagagcttcaggttcaccatctccatggcctctgctccggctctcaacctcctcagcctcagcctgcgtacgtgtacagtgtacttgtgtgattgcaggaaactgtcgctgatgctgctgaaacttgagcagaggaagcttgggaaactcgagcagggcgggttagctgggtacctcttcctcctgatagcaactgaggcacgaggcggcgtcggcggcggcgtcttctgcagctgctgccgcttgaggttgacgacaacaagagacgggcgcttcttgctgctgctccaggaccaggagccggagcacatgttgccgtggtggatggcgtatacacggcctgctcctagctgctagattctttggagctcagcgcggtgacttcgggatgaagtgtttgaagggcgctaaaggctatatataaaagatagatctcatctcatctcgcctcgtctcgtctctcggggctttggtggtagctttaggtttttgtttggtggtgcatgcacacattgacatgacgcatgtgagccgcccgagagagacggaggcagggcagcaggcagctagcttagctcctccatcatggagcatggactacggcgcggcatgggccaatggatcttccggtcgctaatcatttagcagcataatttctttccatcgggaaaaaggggaggagagcgtggagaaaatggtagagagagagagagagagagtatgggtcgacgacgagaaagaaatggtctttgtgacaggagtaggttggggagaagaag

SEQ ID NO: 66413 - DNA, 2080 bp, Zea Mays
gagattaaattagccagatggcaccaaatcagaaggtgacaatccgttgtataatctccagactaatttcttccattccgtccctgtccgtcggttcaagcttcccaacaatctctgcggagtaggtcgcctgacgaactaccgagacgtgcgtctcgcttctcccttcctcagctgctggcccgctgcctgcagccattgcccgctcctcgaggtcaaatggcccctgcccccgctctcaccgccacatccgtcctgaagcgttcccacctacccggctcctctgggcgagtgcgagtggttccttcgagaaagataacatcggggaggacgcggtgttgccttctcagatagcggtggagaataaagtagattttttgaagattttaaagagtgccaactccattattccccatatagtgctggggagtacaattctcgccctggtgtacccgccttcgtttacatggttcactaccaggtattatgcaccagctttggggttcttgatgtttgctgttggtgtaaactcaagtgccaaggattttattgaagcaataaagaggccagatgctattgctgcgggctatatcggacagtttgtcatcaagcctttgtttggattcctttttggcactcttgcggttgcagttcttaacctcccagctgctctaggcgctggcataatgttggtttcatgcgtgagcggagcacaactttcaaactatgcaactttcttgacggatccacatatggctcctctcagcattgttatgacatcattgtcaacagctactgcagtttttgtcaccccaacattatcttactttcttattggccagaaattacctgtagatgtcaaagggatgatgtccagcatcgttcaaatagttgttgctccaattgctgccggattgcttctgaatagattcctaccaaggctctgtgcagctattcagccatttctcccttcgatgtcggtgtttgtcactgccctgtgtgttggctcaccattggcaataaatatcaaggctgttttgtcgccatttggattaaccatagtgctgctcctttttgcattccacacctcatcttttgtagctggttatcatcttgctggtacttggtttcgcaagtcagacgacgtaaaggcactacaaaggacaatatcttttgagacaggaatgcaaagcagccttcttgctcttgctttagcaaataagttcttcccagatccactagtgggtgtgcctccagccatatcggttgtgttgatgtccttaatgggatttgctcttgtcatgatttacatttttttttgaatcgtgctggcatgccgccccaagagccgatggagttcaatttctggccacttgccgtagggttagggtagctcgtctccaactgctgttcatcgaaccgtatcagttctcgcatgattcgtcagaatttctagtattcgactgcatcccaatgacagcgttgaaggaatacgagtaacctagacatacggttgaagttgtacacatgtccagctgggtatccccatcgatgatccttaaatcaggacctctattgggatccgatgaattcactttcttttctcgaacatcaaatccctactacttattaagacagtaagaggtaggctgtcattccgtgttctgccattctcatttctccttttttttcattgcccctctccgcaaagctcatttccattccgtgttctgtcattctcatcccccttccggcagtgtcattctcattcccacctccccgcaaagctcattctcattcccacgtgcatcccacgtctagctaaaattaaattaaaaaaacacaaatgtgaccctaatgggattcgaaccccttcccgcaaagctcattcccattccgtgttctgtcattcccattcctccgtgttctgccattctcatttcccttttttttcattgcccctctccgcaaagctcatttccattccgtgttctgtcattctcatccccttccggcagtgtcattctcattcccacctccccgcaaagctcattctcattcccacgtgcatcccacgtct

SEQ ID NO: 66414 - DNA, 1932 bp, Zea Mays
ggtgacaatccgttgtataatctccagactaatttcttccattccgtccctgtccgtcggttcaagcttcccaacaatctctgcggagtaggtcgcctgacgaactaccgagacgtgcgtctcgcttctcccttcctcagctgctggcccgctgcctgcagccattgcccgctcctcgaggtcaaatggcccctgcccccgctctcaccgccacatccgtcctgaagcgttcccacctacccggcgtccactcgttggcctgtcgccggcagccgggggcggaccgcgtctcggtgctttctccagcgatcccgccgccccgcgtttcatggcgtattatgcaccagctttggggttcttgatgtttgctgttggtgtaaactcaagtgccaaggattttattgaagcaataaagaggccagatgctattgctgcgggctatatcggacagtttgtcatcaagcctttgtttggattcctttttggcactcttgcggttgcagttcttaacctcccagctgctctaggcgctggcataatgttggtttcatgcgtgagcggagcacaactttcaaactatgcaactttcttgacggatccacatatggctcctctcagcattgttatgacatcattgtcaacagctactgcagtttttgtcaccccaacattatcttactttcttattggccagaaattacctgtagatgtcaaagggatgatgtccagcatcgttcaaatagttgttgctccaattgctgccggattgcttctgaatagattcctaccaaggctctgtgcagctattcagccatttctcccttcgatgtcggtgtttgtcactgccctgtgtgttggctcaccattggcaataaatatcaaggctgttttgtcgccatttggattaaccatagtgctgctcctttttgcattccacacctcatcttttgtagctggttatcatcttgctggtacttggtttcgcaagtcagacgacgtaaaggcactacaaaggacaatatcttttgagacaggaatgcaaagcagccttcttgctcttgctttagcaaataagttcttcccagatccactagtgggtgtgcctccagccatatcggttgtgttgatgtccttaatgggatttgctcttgtcatgatttacatttttttttgaatcgtgctggcatgccgccccaagagccgatggagttcaatttctggccacttgccgtagggttagggtagctcgtctccaactgctgttcatcgaaccgtatcagttctcgcatgattcgtcagaatttctagtattcgactgcatcccaatgacagcgttgaaggaatacgagtaacctagacatacggttgaagttgtacacatgtccagctgggtatccccatcgatgatccttaaatcaggacctctattgggatccgatgaattcactttcttttctcgaacatcaaatccctactacttattaagacagtaagaggtaggctgtcattccgtgttctgccattctcatttctccttttttttcattgcccctctccgcaaagctcatttccattccgtgttctgtcattctcatcccccttccggcagtgtcattctcattcccacctccccgcaaagctcattctcattcccacgtgcatcccacgtctagctaaaattaaattaaaaaaacacaaatgtgaccctaatgggattcgaaccccttcccgcaaagctcattcccattccgtgttctgtcattcccattcctccgtgttctgccattctcatttcccttttttttcattgcccctctccgcaaagctcatttccattccgtgttctgtcattctcatccccttccggcagtgtcattctcattcccacctccccgcaaagctcattctcattcccacgtgcatcccacgtct

SEQ ID NO: 66415 - DNA, 2060 bp, Zea Mays
ggtgacaatccgttgtataatctccagactaatttcttccattccgtccctgtccgtcggttcaagcttcccaacaatctctgcggagtaggtcgcctgacgaactaccgagacgtgcgtctcgcttctcccttcctcagctgctggcccgctgcctgcagccattgcccgctcctcgaggtcaaatggcccctgcccccgctctcaccgccacatccgtcctgaagcgttcccacctacccggcgtccactcgttggcctgtcgccggcagccgggggcggaccgcgtctcggtgctttctccagcgatcccgccgccccgcgtttcatggcagcaaggatctggagtggttgctaagaggctcctctgggcgagtgcgagtggttccttcgagaaagataacatcggggaggacgcggtgttgccttctcagatagcggtggagaataaagtagattttttgaagattttaaagagtgccaactccattattccccatatagtgctggggagtacaattctcgccctggtgtacccgccttcgtttacatggttcactaccaggtattatgcaccagctttggggttcttgatgtttgctgttggtgtaaactcaagtgccaaggattttattgaagcaataaagaggccagatgctattgctgcgggctatatcggacagtttgtcatcaagcctttgtttggattcctttttggcactcttgcggttgcagttcttaacctcccagctgctctaggcgctggcataatgttggtttcatgcgtgagcggagcacaactttcaaactatgcaactttcttgacggatccacatatggctcctctcagcattgttatgacatcattgtcaacagctactgcagtttttgtcaccccaacattatcttactttcttattggccagaaattacctgtagatgtcaaagggatgatgtccagcatcgttcaaatagttgttgctccaattgctgccggattgcttctgaatagattcctaccaaggctctgtgcagctattcagccatttctcccttcgatgtcggtgtttgtcactgccctctggttatcatcttgctggtacttggtttcgcaagtcagacgacgtaaaggcactacaaaggacaatatcttttgagacaggaatgcaaagcagccttcttgctcttgctttagcaaataagttcttcccagatccactagtgggtgtgcctccagccatatcggttgtgttgatgtccttaatgggatttgctcttgtcatgatttacatttttttttgaatcgtgctggcatgccgccccaagagccgatggagttcaatttctggccacttgccgtagggttagggtagctcgtctccaactgctgttcatcgaaccgtatcagttctcgcatgattcgtcagaatttctagtattcgactgcatcccaatgacagcgttgaaggaatacgagtaacctagacatacggttgaagttgtacacatgtccagctgggtatccccatcgatgatccttaaatcaggacctctattgggatccgatgaattcactttcttttctcgaacatcaaatccctactacttattaagacagtaagaggtaggctgtcattccgtgttctgccattctcatttctccttttttttcattgcccctctccgcaaagctcatttccattccgtgttctgtcattctcatcccccttccggcagtgtcattctcattcccacctccccgcaaagctcattctcattcccacgtgcatcccacgtctagctaaaattaaattaaaaaaacacaaatgtgaccctaatgggattcgaaccccttcccgcaaagctcattcccattccgtgttctgtcattcccattcctccgtgttctgccattctcatttcccttttttttcattgcccctctccgcaaagctcatttccattccgtgttctgtcattctcatccccttccggcagtgtcattctcattcccacctccccgcaaagctcattctcattcccacgtgcatcccacgtct

SEQ ID NO: 66416 - DNA, 1880 bp, Zea Mays
cgcctttgtgtcaagagaacagtgattgggttttggggttcaacaatggagcaaggatctggagtggttgctaagaggctcctctgggcgagtgcgagtggttccttcgagaaagataacatcggggaggacgcggtgttgccttctcagatagcggtggagaataaagtagattttttgaagattttaaagagtgccaactccattattccccatatagtgctggggagtacaattctcgccctggtgtacccgccttcgtttacatggttcactaccaggtattatgcaccagctttggggttcttgatgtttgctgttggtgtaaactcaagtgccaaggattttattgaagcaataaagaggccagatgctattgctgcgggctatatcggacagtttgtcatcaagcctttgtttggattcctttttggcactcttgcggttgcagttcttaacctcccagctgctctaggcgctggcataatgttggtttcatgcgtgagcggagcacaactttcaaactatgcaactttcttgacggatccacatatggctcctctcagcattgttatgacatcattgtcaacagctactgcagtttttgtcaccccaacattatcttactttcttattggccagaaattacctgtagatgtcaaagggatgatgtccagcatcgttcaaatagttgttgctccaattgctgccggattgcttctgaatagattcctaccaaggctctgtgcagctattcagccatttctcccttcgatgtcggtgtttgtcactgccctgtgtgttggctcaccattggcaataaatatcaaggctgttttgtcgccatttggattaaccatagtgctgctcctttttgcattccacacctcatcttttgtagctggttatcatcttgctggtacttggtttcgcaagtcagacgacgtaaaggcactacaaaggacaatatcttttgagacaggaatgcaaagcagccttcttgctcttgctttagcaaataagttcttcccagatccactagtgggtgtgcctccagccatatcggttgtgttgatgtccttaatgggatttgctcttgtcatgatttacatttttttttgaatcgtgctggcatgccgccccaagagccgatggagttcaatttctggccacttgccgtagggttagggtagctcgtctccaactgctgttcatcgaaccgtatcagttctcgcatgattcgtcagaatttctagtattcgactgcatcccaatgacagcgttgaaggaatacgagtaacctagacatacggttgaagttgtacacatgtccagctgggtatccccatcgatgatccttaaatcaggacctctattgggatccgatgaattcactttcttttctcgaacatcaaatccctactacttattaagacagtaagaggtaggctgtcattccgtgttctgccattctcatttctccttttttttcattgcccctctccgcaaagctcatttccattccgtgttctgtcattctcatcccccttccggcagtgtcattctcattcccacctccccgcaaagctcattctcattcccacgtgcatcccacgtctagctaaaattaaattaaaaaaacacaaatgtgaccctaatgggattcgaaccccttcccgcaaagctcattcccattccgtgttctgtcattcccattcctccgtgttctgccattctcatttcccttttttttcattgcccctctccgcaaagctcatttccattccgtgttctgtcattctcatccccttccggcagtgtcattctcattcccacctccccgcaaagctcattctcattcccacgtgcatcccacgtct

SEQ ID NO: 66417 - DNA, 770 bp, Zea Mays
tgcaagtgtactaataatatacatatcagattcgtggatatggctgataatgagaaagaagtgggggagggaaccaccccccgaggggcggactgggaagttgtgactctcacagcatctgcctatgaagcggcgccaggacctgtcaggacagaagtaaagcctgttaatgaaaatcaagagcatagttcatccaatgcactgctcatgtctgaccactttgtgtttccgccgagtgagcacgagaacctgccaatacaaaccagtttcgatgagatacagcctgagaaggatgtgcagaaacctagtaccactgtggaggattatagtattaagaatgttgttgggtctgagagagttcagtttgatgatgaagggaaagacctctcagatgatgatgtggagatgagagatgacacacctgggtacggttcatcccacactgaagatgatgcacatggttttgttgttctcgatgatggtgttgagtccggtgaagattttgatgaaaaatcaggccacccttcagatcctgcagacagcaggagctgtgatactggcgcctcatgcaaatgttggttgaagaagcatatgacatgcttgtataaccaagcaaaggaaacaaatgctatctggtctgtggtggttgcagctgcactagttggtattgtgattttgggacgttggcacaaagataaattgcaccttaaccagcttaagtggcgctctggctcagcagtgagtgctgagtccacaatgctagattcttg

SEQ ID NO: 66418 - DNA, 1178 bp, Zea Mays
gagacattctctggctaggattaggttgttgacaatcagattcgtggatatggctgataatgagaaagaagtgggggagggaaccaccccccgaggggcggactgggaagttgtgactctcacagcatctgcctatgaagcggcgccaggacctgtcaggacagaagtaaagcctgttaatgaaaatcaagagcatagttcatccaatgcactgctcatgtctgaccactttgtgtttccgccgagtgagcacgagaacctgccaatacaaaccagtttcgatgagatacagcctgagaaggatgtgcagaaacctagtaccactgtggaggattatagtattaagaatgttgttgggtctgagagagttcagtttgatgatgaagggaaagacctctcagatgatgatgtggagatgagagatgacacacctgggtacggttcatcccacactgaagatgatgcacatggttttgttgttctcgatgatggtgttgagtccggtgaagattttgatgaaaaatcaggccacccttcagatcctgcagacagcaggagctgtgatactggcgcctcatgcaaatgttggttgaagaagcatatgacatgcttgtataaccaagcaaaggaaacaaatgctatctggtctgtggtggttgcagctgcactagttggtattgtgattttgggacgttggcacaaagataaattgcaccttaaccagcttaagtggcgctctggctcagcagtgagaggatgatcaacaagtcgtttgtgctgctctgatgaatcaattcaattcaagtcataaccaagacggtttccgcaatgttattgtgatgatgacgaaaaggggtatgttcaatgcaataatatgatgttcgactggaatttcacttgccgccctacaatgagtgcctcgtgggctctaagatgtcaaatccacttctgccatacacattatcttacagctttacttgcgacctggcacatgatttttggttcctgctacttttgctgtggtatatcatatatgttgactaaatggctgtagaacatagcaggattgcatactgcgaagtctgttaaaaacttggtggttctgcgagagcatctcacatgcaattgtgaaaatggagaacaaggaaaattttaaatatagagtaaaaaataaagaa

SEQ ID NO: 66419 - DNA, 2481 bp, Zea Mays
gtcgccccgaggcccgcaagttgccaaggccactcccaggcgcggcggccggcgcaagtctgaacttccccgcccttgaattcgacctccgccacgaccgacggcccgaacggccgaacccgaccgacgccggcgggagaggcagaaacggagagaaagagatgggagtggggggcagcttctgggacctgctgaagccctacgcgcggcacgagggcgcggggtacctacgcgggcgccgcgtcgccgtcgacctctcattctgggtcgtctcccacagcaccgccatcctggcgcgcttgccgcgggcgcggcgcccgcacctccggaccaccttctttcgcaccctctccctcttcgccaagatgggcgtgttccctgtgttcgtggtggacggcgagccgtcaccgctcaagtcgcaggcgagggcggcgcgcttcttccgaggctccgggatggacctggccgcgttcccgagcacagaggcggagtccagtgtgaccgctgcaccggtcaaaaggaggaatgctgcattcacgcgatgcgttgaggagtgcgtggaactgcttgaatatcttggcatgcctgtactgagggcaaaaggtgaagcagaagccctttgcgcccagctgaataatgaaggtcatgtaggtgcttgcatcactgcagacagtgatgctttcctcttcggggctaagactgtcgtaaaggtcctcagatcaaattgcaaggaaccttttgagtgctaccacatagcagatattgagtctggtcttggactaaagaggaagcaattggtggccatggcgcttcttattggcagtgaccatgatttgcatggggtgcctggttttggcctggagactgcacttcgttttgtgcagctatttgatgaagatgaaattttagataagttgcatgaaattggtaaaggggtgtatccgttcctcaaaggatttgacaatccacatattgatgatctcccatcatcgtccaagaaaagcccaattaaatcgccgcactgctcacattgtggtcacccgggcagcaagaaaaatcatatcaaggatgggtgcaattattgcttggtggattcattagagaactgcgtggaaagaccagctggattcaaatgtgaatgtcctagttgtgacgaggcacgtgatctaaacgaacaaagacggcatgaaaattggcaaatcaaggtctgcaaaagaatagctgctgagacaaattttcctaacgaggagatcattaaattgtatctaagcgataacaatctggttgaagaaagggtgttcccttgcttagttggagtaagcctgatgttgaagctttggttgacttattaagttataagcagaattgggaaccatcttatattcgccaaaggatgcttcctatgttatcaaccatatatttaagagaggtggcatcttcttcgtctacaccattgcctctttgtgatcagtatgagtttgattcaattgagcggactaaaataaggcacggtcacccttattacttggtgaaatggaagagagctacccgtggtatgaattctaatatgcctagcaagaagccagtaacggagggagaaacaagtagcgaggtagtggtgttggatgacgatgacaatgaggatacagtggtttgcgagtctccagagttattagatgaacctgatgttccacaagtgcttatggatgatggctgttgctttctattgactgatgaagacattcaacttgttggtgctgcttttcctaaggaaacagcaaggtttcaggaagaacagaggctgaaagaagcaagatcaagatcgcggaaatccaaaacgagcttagcagacagtgggtgcgagacacctaaaggtccgagacctagtggggtgcagcttagcatcacagagttctaccgctcgaagaaagggcaggacatggaatctgggaagaagaagcaggcgggagaggggcacgctgctgcgagggatggctcgagaaaatcctctgacagggacctcaacaacaagagcctgccgaagtccgttcgccgccgcctcctcttcgattgctgaggactagcctggccttctggtgagcactgtaatcttgctgtgccactgttgtaaatgacctagagaacgccttaacctattagccggtgtaggtatccgcggctcattttgtacagggaacagagcatcatctctgtcaagaggaaaaatggagcaggtcttagttcagaacgattatctgaacctcatctttgtattggttttaagtgcttttcgtggaactcactttcaattctagaggaatgggtcgcgtgccgctgctagagtaatcattctgaactaaaaaaaaagcttttttttggttttatgtctgcttttatgcctggacaatagctgacagacttgatgctgtcatgttacattatgcggtagtactactccagatattagagtgctgaatgtaa

SEQ ID NO: 66420 - DNA, 2715 bp, Zea Mays
gttgccaaggccactcccaggcgcggcggccggcgcaagtctgaacttccccgcccttgaattcgacctccgccacgaccgacggcccgaacggccgaacccgaccgacgccggcgggagaggcagaaacggagagaaagagatgggagtggggggcagcttctgggacctgctgaagccctacgcgcggcacgagggcgcggggtacctacgcgggcgccgcgtcgccgtcgacctctcattctgggtcgtctcccacagcaccgccatcctggcgcgcttgccgcgggcgcggcgcccgcacctccggaccaccttctttcgcaccctctccctcttcgccaagatgggcgtgttccctgtgttcgtggtggacggcgagccgtcaccgctcaagtcgcaggcgagggcggcgcgcttcttccgaggctccgggatggacctggccgcgttcccgagcacagaggcggagtccagtgtgaccgctgcaccggtcaaaaggaggaatgctgcattcacgcgatgcgttgaggagtgcgtggtttaaggaccggaagtgcactttactctatcttttcactagcctcttgctacttaagcatgtgtttggttggacatacaaggagagatggaagggggcggccacattttctatagtgtttggatgagagtcacgcgggggcggggtgaacaccggagcattttttggtggcggcgttgtcccaaaaaatcgagggttggtgtcgtccccacctcatcctattttgacctcaaagcaaacacatcataaatggaactgcttgaatatcttggcatgcctgtactgagggcaaaaggtgaagcagaagccctttgcgcccagctgaataatgaaggtcatgtaggtgcttgcatcactgcagacagtgatgctttcctcttcggggctaagactgtcgtaaaggtcctcagatcaaattgcaaggaaccttttgagtgctaccacatagcagatattgagtctggtcttggactaaagaggaagcaattggtggccatggcgcttcttattggcagtgaccatgatttgcatggggtgcctggttttggcctggagactgcacttcgttttgtgcagctatttgatgaagatgaaattttagataagttgcatgaaattggtaaaggggtgtatccgttcctcaaaggatttgacaatccacatattgatgatctcccatcatcgtccaagaaaagcccaattaaatcgccgcactgctcacattgtggtcacccgggcagcaagaaaaatcatatcaaggatgggtgcaattattgcttggtggattcattagagaactgcgtggaaagaccagctggattcaaatgtgaatgtcctagttgtgacgaggcacgtgatctaaacgaacaaagacggcatgaaaattggcaaatcaaggtctgcaaaagaatagctgctgagacaaattttcctaacgaggagatcattaaattgtatctaagcgataacaatctggttgaagaaaagggtgttcccttgcttagttggagtaagcctgatgttgaagctttggttgacttattaagttataagcagaattgggaaccatcttatattcgccaaaggatgcttcctatgttatcaaccatatatttaagagaggtggcatcttcttcgtctacaccattgcctctttgtgatcagtatgagtttgattcaattgagcggactaaaataaggcacggtcacccttattacttggtgaaatggaagagagctacccgtggtatgaattctaatatgcctagcaagaagccagtaacggagggagaaacaagtagcgaggtagtggtgttggatgacgatgacaatgaggatacagtggtttgcgagtctccagagttattagatgaacctgatgttccacaagtgcttatggatgatggctgttgctttctattgactgatgaagacattcaacttgttggtgctgcttttcctaaggaaacagcaaggtttcaggaagaacagaggctgaaagaagcaagatcaagatcgcggaaatccaaaacgagcttagcagacagtgggtgcgagacacctaaaggtccgagacctagtggggtgcagcttagcatcacagagttctaccgctcgaagaaagggcaggacatggaatctgggaagaagaagcaggcgggagaggggcacgctgctgcgagggatggctcgagaaaatcctctgacagggacctcaacaacaagagcctgccgaagtccgttcgccgccgcctcctcttcgattgctgaggactagcctggccttctggtgagcactgtaatcttgctgtgccactgttgtaaatgacctagagaacgccttaacctattagccggtgtaggtatccgcggctcattttgtacagggaacagagcatcatctctgtcaagaggaaaaatggagcaggtcttagttcagaacgattatctgaacctcatctttgtattggttttaagtgcttttcgtggaactcactttcaattctagaggaatgggtcgcgtgccgctgctagagtaatcattctgaactaaaaaaaaagcttttttttggttttatgtctgcttttatgcctggacaatagctgacagacttgatgctgtcatgttacattatgcggtagtactactccagatattagagtgctgaatgtaa

SEQ ID NO: 66421 - DNA, 3094 bp, Zea Mays
gtacaacttagggtttaattaggatctgcgttgtttaactgttcatcacgagattgaatggttcacaaccactgtattcctcatccaacaccacaatatcttttcgagtaaagtgcacttccgtccttaagcttgtggtgctgtgtgcacgtttcataaacttttaaagtatgtctgttcgggtttatgttaggtccgaaatggatcaaaatagatccgataacgtcttttccttcttcttgctcggtttctcatctgatccgtacatcaaaactacagcaatgaggtgtgtggccgcacgcttgcttgtggcaactggcaaccatgcttgcaaggacatgtgccacccagggccttgtggggagtgtgagctcatgccgaggaagatcagtacatgtcattgcagcaagaccaggctgcaggagaggagaggagggcgagctgcttggacgcaattcatgcaagaagcctgatctgccctctggagactggactggtgttgctagcgcggcgcggttccgagctcagtgatgcctcggctggccgccggtgtggccaggaaggtcggccataatgaccaccacgtgctcttgggaccctgcgtccctgccgatggcctgactacgccgaacgccaagaccttctccacgacagcgacgccacctgcagcttctctggacgagctggcctgctggtcgcggccagtaggagcaggccaggatgaggagcaccaagcttatgagccccagcatcaccgccgccccccaccgaataggtacagcactggcgactaccacggggactgcgccgccgtcccgttcgccctggagccgccatgggcacgtgtttggaatgcaagcaagtgacatgtggggagaaggaagaaaaagacctgctatcggatctgttttaatctgttttggatgtttaaggaccggaagtgcactttactctatcttttcactagcctcttgctacttaagcatgtgtttggttggacatacaaggagagatggaagggggcggccacattttctatagtgtttggatgagagtcacgcgggggcggggtgaacaccggagcattttttggtggcggcgttgtcccaaaaaatcgagggttggtgtcgtccccacctcatcctattttgacctcaaagcaaacacatcataaatggaactgcttgaatatcttggcatgcctgtactgagggcaaaaggtgaagcagaagccctttgcgcccagctgaataatgaaggtcatgtaggtgcttgcatcactgcagacagtgatgctttcctcttcggggctaagactgtcgtaaaggtcctcagatcaaattgcaaggaaccttttgagtgctaccacatagcagatattgagtctggtcttggactaaagaggaagcaattggtggccatggcgcttcttattggcagtgaccatgatttgcatggggtgcctggttttggcctggagactgcacttcgttttgtgcagctatttgatgaagatgaaattttagataagttgcatgaaattggtaaaggggtgtatccgttcctcaaaggatttgacaatccacatattgatgatctcccatcatcgtccaagaaaagcccaattaaatcgccgcactgctcacattgtggtcacccgggcagcaagaaaaatcatatcaaggatgggtgcaattattgcttggtggattcattagagaactgcgtggaaagaccagctggattcaaatgtgaatgtcctagttgtgacgaggcacgtgatctaaacgaacaaagacggcatgaaaattggcaaatcaaggtctgcaaaagaatagctgctgagacaaattttcctaacgaggagatcattaaattgtatctaagcgataacaatctggttgaagggtgttcccttgcttagttggagtaagcctgatgttgaagctttggttgacttattaagttataagcagaattgggaaccatcttatattcgccaaaggatgcttcctatgttatcaaccatatatttaagagaggtggcatcttcttcgtctacaccattgcctctttgtgatcagtatgagtttgattcaattgagcggactaaaataaggcacggtcacccttattacttggtgaaatggaagagagctacccgtggtatgaattctaatatgcctagcaagaagccagtaacggagggagaaacaagtagcgaggtagtggtgttggatgacgatgacaatgaggatacagtggtttgcgagtctccagagttattagatgaacctgatgttccacaagtgcttatggatgatggctgttgctttctattgactgatgaagacattcaacttgttggtgctgcttttcctaaggaaacagcaaggtttcaggaagaacagaggctgaaagaagcaagatcaagatcgcggaaatccaaaacgagcttagcagacagtgggtgcgagacacctaaaggtccgagacctagtggggtgcagcttagcatcacagagttctaccgctcgaagaaagggcaggacatggaatctgggaagaagaagcaggcgggagaggggcacgctgctgcgagggatggctcgagaaaatcctctgacagggacctcaacaacaagagcctgccgaagtccgttcgccgccgcctcctcttcgattgctgaggactagcctggccttctggtgagcactgtaatcttgctgtgccactgttgtaaatgacctagagaacgccttaacctattagccggtgtaggtatccgcggctcattttgtacagggaacagagcatcatctctgtcaagaggaaaaatggagcaggtcttagttcagaacgattatctgaacctcatctttgtattggttttaagtgcttttcgtggaactcactttcaattctagaggaatgggtcgcgtgccgctgctagagtaatcattctgaactaaaaaaaaagcttttttttggttttatgtctgcttttatgcctggacaatagctgacagacttgatgctgtcatgttacattatgcggtagtactactccagatattagagtgctgaatgtaa

SEQ ID NO: 66422 - DNA, 2130 bp, Zea Mays
gcatgtgtttggttggacatacaaggagagatggaagggggcggccacattttctatagtgtttggatgagagtcacgcgggggcggggtgaacaccggagcattttttggtggcggcgttgtcccaaaaaatcgagggttggtgtcgtccccacctcatcctattttgacctcaaagcaaacacatcataaatggaactgcttgaatatcttggcatgcctgtactgagggcaaaaggtgaagcagaagccctttgcgcccagctgaataatgaaggtcatgtaggtgcttgcatcactgcagacagtgatgctttcctcttcggggctaagactgtcgtaaaggtcctcagatcaaattgcaaggaaccttttgagtgctaccacatagcagatattgagtctggtcttggactaaagaggaagcaattggtggccatggcgcttcttattggcagtgaccatgatttgcatggggtgcctggttttggcctggagactgcacttcgttttgtgcagctatttgatgaagatgaaattttagataagttgcatgaaattggtaaaggggtgtatccgttcctcaaaggatttgacaatccacatattgatgatctcccatcatcgtccaagaaaagcccaattaaatcgccgcactgctcacattgtggtcacccgggcagcaagaaaaatcatatcaaggatgggtgcaattattgcttggtggattcattagagaactgcgtggaaagaccagctggattcaaatgtgaatgtcctagttgtgacgaggcacgtgatctaaacgaacaaagacggcatgaaaattggcaaatcaaggtctgcaaaagaatagctgctgagacaaattttcctaacgaggagatcattaaattgtatctaagcgataacaatctggttgaaggtaacaaaaagaaaaaagggtgttcccttgcttagttggagtaagcctgatgttgaagctttggttgacttattaagttataagcagaattgggaaccatcttatattcgccaaaggatgcttcctatgttatcaaccatatatttaagagaggtggcatcttcttcgtctacaccattgcctctttgtgatcagtatgagtttgattcaattgagcggactaaaataaggcacggtcacccttattacttggtgaaatggaagagagctacccgtggtatgaattctaatatgcctagcaagaagccagtaacggagggagaaacaagtagcgaggtagtggtgttggatgacgatgacaatgaggatacagtggtttgcgagtctccagagttattagatgaacctgatgttccacaagtgcttatggatgatggctgttgctttctattgactgatgaagacattcaacttgttggtgctgcttttcctaaggaaacagcaaggtttcaggaagaacagaggctgaaagaagcaagatcaagatcgcggaaatccaaaacgagcttagcagacagtgggtgcgagacacctaaaggtccgagacctagtggggtgcagcttagcatcacagagttctaccgctcgaagaaagggcaggacatggaatctgggaagaagaagcaggcgggagaggggcacgctgctgcgagggatggctcgagaaaatcctctgacagggacctcaacaacaagagcctgccgaagtccgttcgccgccgcctcctcttcgattgctgaggactagcctggccttctggtgagcactgtaatcttgctgtgccactgttgtaaatgacctagagaacgccttaacctattagccggtgtaggtatccgcggctcattttgtacagggaacagagcatcatctctgtcaagaggaaaaatggagcaggtcttagttcagaacgattatctgaacctcatctttgtattggttttaagtgcttttcgtggaactcactttcaattctagaggaatgggtcgcgtgccgctgctagagtaatcattctgaactaaaaaaaaagcttttttttggttttatgtctgcttttatgcctggacaatagctgacagacttgatgctgtcatgttacattatgcggtagtactactccagatattagagtgctgaatgtaa

SEQ ID NO: 66423 - DNA, 232 bp, Zea Mays
cggcgatcttgttggcatgtgtggtcgctacatcccgcgttgccaagatcgcgattcgtttccgagcttcgaggaatcgacgatcaagccttggtgaccaagtgatcgaactcttcgagttctacgaggctgaagaccctgagcatctatttggtgaaggcaagtgtcctctgacccattatgtcctatttactttataattcactaccccgcatactatgaacaacctaag

SEQ ID NO: 66424 - DNA, 470 bp, Zea Mays
agaggtcttagattcttcccttctattctagcctcagccacaaatgcttccattgtatcatatcaacaaaaaggtatgaaaataagataagagatatggataaaatgaaatgaaaccaaaacaaatggtagcatatcagaatgcataaatccatctctattgtacaaacacacttcacattttggatgtcaagaccttgtgcaccttgcaacataattctatttttcaattgagttagcaatgtgaataggtgtagttgatatccactgcctttcaaaaattaaggaacaaaaacagccataatatcatagaatattcattatgggagtactaaaatgatttataaggttctgtttcctctatagaaaagaaaaatgatataaaataaataggtaaccatcaaatcacatttagaatgcatgaagtaccagtagtggtgaggtcacaagtttctcaatagcgaggacgac

SEQ ID NO: 66425 - DNA, 1010 bp, Zea Mays
gaggatattttcattgaatttccagtgatgcagatatctaaccacttgagcattagaacttactccatctgttcctaattataagttgttttgactttcaagactgctacgtatctagacatagtttatatttaggtgcatagaaaaactatgaacctagaatagccaaaacaacttataatttggaatgtaaacaatagtaaataacaaaattagaacatatgcatgtggcatatactcaaaactttcaaaagcaaccatgattaaaatgataaaagattgctttcacacacacaatcagcaacacactcttacgccaaagatgctaaactactttctttttatggatatactacatacacatgttcacaaacaaacataaccctaacacataaccctaacggagttgcagttttattcctagacctgcatttttcctaagcaaacaaataaagttcaattttaatgagcctgaactacatttagccacgatatctaaaagatccaaattggccagacaagtgcactctacaaaataataaataaagcagtaccgacgatgaaagttcaagtggtttataattgtggaattacctctatatgttgccctccagttcagttgaaaaacatagcagaccaaaaaatgaactatttgttttccataaacaaagctacacaatggacgaggccactcgactggagcttcctaataaaagatgttatagtagtaacagcttgacaacaacttggctgaacaaatagtgaactattataatacgaaaattataatagtaaccataaaagacatgtagcatattctaagtacagaatcaaatatccacaattagctcaatggtgacacaacgacaagttttaagatgtatgtattactatgacacatagcagaaattgacctatacaatgcggggtaagtggccttcatagactgtgccttggccccgagagcctatcctgagagtcttactgaaattattagttgtagcagagag

SEQ ID NO: 66426 - DNA, 249 bp, Zea Mays
atggcgcaggcgacgagcggcgggcgtgggctggaggctagacaaagatggccggggcaagggcgctggctgtgggggcgcgacgagcgtgggctgaaggctagagcgaggctgtcaggtgagggcgctgactgtctggccagctgcggttggccgctatgcgagggcgccggctatgggggcgttgctactcggcagcgctcgctagatgggggcggtgaggacgatggatggggcggttattgctag

SEQ ID NO: 66427 - DNA, 2110 bp, Zea Mays
cccaaacccaacccaatgggtcgtgggcaatggctctctagtagtaatctccatctatctataggataggactacagtctacagagaaggatgatcagcgaacggcagatgatcgatgggctttcttttgctggcctggcgtgtcgcttgcatcgcaacggctcctagcaattggcatttctcgattgggccctggaaagtgcgctctaggaaccgctttaggtctggacacgactggtcgtggtccttcaacgtgcacgtggtcgtctcttctccagtccagactctagagcttccttgttccatcgggggctcggggctactacaaacaaactgattttgctcagctgtgagcctgtgacttccacctacagatctactagtagtaggggtatcatacataggcggtccacggctgctaggtggcttctactgtcagacttgttgagaaacgcgagctgggaggcaaactggcacccttttatattgtcgagcttgttcgatgcatgatgctgcctggaaacgctcatcaaccatttatttgatcagagttttacaaacagcttggaccgagacacgcggtacactgctgaaaacgccactcgagtgtgttaaagggctcttaagcccttgcttttgttagccatctaattttgtgagttatgcctcactcctaggtttaaaccagcttctctgcgggtttttttttttttgcttccacatgtggcatgtcccatgtatttttgagacttagacatgtcccatgttagagcaacttaaaaaaaaaagttatattcccccgtggttcttccatactatgtccggaatgtcccgtcttagatcaactagtctctttatattcctcccctatcgacagaaataaagatgttggtaaaaaaacatgttttctttaacggcttcactaattagatctttaaactgttgggcgatgaaaatacagagacggcaatgtttattcaaacaacgactctttaaatgagaatttagagagcaagcctaggaaagacatttaagatactcctaggtggtatgattcaaacttttgacctataaactgactgtatcatcaggacaagtggtcggactatccaatttatttcctccataacggccttgcttatttgtctgtaactaagttgcatagagcctccttatttagctaaatgctaccattatctaagcgtaaatgtagatgattaatcaagcgacatgttctttttataagaactatctctaagtgcaaatgcaataaacaaattaagtcaactatatgctgaagtggaggagagaggtgagaaacggactatatgtttacaacccgctttgacataaaaaccaaataaaactttataatagtgacatctaggccatatatagtaatagcgaagagataactactatataagtagactaaaaaccaactgcgttattagtcttgttctagtaaatataccattatgattattttacctcaagtcactttgttcgacaaattttacagtgacatgtttttattttagacgaagggataagacttgtgcttttctatgagggcttgtacgtatttttttagttagacgtaactatgcactaatacaaactatgttgataagtatctaacacctggttcaaaaaaaaagctactaacatctgaattttattaagacgtggttactcaaaactcaaaaaaaaaaaacgtggttacaaaccaactctaaatactcccttcattcctaagtaaaatcaattcatataaaactaacaaatgtttctgaccaccgcctaaatattggcataagtaagagtaaaaaaaataattgctgagtcaggtgagatgtgccaatttccaaatcgagaaggaaaaagatgttagcattcgaagcaatgaaattgaaactgtactgaagcgttgactgaaatagagaagcacacactacacacggtttcgcgagggcgagacataacacagcgcacccagtcacgaatcagtcgagcagagcaccctcactggtcggccggcgcccgtcggtcccgccgcgcctggactggcaggcacgcccacgcggggtggccaccaataattgtgccc

SEQ ID NO: 66428 - DNA, 682 bp, Zea Mays
ctgggagttgatgtagatctcgtggtacacgccgttgaacttgaccttgacgcggatggtggggacgggcgccccggcgggggcgtcggcgtcggggctccgcttctgcaccagcatcccgccgggccgcacctcccactcgtcctctttcaccgctgccgaagccggagccggagggggaggaggaggaggggagctctccctcatcgcgtcggcgaatgtacctttgggcctggcgcgcatcatcttctcatggtacgtgcacgcaccccgcgcgagcgaagcgagggagggagggacagagagaatcaaaaatcagccgctcctcctgcgcgctctcgccagcaacagcagccaagaacgggcaacaagcggcagagtcagctctgctctgctctgctctgctcggctgtccccgaaacgatctctgcgggcgcacgcggacggctctgggcgctgtcgcgagcaggagcgaactaggcggcgccggatctggggaagacgatttgcagctgcagctagcgcaggtgcctgtgcctcctctcgggtctcggactctcgattggggaaatcaggatcaggggccggggcagcaggcagagaggtaggtgcgggtttaggagctgagctgagccagccgaggtgggggatgggcaagagagagagagaactgggaacataa

SEQ ID NO: 66429 - DNA, 1149 bp, Zea Mays
ccggatcccccatagttgcttccggacccaccggatgacgatgagatggaccacatcgccaagggccagcaccacggcaacgccgtctccctcctccgcccaaatgcaactagtggcaaccaaaacaacatgctcatcctgcaagagacctgcaccgacccgtcaggctctctggtggtgtacgccccggtggacgtgcagtccatgcacgtcgtcatgaacggtggcgactccgcctacgtctctctcctcccctctgggttcgccatcctcccggacggccactgccagtcaccaaacactgcacatcagggttcaccaagctgcggcggtagcagcagcagcagcagcacggggtctctagtcacggtggcattccagatcctggtgaacaacctgcccaccgcgaagctcaccgtggagtcggtggagaccgtcagcaacctgctctcctgcaccatccagaagatcaagtctgcgctccaggccagcatcgtcacgccctagctattagcgggcatttgacatggattccggccgccggttctcagaaaaaaggacggagtagtcggatgccatgtcaaatgcttagctagaggacgacatgctgtgacggcgcagatgctaaacaaggctgtgctcgtacgtacgtcgatcgcttcacatcagaccggcggggaactggtgcttgagaaggcagtgaaagaaaataagggtattaaaataaattatgtagtagtgtggagtatttattgcatagagcaatatatatatggggtgaggtacacagggattaagtcaagaacgaaccgttcgctaggctttgattgcttgagcaaacacgttttgctatcgctcaagcttgttatatgctcatgtggtggttcgggtattgacttaagtctctggcaaaagaaagtgaaacaccacctattagggcttctcctatatataaaatatatatgtagcagtttgttttcaaccatcttgtgaagagttctgttcttttgtttctccgatatagcgaaatatagagatgagaatgtctctgtgtttgtaacgtttgtgtagtgttatttcgtttgagttgatatatatgacatgtacgctttgttcatgtggaaaaaatatgttctagtgtagctcact

SEQ ID NO: 66430 - DNA, 3937 bp, Zea Mays
gttcgtttcctccgtttggccccccgaaaacgctcccaagaaaacgcagcttttccgcggtttcacgctggttgggtttccatggccagacacccagactgcgcttctcttcggcggtgcacgacgccgtctctttcatctgccccggcgaggccagccagatagagcgctagctgctgctgggcttccctcgtagactagctcgctccacatgtcccctccccgctttattatctgccagcctctcgagctctctcgcacctctccctcctcgcccattcttccgccctcttcgtgagtccttcccctaggcgctactcgtctgctctcctctcttctttttagtagctcgctcgccaggccgccaagccacatgcagcatgtggcggagcgcaagtagatagctgctgcgtcttcctggcctgagggtttcggattcatcagccgggccgccggggtcgccatcgccgccgttgggacggcggcggcggagtttggcgtcgagttcttcagagggttagccaggccatccgcggctgcgtggctgctctcctgctattttaatgcctgccttctctccctctcacgcctcataaaaaaaactaataattccttgggatctgaggggatccgcgtggggttggtaggatcgcgggcagagattttagccaggactggaggaaaaccagtccgctctctctccatgagcttcggcggcatgttcgacggcgccggctccggcgtcttctcctacgacgctaccggcggcggcacgggcatgcacaaccccggccgcctcgtcccggccccgcccctgccgaaacctggcggattcggcgccacgggtctctccctcgggctgcaaacgaacatggaaggggctcagctgggcgacttgggtcgtatgggcctgattggcggcggcgggagcgggagcggaggcgacggggactcgctgggccgcggccgtgaggacgagatcgacagccggtcaggcagcgacaacgtcgacggcgcctccggtgacgagatcgacccggacaacagtaaccctcgcaggaagaagaagcgataccaccgccacacaccgcagcaaatccaagaactcgaagctgtgttcaaggagtgcccccaccccgacgagaagcaaaggatggagctcagcaagcggctcaacctagagagccgccaggtcaagttctggttccagaaccgccgcacgcagatgaagacgcagatcgagcggcacgagaacgcgctgctgaggcaggagaacgacaagctgagggcggagaacatgacgatccgggaggcgatgcgcaaccccatctgcgccaactgtggcggcgcggccgtgctcggggaggtgtcgctggaggagcagcacctccgcatagagaacgcgcggctcaaggacgagctggaccgcgtctgcgccctcgccggcaagttcctcggccgcccaatctcctctggcagctccatgtcgtcgtccctgcaaggctgctccggcctcgagctcgccgtcggctccaacaacggctacgggcccggtcccctcggcgcgtcagcgctgcagcccctccccgacctactcggcgccggccttccgggccccgtgggctcggccgccatgcgcttgcccatgggcattggcgccctcgacgttgcgctgcacggggcggccgccgacggcatcgaccgcaccgtcctcctcgagctggcgctcgccgcgatggaggagctcatgaaagtggcgcagatggacgagccgctctggctccgcagtcccgacggcagcggcttggaggcgctcaacctcgacgagtaccaccgagcgttcgccagggtgttcgggccgagccccgcgggctacgtcaccgaggctacccgcgaggccggcgtcgccataaccagcagcgtagacctcgtagacagcctcatggacgcggctcggtggtcggagatgttcccgtgcatcgtggcgagggcgagcacgacggacatcatctcgagcggcatgggcggcacgcgcagcgggtcaatccagctgatgcacgcggagctgcaggtgctgtcgccgctggtgccgatccgtgaggtggtgttccttcggttctgcaagcagcacgccgaggggctgtgggccgtggtcgacgtctcggtggacgccatcctccggcccgacggcggccaccaccacgcgcagaacggcggcggcgccgggtacatgggctgccgcctgctccccaccggctgcatcgtgcaagacatgaacaacggctactccaaggtcacgtgggttgtccacgcggagtacgacgaggcggtggtgcaccaactctaccgcccgctgctccagtccggccaggcccttggcgcgcgccgctggctcgcctcgctccagcgccagtgccagtacctcgccatcctctgctccaactctctccctgcccgcgaccacgccgcgatcacgccggtggggcggaggagcatgctgaagctggcgcagcggatgacggacaacttctgcgccggtgtgtgtgcgtcggcggcgcagaagtggcggcgcctggacgagtggcgcagcggcgagggaggagacgctgctgggaacggcggatcagcagccgcgggcgagggcgaggagaaggtgcggatgatggcgcggcacagcgtgggggcgcccggggatccccccggcgtggtgctcagcgccaccacgtcggtgcggctgcccgccacgtccccgcagcgcgtgttcgactacctccgcgacgagcagcgccgcggcgagtgggacatcctggccaacggtgaggcaatgcaggagatggaccacatcgccaagggccagcaccacggcaacgccgtctccctcctccgcccaaatgcaactagtggcaaccaaaacaacatgctcatcctgcaagagacctgcaccgacccgtcaggctctctggtggtgtacgccccggtggacgtgcagtccatgcacgtcgtcatgaacggtggcgactccgcctacgtctctctcctcccctctgggttcgccatcctcccggacggccactgccagtcaccaaacactgcacatcagggttcaccaagctgcggcggtagcagcagcagcagcagcacggggtctctagtcacggtggcattccagatcctggtgaacaacctgcccaccgcgaagctcaccgtggagtcggtggagaccgtcagcaacctgctctcctgcaccatccagaagatcaagtctgcgctccaggccagcatcgtcacgccctagctattagcgggcatttgacatggattccggccgccggttctcagaaaaaaggacggagtagtcggatgccatgtcaaatgcttagctagaggacgacatgctgtgacggcgcagatgctaaacaaggctgtgctcgtacgtacgtcgatcgcttcacatcagaccggcggggaactggtgcttgagaaggcagtgaaagaaaataagggtattaaaataaattatgtagtagtgtggagtatttattgcatagagcaatatatatatggggtgaggtacacagggattaagtcaagaacgaaccgttcgctaggctttgattgcttgagcaaacacgttttgctatcgctcaagcttgttatatgctcatgtggtggttcgggtattgacttaagtctctggcaaaagaaagtgaaacaccacctattagggcttctcctatatataaaatatatatgtagcagtttgttttcaaccatcttgtgaagagttctgttcttttgtttctccgatatagcgaaatatagagatgagaatgtctctgtgtttgtaacgtttgtgtagtgttatttcgtttgagttgatatatatgacatgtacgctttgttcatgtggaaaaaatatgttctagtgtagctcact

SEQ ID NO: 66431 - DNA, 1593 bp, Zea Mays
ccgcaccgcactcacaccatttcaccatctctccgcggaagcagatcctctccgctcgccagcctccccctcctgctgctgcctcctcgcttcaagcaacacccgaagcggcaacaaccaccaccaccaccaccaccggacctgcctgagcgaccccttggcttcccactccactgaagcagggcgagagagagtaaggaggaggaggagaagccatggcgagcgacggcgacggtaagggccgcgtcgctacggcgccgggggcagggtacgggtacgcggcgtacggcggctaccagggggcggaggagcggaagtggtggccgtggctcgtgcccaccgtcatcgtcgcctgcatcgccgtgttcgtcgtcgagatgtacgagaacaactgccccaagcacgggagccagctcggcgactgcgtcgccggcttcctccgccgcttctccttccagccgctccgcgagaacccgctgctcggcccgtcctcctccactttggagaaaatgggagctcttgactggaataaaattgtccatcaaaaccaagggtggcgccttattagctgcatctggctccatgctggcctaatccatttggttgtgaacatgctaagtttgctgtttattggaatccgccttgagcagcaatttggatttgttcgcattggtgccatatacctactgtctggttttggtggcagcgtgttgtctgcactcttcctacggaacagctacatctccgttggtgcttctggagctctatttggcctgctgggatccatgctttctgaactactcatgaactggactatatactccaacaaggcagcagctataataacactgttgtttattattgcactcaatttggctattgggatactacctcacgttgacaactttgctcacattggtggattcgcgacgggtttcctcttgggttttgttctgttggcaaggcctcaatttagctggatggaaagtcatgagttgccacacactaaccaacctcccaagtacaaagcataccagtatattttgtgggttgtggcactcgtcttgctgttagttggaaaacgtgcaacaaagattcgtgattctggactaatgctaaattttggacgagctataaagatgtcacttgttttttgtgaaagcttgaaataacactaatgtcaaaattcttggggcacaggtttgtgatttcactggtgatgcttttcaaagggaagaacgggaacgatggctgccattggtgccactacctgaactgcgtgccaacatccaagtggaagtgtaacacctagacacctcagttttctgtacactcgggggcaaaaatgtagtatccagatttacaagaccattctctatgtttgtttgtctgtagatatgaacaagttctttgttgtttactggttttgagtttccttgcctatgtaaactgcttcgttgagcgttctatgtttataattggagtttgatagctgttttaaattgctcaatggaaaagcagtagctttggtgcgcagttgatcgtggtgtttacacaaataaaaatacgataattttttatctaacagataac

SEQ ID NO: 66432 - DNA, 1002 bp, Zea Mays
cccaattagagtgttacgggtgtgcttcagtttggagaaaatgggagctcttgactggaataaaattgtccatcaaaaccaagggtggcgccttattagctgcatctggctccatgctggcctaatccatttggttgtgaacatgctaagtttgctgtttattggaatccgccttgagcagcaatttggatttgttcgcattggtgccatatacctactgtctggttttggtggcagcgtgttgtctgcactcttcctacggaacagctacatctccgttggtgcttctggagctctatttggcctgctgggatccatgctttctgaactactcatgaactggactatatactccaacaaggcagcagctataataacactgttgtttattattgcactcaatttggctattgggatactacctcacgttgacaactttgctcacattggtggattcgcgacgggtttcctcttgggttttgttctgttggcaaggcctcaatttagctggatggaaagtcatgagttgccacacactaaccaacctcccaagtacaaagcataccagtatattttgtgggttgtggcactcgtcttgctgttagttgggtttgtgatttcactggtgatgcttttcaaagggaagaacgggaacgatggctgccattggtgccactacctgaactgcgtgccaacatccaagtggaagtgtaacacctagacacctcagttttctgtacactcgggggcaaaaatgtagtatccagatttacaagaccattctctatgtttgtttgtctgtagatatgaacaagttctttgttgtttactggttttgagtttccttgcctatgtaaactgcttcgttgagcgttctatgtttataattggagtttgatagctgttttaaattgctcaatggaaaagcagtagctttggtgcgcagttgatcgtggtgtttacacaaataaaaatacgataattttttatctaacagataac

SEQ ID NO: 66433 - DNA, 1273 bp, Zea Mays
gccccacaaccgctctatacgactcctccatcctccccccctccccgtgatggctgcaatggatggggtaattgtagtggagctgtagaggcggcgggggtgcggttgcgacggactgtgctgcgccgacaagctgggaagaggaggcagcggcggcggggtgggacttgggatgggtcttctgtcgaaccgggtggagcggtcggagatcaggcccggcgaccacatctacacctggcgggccgtctacgcctactcccaccacggtatttatgtcgggggaagcaaagtggtccattttacacctgtctaatagtggtgttgtcctcacttgcttggactgtttcctccgcaacggctccctctattgcttcgagtatggagtgccatctgcagttttccttgcaaagattcgtggggggacctgcaccattgccgaatcagacccaccagaagttgttgtccatcgagcgatgtacctgcttcaaaatggttttggaaactacgacatgtttgagaagaactgcgaagacttcgcactctactgcaagactgggcttctacctgttgaggagcctggcattgggactagtgggcaagcttcttctgctattggtgtgccgttggcagctcttctgtccactccgttcaagcttctggctgctggtccgcttggaatggccactgtcactgctgggatgtactgtgctggcagatacattactgacataggagtaaggaaggacgtagcaaaagttgaagtggagaaattatcatcgcaccccggtttccaccttgttgaagatgaagaatcagtcaacaagcgatcagaaaaaccaaagaccttgctccctatgaagaggaaacgagaaaggtgactgcgaagcacagcttaggaggatgaacttctcttcccttcaattggtgtcgaattgtggataatttgggatatgataataagactcggtatagatatgtgccttgcgaatgtatcataattggattaggcgcacccctcacctgatcaactgtaactgccttataaattcaatcaaattgctatataatgtagatttttcttctttgtgaggtttcagtcttctgctgcaattaataacagttataatattttttactgatctgggagatcactgtatctgtattctgtagttacaacttacaaggtagagcaaactatcggcaatggcgttttcatcaggtatactgtacgaaaagtgaatataaaaaattgagcagagcttgtttttggaga

SEQ ID NO: 66434 - DNA, 1603 bp, Zea Mays
gccccacaaccgctctatacgactcctccatcctccccccctccccgtgatggctgcaatggatggggtaattgtagtggagctgtagaggcggcgggggtgcggttgcgacggactgtgctgcgccgacaagctgggaagaggaggcagcggcggcggggtgggacttgggatgggtcttctgtcgaaccgggtggagcggtcggagatcaggcccggcgaccacatctacacctggcgggccgtctacgcctactcccaccacgataacggaggtcgatcttcatttaggaagcttatacgacccttcaacagtgtcacaattgtgctacagggacagtgtctccacagtcagtgccttttgttggcagatgccaagatctgggttctgcactaccagcatgaaaagctgctcaaattgttgaaacccccctatttggcttctcctgcatcaatgcatcatacatcctctctggctctggatttttttttcaagtatttatgtcgggggaagcaaagtggtccattttacacgtaagaaagaaactgaaacttcagattcatcagactccacctccagcctgatctcagagatttcatcagagtgccaaacattccctgattgtggatttcagctgtctaatagtggtgttgtcctcacttgcttggactgtttcctccgcaacggctccctctattgcttcgagtatggagtgccatctgcagttttccttgcaaagattcgtggggggacctgcaccattgccgaatcagacccaccagaagttgttgtccatcgagcgatgtacctgcttcaaaatggttttggaaactacgacatgtttgagaagaactgcgaagacttcgcactctactgcaagactgggcttctacctgttgaggagcctggcattgggactagtgggcaagcttcttctgctattggtgtgccgttggcagctcttctgtccactccgttcaagcttctggctgctggtccgcttggaatggccactgtcactgctgggatgtactgtgctggcagatacattactgacataggagtaaggaaggacgtagcaaaagttgaagtggagaaattatcatcgcaccccggtttccaccttgttgaagatgaagaatcagtcaacaagcgatcagaaaaaccaaagaccttgctccctatgaagaggaaacgagaaaggtgactgcgaagcacagcttaggaggatgaacttctcttcccttcaattggtgtcgaattgtggataatttgggatatgataataagactcggtatagatatgtgccttgcgaatgtatcataattggattaggcgcacccctcacctgatcaactgtaactgccttataaattcaatcaaattgctatataatgtagatttttcttctttgtgaggtttcagtcttctgctgcaattaataacagttataatattttttactgatctgggagatcactgtatctgtattctgtagttacaacttacaaggtagagcaaactatcggcaatggcgttttcatcaggtatactgtacgaaaagtgaatataaaaaattgagcagagcttgtttttggaga

SEQ ID NO: 66435 - DNA, 1535 bp, Zea Mays
gccccacaaccgctctatacgactcctccatcctccccccctccccgtgatggctgcaatggatggggtaattgtagtggagctgtagaggcggcgggggtgcggttgcgacggactgtgctgcgccgacaagctgggaagaggaggcagcggcggcggggtgggacttgggatgggtcttctgtcgaaccgggtggagcggtcggagatcaggcccggcgaccacatctacacctggcgggccgtctacgcctactcccaccacgggacagtgtctccacagtcagtgccttttgttggcagatgccaagatctgggttctgcactaccagcatgaaaagctgctcaaattgttgaaacccccctatttggcttctcctgcatcaatgcatcatacatcctctctggctctggatttttttttcaagtatttatgtcgggggaagcaaagtggtccattttacacgtaagaaagaaactgaaacttcagattcatcagactccacctccagcctgatctcagagatttcatcagagtgccaaacattccctgattgtggatttcagctgtctaatagtggtgttgtcctcacttgcttggactgtttcctccgcaacggctccctctattgcttcgagtatggagtgccatctgcagttttccttgcaaagattcgtggggggacctgcaccattgccgaatcagacccaccagaagttgttgtccatcgagcgatgtacctgcttcaaaatggttttggaaactacgacatgtttgagaagaactgcgaagacttcgcactctactgcaagactgggcttctacctgttgaggagcctggcattgggactagtgggcaagcttcttctgctattggtgtgccgttggcagctcttctgtccactccgttcaagcttctggctgctggtccgcttggaatggccactgtcactgctgggatgtactgtgctggcagatacattactgacataggagtaaggaaggacgtagcaaaagttgaagtggagaaattatcatcgcaccccggtttccaccttgttgaagatgaagaatcagtcaacaagcgatcagaaaaaccaaagaccttgctccctatgaagaggaaacgagaaaggtgactgcgaagcacagcttaggaggatgaacttctcttcccttcaattggtgtcgaattgtggataatttgggatatgataataagactcggtatagatatgtgccttgcgaatgtatcataattggattaggcgcacccctcacctgatcaactgtaactgccttataaattcaatcaaattgctatataatgtagatttttcttctttgtgaggtttcagtcttctgctgcaattaataacagttataatattttttactgatctgggagatcactgtatctgtattctgtagttacaacttacaaggtagagcaaactatcggcaatggcgttttcatcaggtatactgtacgaaaagtgaatataaaaaattgagcagagcttgtttttggaga

SEQ ID NO: 66436 - DNA, 1694 bp, Zea Mays
gccccacaaccgctctatacgactcctccatcctccccccctccccgtgatggctgcaatggatggggtaattgtagtggagctgtagaggcggcgggggtgcggttgcgacggactgtgctgcgccgacaagctgggaagaggaggcagcggcggcggggtgggacttgggatgggtcttctgtcgaaccgggtggagcggtcggagatcaggcccggcgaccacatctacacctggcgggccgtctacgcctactcccaccacggaattctagtagtgtgcaagttagctgttcaccggaattctggcccgcgccggctcgctctggacttccttttcgccgccgctggatgctgataacggaggtcgatcttcatttaggaagcttatacgacccttcaacagtgtcacaattgtgctacagggacagtgtctccacagtcagtgccttttgttggcagatgccaagatctgggttctgcactaccagcatgaaaagctgctcaaattgttgaaacccccctatttggcttctcctgcatcaatgcatcatacatcctctctggctctggatttttttttcaagtatttatgtcgggggaagcaaagtggtccattttacacgtaagaaagaaactgaaacttcagattcatcagactccacctccagcctgatctcagagatttcatcagagtgccaaacattccctgattgtggatttcagctgtctaatagtggtgttgtcctcacttgcttggactgtttcctccgcaacggctccctctattgcttcgagtatggagtgccatctgcagttttccttgcaaagattcgtggggggacctgcaccattgccgaatcagacccaccagaagttgttgtccatcgagcgatgtacctgcttcaaaatggttttggaaactacgacatgtttgagaagaactgcgaagacttcgcactctactgcaagactgggcttctacctgttgaggagcctggcattgggactagtgggcaagcttcttctgctattggtgtgccgttggcagctcttctgtccactccgttcaagcttctggctgctggtccgcttggaatggccactgtcactgctgggatgtactgtgctggcagatacattactgacataggagtaaggaaggacgtagcaaaagttgaagtggagaaattatcatcgcaccccggtttccaccttgttgaagatgaagaatcagtcaacaagcgatcagaaaaaccaaagaccttgctccctatgaagaggaaacgagaaaggtgactgcgaagcacagcttaggaggatgaacttctcttcccttcaattggtgtcgaattgtggataatttgggatatgataataagactcggtatagatatgtgccttgcgaatgtatcataattggattaggcgcacccctcacctgatcaactgtaactgccttataaattcaatcaaattgctatataatgtagatttttcttctttgtgaggtttcagtcttctgctgcaattaataacagttataatattttttactgatctgggagatcactgtatctgtattctgtagttacaacttacaaggtagagcaaactatcggcaatggcgttttcatcaggtatactgtacgaaaagtgaatataaaaaattgagcagagcttgtttttggaga

SEQ ID NO: 66437 - DNA, 1536 bp, Zea Mays
gccccacaaccgctctatacgactcctccatcctccccccctccccgtgatggctgcaatggatggggtaattgtagtggagctgtagaggcggcgggggtgcggttgcgacggactgtgctgcgccgacaagctgggaagaggaggcagcggcggcggggtgggacttgggatgggtcttctgtcgaaccgggtggagcggtcggagatcaggcccggcgaccacatctacacctggcgggccgtctacgcctactcccaccacgcaggttcttttgctttgcgtcttttcactttcagataacggaggtcgatcttcatttaggaagcttatacgacccttcaacagtgtcacaattgtgctacagggacagtgtctccacagtcagtgccttttgttggcagatgccaagatctgggttctgcactaccagcatgaaaagctgctcaaattgttgaaacccccctatttggcttctcctgcatcaatgcatcatacatcctctctggctctggatttttttttcaagtatttatgtcgggggaagcaaagtggtccattttacacctgtctaatagtggtgttgtcctcacttgcttggactgtttcctccgcaacggctccctctattgcttcgagtatggagtgccatctgcagttttccttgcaaagattcgtggggggacctgcaccattgccgaatcagacccaccagaagttgttgtccatcgagcgatgtacctgcttcaaaatggttttggaaactacgacatgtttgagaagaactgcgaagacttcgcactctactgcaagactgggcttctacctgttgaggagcctggcattgggactagtgggcaagcttcttctgctattggtgtgccgttggcagctcttctgtccactccgttcaagcttctggctgctggtccgcttggaatggccactgtcactgctgggatgtactgtgctggcagatacattactgacataggagtaaggaaggacgtagcaaaagttgaagtggagaaattatcatcgcaccccggtttccaccttgttgaagatgaagaatcagtcaacaagcgatcagaaaaaccaaagaccttgctccctatgaagaggaaacgagaaaggtgactgcgaagcacagcttaggaggatgaacttctcttcccttcaattggtgtcgaattgtggataatttgggatatgataataagactcggtatagatatgtgccttgcgaatgtatcataattggattaggcgcacccctcacctgatcaactgtaactgccttataaattcaatcaaattgctatataatgtagatttttcttctttgtgaggtttcagtcttctgctgcaattaataacagttataatattttttactgatctgggagatcactgtatctgtattctgtagttacaacttacaaggtagagcaaactatcggcaatggcgttttcatcaggtatactgtacgaaaagtgaatataaaaaattgagcagagcttgtttttggaga

SEQ ID NO: 66438 - DNA, 1634 bp, Zea Mays
gccccacaaccgctctatacgactcctccatcctccccccctccccgtgatggctgcaatggatggggtaattgtagtggagctgtagaggcggcgggggtgcggttgcgacggactgtgctgcgccgacaagctgggaagaggaggcagcggcggcggggtgggacttgggatgggtcttctgtcgaaccgggtggagcggtcggagatcaggcccggcgaccacatctacacctggcgggccgtctacgcctactcccaccacggttcttttgctttgcgtcttttcactttcagataacggaggtcgatcttcatttaggaagcttatacgacccttcaacagtgtcacaattgtgctacagggacagtgtctccacagtcagtgccttttgttggcagatgccaagatctgggttctgcactaccagcatgaaaagctgctcaaattgttgaaacccccctatttggcttctcctgcatcaatgcatcatacatcctctctggctctggatttttttttcaagtatttatgtcgggggaagcaaagtggtccattttacacgtaagaaagaaactgaaacttcagattcatcagactccacctccagcctgatctcagagatttcatcagagtgccaaacattccctgattgtggatttcagctgtctaatagtggtgttgtcctcacttgcttggactgtttcctccgcaacggctccctctattgcttcgagtatggagtgccatctgcagttttccttgcaaagattcgtggggggacctgcaccattgccgaatcagacccaccagaagttgttgtccatcgagcgatgtacctgcttcaaaatggttttggaaactacgacatgtttgagaagaactgcgaagacttcgcactctactgcaagactgggcttctacctgttgaggagcctggcattgggactagtgggcaagcttcttctgctattggtgtgccgttggcagctcttctgtccactccgttcaagcttctggctgctggtccgcttggaatggccactgtcactgctgggatgtactgtgctggcagatacattactgacataggagtaaggaaggacgtagcaaaagttgaagtggagaaattatcatcgcaccccggtttccaccttgttgaagatgaagaatcagtcaacaagcgatcagaaaaaccaaagaccttgctccctatgaagaggaaacgagaaaggtgactgcgaagcacagcttaggaggatgaacttctcttcccttcaattggtgtcgaattgtggataatttgggatatgataataagactcggtatagatatgtgccttgcgaatgtatcataattggattaggcgcacccctcacctgatcaactgtaactgccttataaattcaatcaaattgctatataatgtagatttttcttctttgtgaggtttcagtcttctgctgcaattaataacagttataatattttttactgatctgggagatcactgtatctgtattctgtagttacaacttacaaggtagagcaaactatcggcaatggcgttttcatcaggtatactgtacgaaaagtgaatataaaaaattgagcagagcttgtttttggaga

SEQ ID NO: 66439 - DNA, 1924 bp, Zea Mays
gccccacaaccgctctatacgactcctccatcctccccccctccccgtgatggctgcaatggatggggtaattgtagtggagctgtagaggcggcgggggtgcggttgcgacggactgtgctgcgccgacaagctgggaagaggaggcagcggcggcggggtgggacttgggatgggtcttctgtcgaaccgggtggagcggtcggagatcaggcccggcgaccacatctacacctggcgggccgtctacgcctactcccaccacggaattctagtagtgtgcaagttagctgttcaccggaattctggcccgcgccggctcgctctggacttccttttcgccgccgctggatgctggtatttgttgtttttttgctttgttccgcgataggattactagtggtgatttgtgtgtactctctacacaaacggaagataccacacaaactgaagataccatggtctctacataaacccttccagatggccaggatgccacatgctgtgttctgctttccgtgcagaacaaatggcacttgttgctgctcacctactgctaaccaacgtgtctatctgtttctgaactttgttgtctctagtgtggagcagccttactgttagctcgagtttacgtgcaggaaagaaacactacataaggttcttttgctttgcgtcttttcactttcagataacggaggtcgatcttcatttaggaagcttatacgacccttcaacagtgtcacaattgtgctacagggacagtgtctccacagtcagtgccttttgttggcagatgccaagatctgggttctgcactaccagcatgaaaagctgctcaaattgttgaaacccccctatttggcttctcctgcatcaatgcatcatacatcctctctggctctggatttttttttcaagtatttatgtcgggggaagcaaagtggtccattttacacctgtctaatagtggtgttgtcctcacttgcttggactgtttcctccgcaacggctccctctattgcttcgagtatggagtgccatctgcagttttccttgcaaagattcgtggggggacctgcaccattgccgaatcagacccaccagaagttgttgtccatcgagcgatgtacctgcttcaaaatggttttggaaactacgacatgtttgagaagaactgcgaagacttcgcactctactgcaagactgggcttctacctgttgaggagcctggcattgggactagtgggcaagcttcttctgctattggtgtgccgttggcagctcttctgtccactccgttcaagcttctggctgctggtccgcttggaatggccactgtcactgctgggatgtactgtgctggcagatacattactgacataggagtaaggaaggacgtagcaaaagttgaagtggagaaattatcatcgcaccccggtttccaccttgttgaagatgaagaatcagtcaacaagcgatcagaaaaaccaaagaccttgctccctatgaagaggaaacgagaaaggtgactgcgaagcacagcttaggaggatgaacttctcttcccttcaattggtgtcgaattgtggataatttgggatatgataataagactcggtatagatatgtgccttgcgaatgtatcataattggattaggcgcacccctcacctgatcaactgtaactgccttataaattcaatcaaattgctatataatgtagatttttcttctttgtgaggtttcagtcttctgctgcaattaataacagttataatattttttactgatctgggagatcactgtatctgtattctgtagttacaacttacaaggtagagcaaactatcggcaatggcgttttcatcaggtatactgtacgaaaagtgaatataaaaaattgagcagagcttgtttttggaga

SEQ ID NO: 66440 - DNA, 1750 bp, Zea Mays
accaatacagcactggaccactatatatccccccgccccgcgctggggccggtccccagctagcgagcgccgccggtgccagtgcaacagaacacgcaccacacgggcgcagactgcagagacaacagatcgatcgtccaatggcgatcggcgggtcggaggccggcgggggaggcgcggggagcatgaggagcgtgctggtgacgggcggcgcggggttcatcggcacgcacacggtgctgcgcctgctggagcagggctacatcgtcaccgtcgtcgacaacttccacaactccgtccccgaggcgctcgaccgcgtccgcctcatcgccggccccgcgctctccacccgcctcgacttcatccgcggggacctgaggaacaccgatgacttggagaaggtgttcgctgccaggaggtacgacgccgtcatccacttcgctgggctgaaggccgtgggggagagcgtcgcgcacccggagatgtactacgagaacaacctcatcggcaccatcaacctctacaagagcatgaaggagcacggctgcaagaagctggttttctcgtcatccgccaccgtgtacggctggccggaggtgatcccatgcgtcgaggactccaagctgcaggccgccaacccatacggcaggaccaagcttatccttgaggatatggcgcgtgactaccaccgcgcggacacggagtggagcatcgtcctgctgcgctacttcaaccccatcggtgcgcacagctccggcgagatcggagaggaccccaaggggataccgaacaacctgctgccctacatccagcaggtcgccgtcggcaggctccccgagctcaacgtctacggccacgattaccccacccgggacggcaccgcgatcagggactacatacacgtcgtcgacctcgccgatgggcacatcgcagcgctcaagaagctcttcgactctcctgatataggttgtgtggcctacaatctgggtacagggcgcggcacatccgttctggagatggtggcggcgttcaagaaggcctccggagattcccaccaagttgtgccccaggagaccgggtgacgcgacggaggtttacgcgtccactgagaaggctgaaagagagcttgcatggagggcccaatatggaatcgaggagatgtgcagggaccaatggaactgggccaagaagaacccgtatggctactgcggcggtgcaaaaaaatagcgtaggttcgtcgcaatgaagaattgtcgatagtagttctcttctctacactaatcaatggaacatgtaataaacacggaccacctaatctctactagtttctatggtttccactatcattccttttgtaaaaagtctttacacttctttctaatctaacccatagtccaaaacaagtcctatcagcgtgtggctagttctctctgccaccacacgagtcacaactgagagcgaaagccctagcacccttactttgtcccaaacccgcaaccccacgcccgcatctaacggctgcggcctcggtcgatctccgtcgaggcggaggcgacacttggagaggctatccccatttcttattatggaagcggagagaaagcagtgaggttcaagattgcaacagtcatctagagctaggacgccatggccatccggagccacgattgtcccaatccccctcgtttttgtctcttcagtggcgcttattatttcctatgttttcctgtgaaaatgaactgattcctgt

SEQ ID NO: 66441 - DNA, 2578 bp, Zea Mays
cggcgccagtgtaaattgtgtaatcctacactagcagtctagcgctaccaattggcacctcctgctgccgcgccaccatgctctatgctcacctccaccttcgccgcccctgctccccgttcgcctactgcccctacagcaagctatccgtttccatcccaaccctcaaccctctgccacgcgggccgctttctcgccgcgcctgcgcctgcgcccaccggtacctacgacacgtcgcgtcaccggcggatgaggaagaggctgggtacggggagggcagcgtggagggtgatgatctgggacccgcgtcagcggcggcagtggcagcgaccatccgccgggcctccagcgcgtcgcccgtgcggttcaggtgcgtgcttggagaggcagtggaggaaccgcgcggcgaggagggcttggccgacccaagccccgactttcgccggctctgtgcggagcagcttgagattttccgagtgctcatctcccgtgacgccgtactctctgtgtacgtgagacctgctggcagttatattatggatcagctggaactgcgccgagttgctttatatcctggaattaataatctttctgaaaaagatacccctgtcctagtttgtaatttttctatatcttctggactacgagcagcagaagcttttctagtaaaacaacagatggaagtcataagagaatttggggctatagttcttccaatggtgaaacacccctttgttgttgggttccttgtcgtagagcttccagaattacatggtggacgtgctatgaactcttatactgctgatactgagttaccacctaacacatttatggataaatcatctgatgtaactccacatactgcgtgggatattcaaacttatggtgatcaggcaaagggttattctcagcttgttaatgaatggaagaatagtgcccttatgatttctcgaactctggcaatggcttatgttatggatcagaaagcatatctgcttcaacaaacttcctggcaaaataatgttagaatgagtggcttagtggaacagatttggggccccctctctagcattcgtgctcttgcaaagatgttatcctttcacacaaagagaaatcccctatgatattattgaagatatgctcacccaaggtgatcacatgaaagatgctctgcaacaaattcaagatgctgtatatctgactaaggcaaacatagttagaagcaatgaggagactttaaagacaattcagagatcaccacatccttcaagaactttatcagattataaatcagtacctgggaatgattcacagaagttggatccagttttagccctgagttctgatgggtatgacatggtgatgcctatgccacctctatggctggcacctcttcaacaccaatatgataggcagaccatgtgatctctgtgatgtgctgaaggatttagttgcaggagcattaccacttgcttataagcagcagcgcacattagatttaacagaaatttcacatccacttcatgttgctgttgaggaatctgctttaagaaaagccttgagtaatctgattgagggagcgctcctacgtacacagcatggtggagtagttcaaatatgtgcagtcgaagcacctgcaggaggcgctctcgtggtcatcgatgatgatgggcctgatatgcaatacatgactcagatgcgctccctggccccatttggatcagaccttgcagatggtatgctcgaagataacatgacgtggaacttcatcgcgggattaacggtcgcacgtgagctacttgaggaatatggatgcgtcctgcgtgtgatatcacctcgaaggactgatgcggttataggcaccggagggagtcgtgttgagatatggttgccatcttttcagacacaagcagccaagactagtcaagaagtgtagtttacatctgaggaagcgaggcatgcttcgttttcccgtacgttttgaaatctgtagatattggcttaccggaatgttactgtaccagtaacatctcatatgttgaatttgcaaaattacaggacgtgcgcaaatgattgtgatggtgatgttgcattgctgatgctccttttgctacttcatttctacttccattgtctcattgctgatgctccttttacaatataaatggtcgaatatgtgtgtgtgttttcttcatcctgcattcctgctgatccaaaccaactgacacctcaccattgcaaacccaccatcagaagctatcaacaaacaaaaacgccatcatctgaccattagcagccaaatccccattcagcaaaaccatgtcttggtcgtttcttggcgtcagacgctttgttcccttgtcagctgcgttcaccgtccgacgtggacgctctgctcggtgggtgatccaggagagaagggcacgaacacgtgaccgccaaacataggccgcatcagcgcgtcatcgaccttgcgccagtagtagtgcaccgtgtgagtcggcttgctgaggaggctggacggcctcacaatatgtgccatggttcgagcctgcatgcttgtcaggaaaggtgagag

SEQ ID NO: 66442 - DNA, 2574 bp, Zea Mays
cggcgccagtgtaaattgtgtaatcctacactagcagtctagcgctaccaattggcacctcctgctgccgcgccaccatgctctatgctcacctccaccttcgccgcccctgctccccgttcgcctactgcccctacagcaagctatccgtttccatcccaaccctcaaccctctgccacgcgggccgctttctcgccgcgcctgcgcctgcgcccaccggtacctacgacacgtcgcgtcaccggcggatgaggaagaggctgggtacggggagggcagcgtggagggtgatgatctgggacccgcgtcagcggcggcagtggcagcgaccatccgccgggcctccagcgcgtcgcccgtgcggttcaggtgcgtgcttggagaggcagtggaggaaccgcgcggcgaggagggcttggccgacccaagccccgactttcgccggctctgtgcggagcagcttgagattttccgagtgctcatctcccgtgacgccgtactctctgtgtacgtgagacctgctggcagttatattatggatcagctggaactgcgccgagttgctttatatcctggaattaataatctttctgaaaaagatacccctgtcctagtttgtaatttttctatatcttctggactacgagcagcagaagcttttctagtaaaacaacagatggaagtcataagagaatttggggctatagttcttccaatggtgaaacacccctttgttgttgggttccttgtcgtagagcttccagaattacatggtggacgtgctatgaactcttatactgctgatactgagttaccacctaacacatttatggataaatcatctgatgtaactccacatactgcgtgggatattcaaacttatggtgatcaggcaaagggttattctcagcttgttaatgaatggaagaatagtgcccttatgatttctcgaactctggcaatggcttatgttatggatcagaaagcatatctgcttcaacaaacttcctggcaaaataatgttagaatgagtggcttagtggaacagatttggggccccctctctagcattcgtgctcttgcaaagatgttatcctttcacacaaagagaaatcccctatgatattattgaagatatgctcacccaaggtgatcacatgaaagatgctctgcaacaaattcaagatgctgtatatctgactaaggcaaacatagttagaagcaatgaggagactttaaagacaattcagagatcaccacatccttcaagaactttatcagattataaatcagtacctgggaatgattcacagaagttggatccagttttagccctgagttctgatgggtatgacatggtgatgcctatgccacctctatggctggcacctcttcaacaccaatatgatagaccatgtgatctctgtgatgtgctgaaggatttagttgcaggagcattaccacttgcttataagcagcagcgcacattagatttaacagaaatttcacatccacttcatgttgctgttgaggaatctgctttaagaaaagccttgagtaatctgattgagggagcgctcctacgtacacagcatggtggagtagttcaaatatgtgcagtcgaagcacctgcaggaggcgctctcgtggtcatcgatgatgatgggcctgatatgcaatacatgactcagatgcgctccctggccccatttggatcagaccttgcagatggtatgctcgaagataacatgacgtggaacttcatcgcgggattaacggtcgcacgtgagctacttgaggaatatggatgcgtcctgcgtgtgatatcacctcgaaggactgatgcggttataggcaccggagggagtcgtgttgagatatggttgccatcttttcagacacaagcagccaagactagtcaagaagtgtagtttacatctgaggaagcgaggcatgcttcgttttcccgtacgttttgaaatctgtagatattggcttaccggaatgttactgtaccagtaacatctcatatgttgaatttgcaaaattacaggacgtgcgcaaatgattgtgatggtgatgttgcattgctgatgctccttttgctacttcatttctacttccattgtctcattgctgatgctccttttacaatataaatggtcgaatatgtgtgtgtgttttcttcatcctgcattcctgctgatccaaaccaactgacacctcaccattgcaaacccaccatcagaagctatcaacaaacaaaaacgccatcatctgaccattagcagccaaatccccattcagcaaaaccatgtcttggtcgtttcttggcgtcagacgctttgttcccttgtcagctgcgttcaccgtccgacgtggacgctctgctcggtgggtgatccaggagagaagggcacgaacacgtgaccgccaaacataggccgcatcagcgcgtcatcgaccttgcgccagtagtagtgcaccgtgtgagtcggcttgctgaggaggctggacggcctcacaatatgtgccatggttcgagcctgcatgcttgtcaggaaaggtgagag

SEQ ID NO: 66443 - DNA, 2441 bp, Zea Mays
agcgctaccaattggcacctcctgctgccgcgccaccatgctctatgctcacctccaccttcgccgcccctgctccccgttcgcctactgcccctacagcaagctatccgtttccatcccaaccctcaaccctctgccacgcgggccgctttctcgccgcgcctgcgcctgcgcccaccggtacctacgacacgtcgcgtcaccggcggatgaggaagaggctgggtacggggagggcagcgtggagggtgatgatctgggacccgcgtcagcggcggcagtggcagcgaccatccgccgggcctccagcgcgtcgcccgtgcggttcaggtgcgtgcttggagaggcagtggaggaaccgcgcggcgaggagggcttggccgacccaagccccgactttcgccggctctgtgcggagcagcttgagattttccgagtgctcatctcccgtgacgccgtactctctgtgtacgtgagacctgctggcagttatattatggatcagctggaactgcgccgagttgctttatatcctggaattaataatctttctgaaaaagatacccctgtcctagtttgtaatttttctatatcttctggactacgagcagcagaagcttttctagtaaaacaacagatggaagtcataagagaatttggggctatagttcttccaatggtgaaacacccctttgttgttgggttccttgtcgtagagcttccagaattacatggtggacgtgctatgaactcttatactgctgatactgagttaccacctaacacatttatggataaatcatctgatgtaactccacatactgcgtgggatattcaaacttatggtgatcaggcaaagggttattctcagcttgttaatgaatggaagaatagtgcccttatgatttctcgaactctggcaatggcttatgttatggatcagaaagcatatctgcttcaacaaacttcctggcaaaataatgttagaatgagtggcttagtggaacagatttggggccccctctctagcattcgtgctcttgcaaagatgttatcctttcacacaaagagaagtgagatcccctatgatattattgaagatatgctcacccaaggtgatcacatgaaagatgctctgcaacaaattcaagatgctgtatatctgactaaggcaaacatagttagaagcaatgaggagactttaaagacaattcagagatcaccacatccttcaagaactttatcagattataaatcagtacctgggaatgattcacagaagttggatccagttttagccctgagttctgatgggtatgacatggtgatgcctatgccacctctatggctggcacctcttcaacaccaatatgataggcagaccatgtgatctctgtgatgtgctgaaggatttagttgcaggagcattaccacttgcttataagcagcagcgcacattagatttaacagaaatttcacatccacttcatgttgctgttgaggaatctgctttaagaaaagccttgagtaatctgattgagggagcgctcctacgtacacagcatggtggagtagttcaaatatgtgcagtcgaagcacctgcaggaggcgctctcgtggtcatcgatgatgatgggcctgatatgcaatacatgactcagatgcgctccctggccccatttggatcagaccttgcagatggtatgctcgaagataacatgacgtggaacttcatcgcgggattaacggtcgcacgtgagctacttgaggaatatggatgcgtcctgcgtgtgatatcacctcgaaggactgatgcggttataggcaccggagggagtcgtgttgagatatggttgccatcttttcagacacaagcagccaagactagtcaagaagtgtagtttacatctgaggaagcgaggacgtgcgcaaatgattgtgatggtgatgttgcattgctgatgctccttttgctacttcatttctacttccattgtctcattgctgatgctccttttacaatataaatggtcgaatatgtgtgtgtgttttcttcatcctgcattcctgctgatccaaaccaactgacacctcaccattgcaaacccaccatcagaagctatcaacaaacaaaaacgccatcatctgaccattagcagccaaatccccattcagcaaaaccatgtcttggtcgtttcttggcgtcagacgctttgttcccttgtcagctgcgttcaccgtccgacgtggacgctctgctcggtgggtgatccaggagagaagggcacgaacacgtgaccgccaaacataggccgcatcagcgcgtcatcgaccttgcgccagtagtagtgcaccgtgtgagtcggcttgctgaggaggctggacggcctcacaatatgtgccatggttcgagcctgcatgcttgtcaggaaaggtgagag

SEQ ID NO: 66444 - DNA, 2437 bp, Zea Mays
agcgctaccaattggcacctcctgctgccgcgccaccatgctctatgctcacctccaccttcgccgcccctgctccccgttcgcctactgcccctacagcaagctatccgtttccatcccaaccctcaaccctctgccacgcgggccgctttctcgccgcgcctgcgcctgcgcccaccggtacctacgacacgtcgcgtcaccggcggatgaggaagaggctgggtacggggagggcagcgtggagggtgatgatctgggacccgcgtcagcggcggcagtggcagcgaccatccgccgggcctccagcgcgtcgcccgtgcggttcaggtgcgtgcttggagaggcagtggaggaaccgcgcggcgaggagggcttggccgacccaagccccgactttcgccggctctgtgcggagcagcttgagattttccgagtgctcatctcccgtgacgccgtactctctgtgtacgtgagacctgctggcagttatattatggatcagctggaactgcgccgagttgctttatatcctggaattaataatctttctgaaaaagatacccctgtcctagtttgtaatttttctatatcttctggactacgagcagcagaagcttttctagtaaaacaacagatggaagtcataagagaatttggggctatagttcttccaatggtgaaacacccctttgttgttgggttccttgtcgtagagcttccagaattacatggtggacgtgctatgaactcttatactgctgatactgagttaccacctaacacatttatggataaatcatctgatgtaactccacatactgcgtgggatattcaaacttatggtgatcaggcaaagggttattctcagcttgttaatgaatggaagaatagtgcccttatgatttctcgaactctggcaatggcttatgttatggatcagaaagcatatctgcttcaacaaacttcctggcaaaataatgttagaatgagtggcttagtggaacagatttggggccccctctctagcattcgtgctcttgcaaagatgttatcctttcacacaaagagaagtgagatcccctatgatattattgaagatatgctcacccaaggtgatcacatgaaagatgctctgcaacaaattcaagatgctgtatatctgactaaggcaaacatagttagaagcaatgaggagactttaaagacaattcagagatcaccacatccttcaagaactttatcagattataaatcagtacctgggaatgattcacagaagttggatccagttttagccctgagttctgatgggtatgacatggtgatgcctatgccacctctatggctggcacctcttcaacaccaatatgatagaccatgtgatctctgtgatgtgctgaaggatttagttgcaggagcattaccacttgcttataagcagcagcgcacattagatttaacagaaatttcacatccacttcatgttgctgttgaggaatctgctttaagaaaagccttgagtaatctgattgagggagcgctcctacgtacacagcatggtggagtagttcaaatatgtgcagtcgaagcacctgcaggaggcgctctcgtggtcatcgatgatgatgggcctgatatgcaatacatgactcagatgcgctccctggccccatttggatcagaccttgcagatggtatgctcgaagataacatgacgtggaacttcatcgcgggattaacggtcgcacgtgagctacttgaggaatatggatgcgtcctgcgtgtgatatcacctcgaaggactgatgcggttataggcaccggagggagtcgtgttgagatatggttgccatcttttcagacacaagcagccaagactagtcaagaagtgtagtttacatctgaggaagcgaggacgtgcgcaaatgattgtgatggtgatgttgcattgctgatgctccttttgctacttcatttctacttccattgtctcattgctgatgctccttttacaatataaatggtcgaatatgtgtgtgtgttttcttcatcctgcattcctgctgatccaaaccaactgacacctcaccattgcaaacccaccatcagaagctatcaacaaacaaaaacgccatcatctgaccattagcagccaaatccccattcagcaaaaccatgtcttggtcgtttcttggcgtcagacgctttgttcccttgtcagctgcgttcaccgtccgacgtggacgctctgctcggtgggtgatccaggagagaagggcacgaacacgtgaccgccaaacataggccgcatcagcgcgtcatcgaccttgcgccagtagtagtgcaccgtgtgagtcggcttgctgaggaggctggacggcctcacaatatgtgccatggttcgagcctgcatgcttgtcaggaaaggtgagag

SEQ ID NO: 66445 - DNA, 1622 bp, Zea Mays
cagatttgctctgttgataaactaagaaagcatatctgcttcaacaaacttcctggcaaaataatgttagaatgagtggcttagtggaacagatttggggccccctctctagcattcgtgctcttgcaaagatgttatcctttcacacaaagagaagtgagatcccctatgatattattgaagatatgctcacccaaggtgatcacatgaaagatgctctgcaacaaattcaagatgctgtatatctgactaaggcaaacatagttagaagcaatgaggagactttaaagacaattcagagatcaccacatccttcaagaactttatcagattataaatcagtacctgggaatgattcacagaagttggatccagttttagccctgagttctgatgggtatgacatggtgatgcctatgccacctctatggctggcacctcttcaacaccaatatgatagaccatgtgatctctgtgatgtgctgaaggatttagttgcaggagcattaccacttgcttataagcagcagcgcacattagatttaacagaaatttcacatccacttcatgttgctgttgaggaatctgctttaagaaaagccttgagtaatctgattgagggagcgctcctacgtacacagcatggtggagtagttcaaatatgtgcagtcgaagcacctgcaggaggcgctctcgtggtcatcgatgatgatgggcctgatatgcaatacatgactcagatgcgctccctggccccatttggatcagaccttgcagatggtatgctcgaagataacatgacgtggaacttcatcgcgggattaacggtcgcacgtgagctacttgaggaatatggatgcgtcctgcgtgtgatatcacctcgaaggactgatgcggttataggcaccggagggagtcgtgttgagatatggttgccatcttttcagacacaagcagccaagactagtcaagaagtgtagtttacatctgaggaagcgaggcatgcttcgttttcccgtacgttttgaaatctgtagatattggcttaccggaatgttactgtaccagtaacatctcatatgttgaatttgcaaaattacaggacgtgcgcaaatgattgtgatggtgatgttgcattgctgatgctccttttgctacttcatttctacttccattgtctcattgctgatgctccttttacaatataaatggtcgaatatgtgtgtgtgttttcttcatcctgcattcctgctgatccaaaccaactgacacctcaccattgcaaacccaccatcagaagctatcaacaaacaaaaacgccatcatctgaccattagcagccaaatccccattcagcaaaaccatgtcttggtcgtttcttggcgtcagacgctttgttcccttgtcagctgcgttcaccgtccgacgtggacgctctgctcggtgggtgatccaggagagaagggcacgaacacgtgaccgccaaacataggccgcatcagcgcgtcatcgaccttgcgccagtagtagtgcaccgtgtgagtcggcttgctgaggaggctggacggcctcacaatatgtgccatggttcgagcctgcatgcttgtcaggaaaggtgagag

SEQ ID NO: 66446 - DNA, 1605 bp, Zea Mays
atcccggccggccgtgccacaccggagccatatctgacatctagcgctgggcccaccagctggcaagctttagtgagtggtttttgtcgcagtccggttcacaaagtgggtcgggttttttcctcgtgctacctttctcaccgtttctctcctagtctcctctcgtttcccgtcctcctcccgttgggagtataaaatttcctaatccgcaaacgaagcttccagaaggcttcttcttgcgtaccttccacttccacccaacgcgactcgctctttcccgcatctggaagtcgccggctcagatccagccgggctgcggcgctggccggatggccgagcagggcggcgcagccggggaggccgctggcagcgacccccctgcgcctgcgcctgcgactgccccggcgccagccccagcgcttgctgcggacgcggccgggcagaggtccctgccgacgccgttcctgaccaagacgtaccagctggtggacgacccggcggtggacgacgtgatctcgtggaacgaggacggctcgacgttcgtggtgtggcggccggcggagtttgcgcgcgacctcctccccaagtatttcaagcacaataacttctccagctttgtgcggcagctcaacacctacggatttaggaagatggtgcccgaccggtgggagttcgccaacgacttcttccgccgtggggagaagcgcctgctttgcgacatacaccgacggaaggtagcaccggctccggcggcggggctggccactgcggccgccgctgccgcgtccggggccgtaacggtggccgcggcgccgatccccatggctctgccggtgcggccggcctcaccgtcgctctctaccgacgagcatgtcctctcctctaactccggatccgccgaggaccacccgcaggctgccgcttccggctccgtcagcgcgtcggcgtccggcgacacgggggaggaaaacgagcgcctccggcgggagaacgcgcggctgacccgcgagctcgggcagatgaagaagctctgcaacaacatcttgctcctcatgaccaagtacgcctcctcccagcagctagacgcctctgcagcgctctcctctgtcgtcaactgctccggcgagtcatcggaggccgtacccgcgcctccgcccctccccccggcgatcctcgaactaatgcccgcgtgcccgggtcttgccaccgcggccgcgggcctcgtcgccgaagcggatcctgaccagcatccgtggcccatataccggcctacgcccgtgtaccattcgatgcggccctgcaacgggccggaccagggcgccgggtccgaccaagacgggtccaactccaggtgattgggcccaccgcaccttgtagaagcttctagttctaattaatcaattgccatatcggcaactaattattatcctagagaaacataataatactatattttcttctgtttttcctttgctagttggggattggaagcttctctcccttgttgtaatctgtgcttataaatcagcggttaaaatccatgaacgggcggctctggtgtattttattttatatatatgtgcttgttgttagataaacgcttat

SEQ ID NO: 66447 - DNA, 1322 bp, Zea Mays
caatcactagtcaaatatcaatatcatttttatttgtattaaattatgcccttaatatttcggtttttgttcgctttcacaatttcgtttatcccgtctcagtttttgactatttcgatctcgactctgtttctaatattttccgatgataaaacgtggatacggaaatgaaagatagtttttccgtcctgttggttttcatacctcgagaaaaccttcgacagtgacccggtccggtgggtgtggctcgcttcctctctgtccgactcctttccttcattttcctcttctgacctccggcagcaccatggagaacgtcgccgcgaatccttccgctgcggccgccgccgcagggaatggcgtccaagcatcgggggccggaggggagcgcccggaggacgcgtcgaagcagaacctggcgcaggtgacgagctcgatccagaagacgctgggcctgctccaccagctcaacctcaccgtctcctccttcaactctgcctcccagcttcccctcctccagcgcctgaacgcgctcgtggcggagctcgacacgatgcagaaactagccgagggttgtaacatccaggtgccaatggaggtcgtcaatttgatcgacgatgggaagaaccccgacgagtttactagggatgtgctcaacagctgcattgccaagaaccagatcaccaagggcaagactgacgctttcaagagcctacggaagcatctccttgaggagcttgaacaagctttccctgaggacgtagaagcatacagggagatccgtgctacttctgctgctgaggcaaagcggttggctcagtcccatggcaatttgcttaatggagatgtcaaagtgaaagctgagcattgactgaagggtacgactacagagggttgcgcggtatcttcagttgataacttatctttattattcttccctgtcacaaaaaaaagagaggctggatgatatgatggtaaggtcgcatcgaatggcttaagaaacttgtagggggaaatggatatgccttgtgagtgtgagactgatcaaacccttgcaaaagttctgtgatagtcactgcttggctgattgaagtaagtttgatgttgatatctgctgggaatatatataatcaatataaaaacttatcaaagatgcagaggaccttttagacgtatgaatgactcgtgagcaactatatggcctggccacgggtgctttcggagagattcaaagtgcatccaaatgtggatagttgggagggggtactacctccatttttatttatttgatggcacttagtttaattgtgtactaaccagcg

SEQ ID NO: 66448 - DNA, 832 bp, Zea Mays
ctcgactctgtttctaatattttccgatgataaaacgtggatacggaaatgaaagatagtttttccgtcctgttggttttcatacctcgagaaaaccttcgacagtgacccggtccggtgggtgtggctcgcttcctctctgtccgactcctttccttcattttcctcttctgacctccggcagcaccatggagaacgtcgccgcgaatccttccgctgcggccgccgccgcagggaatggcgtccaagcatcgggggccggaggggagcgcccggaggacgcgtcgaagcagaacctggcgcaggtgacgagctcgatccagaagacgctgggcctgctccaccagctcaacctcaccgtctcctccttcaactctgcctcccagcttcccctcctccagcgcctgaacgcgctcgtggcggagctcgacacgatgcagaaactagccgagggttgtaacatccaggtgccaatggaggtcgtcaatttgatcgacgatgggaagaaccccgacgagtttactagggatgtgctcaacagctgcattgccaagaaccagatcaccaagggcaagactgacgctttcaagagcctacggaagcatctccttgaggagcttgaacaagctttccctgaggacgtagaagcatacagggagatccgtgctacttctgctgctgtagagtatacccttattccactaacggggcttgagcagtgtcttaatgggtctttaactgtgtcattgaagtgtaaaaactaaaaagactagtttgctcatgcaaatttgcctcttttttacaagtatggagtgattttagtcctattttg

SEQ ID NO: 66449 - DNA, 2152 bp, Zea Mays
tctaagatgaacataagaagcaacaggactgacattgtcaagtactatataccacatgctttggttccaaaaggcgacaaaacttcaaaggcgaaatcttaactttacgatggccctacaatatattacctgcaagcaaacagaagcacgcagccaagtttattttccttcttgaggttcagctctcgcttagtactcgacttcccagcgatgctggtggtagtcaacagactcctgggtgacattagggcagtctgacaaattgactctcttcagcttaggcaatgttgatgcatgtaagatagccagtaacctgtcagtgatcaaggggcaccagcaccacgttaaattaaactcctcaagttggtgaaatcctacaagcataaggatcctgatttggacatcactgattccaatacgattcaaggtcaacttggttaggttggggcaagactctctgaggcacaccacaaagttgcccagaacgttcgggcactcgtccaatataagttcctgcagagctccctggcatgaacgagctacagtgcaaacatgcgtgtctggaaaatggtaggattgcagttcaacctttctgatcccattgtagtgcaggatgtcacataaaatgtgttccatgtgataagcctgaacagatgctggaaagccaacaagcctaagctccttaagccctcgacacactatgttgacccattacaagatagttctctcacagtgctccgttctgatcaccttcagcttgggacactcacaggccacagctacagcttcatgaagatcacgtggcgtcattatgccaaaatcacatgaatccataatcattgattcaatagttctgctgatcaaggacatgacttctattacagctttatatgtaaaaaaaatggaacctgacaagttcaatggtcctaagcttactgggattcatggcatcacccaatagacacttcaagccaagttctgtcactcctctgcagtcattaattaccaaatgccttagcaatcgaaagtgaattctagcaaggttaagcattgcccaggtcccataaacctgagcatttcaccaggatgagagtagagagctggcgaaataagcataaatgatggaggactgatgattgtcttgcaacattcatatgtgattctccagccatcatgcccttgagctcaagtttatccagataaggttggttcatcagtaaggacaagatggcatcttgcccaatttgagggcagcttcccagagtaagggactcgagtctcttggcatactgcataagggctcttagagacgcctcagtgatggacaagcacccttcgatatggaggaacttcaggtttctgcattgcttagcaacctgaggaagaccatcgtcgctgattgaagactgtaacataacgaaattttctagtgcagggcagtttgaagcaatgatcctggcagctttatccgtgagagagaggcagtcaacgagacaaactgacttcagattgccgcatgcactgcttacaaaatggatagcactatcagtgagccgtggaacaccagcaacaacagtcccacatggtgcacaacaaagaccaagatcagttatcacaccccttgcacatatgttgacaacagcggctgcaagcttgacatcatcaacatcagacatatgcaggcaagggtgaacaccttgatgaacactgaaggggccccaaaaatctggccgctgagggaccaatatgttggcccgtctccaacagacacaggcacatgactggcgatcttctgggtttcccacatgcctgaatatttcagctatgcaagcttctggcagctcatttatcaagtcctgtggaagagttcttgattgatacatggaagaacctgcgcttaccttcttacaagcttcataagaagttctaaggcagcttgattgcctcatgtttcctgtcatacaaacaatttcgatcagatttggtggtatgaagaaataatggactcatatgaagtgaactgggaaaattttaataaactattggcatgcaaacaactcttccaaaatccaaacaaagaaatataaacatattgtactgcaatatatacctttactactgatatgaatgcttcacaaaagatacccaaaag

SEQ ID NO: 66450 - DNA, 1512 bp, Zea Mays
ttccgccgtgtcgtcgcccttcgctagtcgcttcgctgccacatctctcctcgtccaaagactccaagctcctgtgcggcctgtgttctgctgccgcctctggtccacatctccccgccgccgccccgtcgtctgccgacacctttagcgctgggaaggatcacaggggatcggcgcgaggcgggggacctgcggtttttgtcgcccggatggcggcggagcgatgacactggcgtcgggagcggcgcggcgttgggatgcggacgatctgcgatgtgtgcgagagcgcaccggcggtgctcttctgtgcggccgacgaggcagcgctttgccggccctgcgacgagaaggtacacatgtgtaacaagcttgctagtcggcatgtgagagttggacttgcagaccctaataaacttgtccggtgtgatatatgtgaaaattcacccgctttcttctactgtgagatagacggcacctcactttgcctgagctgtgatatgactgttcatgttggtggcaagcgaacccatggaagatacctgctcctaaggcaaagggttgaagagataaaccgggccatatggatgacgtgcctatggaaatccaagatcctgaaaaccagagagaccagaaaaagccacccaaggagcaaacggcaaaccaccataacggcgatgatccggccactgatggcaactgtgatgaccagggtaacattgattcaaaaatgatcgatcttaatatgcgcccggttcgtactcatgggcaagaatcaaattcccagactcagggggtaggtcttagtgtgaacaaccatgactctccaggggtggtgccaacaagcaattccgaaagagacaccagcaagtaaacgttggaagatcggaatatacatttcaactacatatactgttctatacgagttcattttgtggtgtgtgtgtgtgtcactaatttttactcaattctaaattataagtcattctaacttttttgaagaggtaaagtatctcaggtttgactaaaattgtagaggtaatcacagatttatgacatcaactaggtatattttaaaaatataattaattaaaacactaataatacttatttggtatcatgaatgtgattgttttattatataaatttgatcaaacttgagatgctttggctctcttaagaaaattagaatgtactagtaagtatatttttggcagagttgtagctaacagccgcatctcaattggcttgtcatgacctagattggcaaaaccgccaagttactttcacatgtacttgttattgtcttacagacttttgaccattatacatatgattcaggaattccggtaatctgtcgggtgtcccggtgatactaaatgatccactttatttgttcactagctggatgcccgtacgttgcaacgggaatatataatatcagtatactacgataacttatatacaaaatctatgttatattgttatgagaaaatgtttcataatcaatttgtg

SEQ ID NO: 66451 - DNA, 2188 bp, Zea Mays
cacaccgtccctataaccatgtacatattcatgggcatggcactcatcaccagcggtttctatacttaacacatcgagtgaatgaatgaagccacgcgctcacagtatagatgctctgaaattaccaatgccatggatagaaagagcagtgtatatcaattttgtcagtaggaagcatgtgcattttgcacatgtcgctgcctataaatacccgccggaacacctgagatgcgctgcagcctgcaggtgacatgacagtgagctagctagtgtgagtagaagcaagcagcaagatgggagaaatggcgcatgcttgctctgcccctcgcccgtctcccgctcaccatttgtgtgtgcgcatcctactagcgtacctgcttgcggcgcggtggctcgtgccatcctgctcggcggcttctttcttccgcttcccttggcccgccgagcggcacgactaccgtgacgcgctggccaagtccatcctcttcttcgagggccagaggtcggggcggctgccgcctggccagcgcgcgtcgtggcgcggggactccggcgtgtcggacggcgccgcggccggggtcgacctggagggcgggtactacgacgccggcgacaacgtcaagttcggcttccccatggcgttcaccaccaccatgctggcctggagcgtcatcgagttcggcgactccatgccgcgcgacgagcgccgccacgccgccgccgccgtccgctgggccaccgactacctcctcaagacgctcgcccaccccggcgtcatcttcctgcaggtgggcgatccgtggaaggatcacgactgctgggagaggccggaggacatggacacggaccgcacggtgtacaacgtcagcgcggggcgcccgggctcggacatcgcgggggagacggcggcggcactggcggccgcgtccatggtgttccgagatgacgacccggagtacgccgagacgctgctcacgagcgcaaggaaggcgttcgagttcgcggacacgtacaagggcgcgtacagcgacgacccggacctcagggcagggggctgccccttctactgcgacttcaatggctaccaggacgagctgctgtggggggcagcatggctgaggagagcctccaaggatgacacgttcctccagtacattcagaacaacggcaagaccctgggtgcagaggacagcagcaacgagttcgggtgggacaacaagcatgccggcctcaacgtcctcgtctccaaggagttcatagaaggcgccgcgctgcctttgcagtcgtacaaggagttcgcggacagcttcgtatgcacgctcatcccggagtcgtcttcttccccgcacatcacgtacacccccgggggcatgatctacaagcctggaggcagcaacatgcagcacgtcacctccatctctttcctgctcctgacctacgccaagtacctctccaagtcctctcataccgtcgactgcggagacgtttcagttggccctgaaactcttcagctgcaagccaaaagacaggtcgattacctgctaggagacaacccgatgaagatgtcgtacatgatcgggtacggcgaccggtacccgcagcggatccaccaccgggcctcgtcgttgccctcgatcagggaccatcctcagccgatggcgtgcaaggaaggcacgccgtacttcaactcatccggtgcgaatcctaacccgctggtcggcgcggtggtcggcgggccgggggaggacgacgcttacgaggatgaccgtgcggatttcagaaaatctgagcccaccacctacatcaacgctcccttggtaggggtccttgcgtacttcgttggcaacccgaatcctggtcataacaccagacattgagcatcgcagcctctgaatctttcttggtgtgtgtgtatatatttttatatatgagatcgagtggatggagctatagataagatacttgtaggtgagagagacaaagagagtttgtcttgcatgattttttttttttggccttttgttgttgggtttgcactgaacttgtttggacatgtgcaagtgccattttcactggactagtatagtcatcagtgagaaatattgtactttggtttttggtttggaaggttctaaaggaactcatagcttgaaaaaaaaactaatgccatatggaagactgttttgac

SEQ ID NO: 66452 - DNA, 1169 bp, Zea Mays
cttttcctgaccaacctctagcaattttggctgtttccccgtctacatgcactacatatcattgctcatgacgagctgctgtggggggcagcatggctgaggagagcctccaaggatgacacgttcctccagtacattcagaacaacggcaagaccctgggtgcagaggacagcagcaacgagttcgggtgggacaacaagcatgccggcctcaacgtcctcgtctccaaggagttcatagaaggcgccgcgctgcctttgcagtcgtacaaggagttcgcggacagcttcgtatgcacgctcatcccggagtcgtcttcttccccgcacatcacgtacacccccgggggcatgatctacaagcctggaggcagcaacatgcagcacgtcacctccatctctttcctgctcctgacctacgccaagtacctctccaagtcctctcataccgtcgactgcggagacgtttcagttggccctgaaactcttcagctgcaagccaaaagacaggtcgattacctgctaggagacaacccgatgaagatgtcgtacatgatcgggtacggcgaccggtacccgcagcggatccaccaccgggcctcgtcgttgccctcgatcagggaccatcctcagccgatggcgtgcaaggaaggcacgccgtacttcaactcatccggtgcgaatcctaacccgctggtcggcgcggtggtcggcgggccgggggaggacgacgcttacgaggatgaccgtgcggatttcagaaaatctgagcccaccacctacatcaacgctcccttggtaggggtccttgcgtacttcgttggcaacccgaatcctggtcataacaccagacattgagcatcgcagcctctgaatctttcttggtgtgtgtgtatatatttttatatatgagatcgagtggatggagctatagataagatacttgtaggtgagagagacaaagagagtttgtcttgcatgattttttttttttggccttttgttgttgggtttgcactgaacttgtttggacatgtgcaagtgccattttcactggactagtatagtcatcagtgagaaatattgtactttggtttttggtttggaaggttctaaaggaactcatagcttgaaaaaaaaactaatgccatatggaagactgttttgac

SEQ ID NO: 66453 - DNA, 807 bp, Zea Mays
ccgacacggaggtaggagaggagggacgagggaggggaaaagagagatggtggaggcatcgccggagtccggcgccgcggcgaccggaggtgcctctagtacggcggcggtgcggaaggggaagtcatgcaagggctgcctctactactcgtcagtgctcaagtcccgcggttacaacccaatctgcgttgggatcccccgctccatcccccaagttcctaactacgtggtggatgaacctaaggaggaggcgacggcgcaggggcatgacctcaggcggttcagttattggtggacagcagattggtcgagagaaagccatcggcaactgaacaagctccagcacatgttgcaaaggatgcagcagctaccatccgctctcaccaacaaggacaacagagacctcagaacttgtcgaggcaggaattcttggacaggtttaagaggagcgctggactggtcgcttcaggtgttgcgaagaatctaaacaaaacagccaattatatcaaagaaaatattcaggacatgtacaccgatcgtcgtccaccaaagtagcaaccatgccgagtgattgtcgtcaagagctgaagaaatcgcttgctactggaaactttacatcaggactacctggaaactttactccactctcctcacttgttaaacgaaatggagcttttctgggataccaacttccttttctttacctgcataatcttgtaattttgcggctgtatatgtacatgcaaacaacttctttgaagcgaaaaatcagatctcgtttggtgtattgatcaatagtgtcagcac

SEQ ID NO: 66454 - DNA, 877 bp, Zea Mays
cgacacggaggtaggagaggagggacgagggaggggaaaagagagatggtggaggcatcgccggagtccggcgccgcggcgaccggaggtgcctctagtacggcggcggtgcggaaggggaagtcatgcaagggctgcctctactactcgtcagtgctcaagtcccgcggttacaacccaatctgcgttgggatcccccgctccatcccccaaggaggaggcgacggcgcaggggcatgacctcaggcggttcaggtacgggtgcgcgggttactccatgttcgtggacaacagggacggccagggtggtgagagcgagggcaagacgttgttgccatattgcaggggcctcgagttattggtggacagcagattggtcgagagaaagccatcggcaactgaacaagctccagcacatgttgcaaaggatgcagcagctaccatccgctctcaccaacaaggacaacagagacctcagaacttgtcgaggcaggaattcttggacaggtttaagaggagcgctggactggtcgcttcaggtgttgcgaagaatctaaacaaaacagccaattatatcaaagaaaatattcaggacatgtacaccgatcgtcgtccaccaaagtagcaaccatgccgagtgattgtcgtcaagagctgaagaaatcgcttgctactggaaactttacatcaggactacctggaaactttactccactctcctcacttgttaaacgaaatggagcttttctgggataccaacttccttttctttacctgcataatcttgtaattttgcggctgtatatgtacatgcaaacaacttctttgaagcgaaaaatcagatctcgtttggtgtattgatcaatagtgtcagcac

SEQ ID NO: 66455 - DNA, 800 bp, Zea Mays
cacggaggtaggagaggagggacgagggaggggaaaagagagatggtggaggcatcgccggagtccggcgccgcggcgaccggaggtgcctctagtacggcggcggtgcggaaggggaagtcatgcaagggctgcctctactactcgtcagtgctcaagtcccgcggttacaacccaatctgcgttgggatcccccgctccatcccccaagttcctaactacgtggtggatgaacctaaggaggaggcgacggcgcaggggcatgacctcaggcggttcagttattggtggacagcagattggtcgagagaaagccatcggcaactgaacaagctccagcacatgttgcaaaggatgcagctaccatccgctctcaccaacaaggacaacagagacctcagaacttgtcgaggcaggaattcttggacaggtttaagaggagcgctggactggtcgcttcaggtgttgcgaagaatctaaacaaaacagccaattatatcaaagaaaatattcaggacatgtacaccgatcgtcgtccaccaaagtagcaaccatgccgagtgattgtcgtcaagagctgaagaaatcgcttgctactggaaactttacatcaggactacctggaaactttactccactctcctcacttgttaaacgaaatggagcttttctgggataccaacttccttttctttacctgcataatcttgtaattttgcggctgtatatgtacatgcaaacaacttctttgaagcgaaaaatcagatctcgtttggtgtattgatcaatagtgtcagcac

SEQ ID NO: 66456 - DNA, 3686 bp, Zea Mays
gtttttcaataatttcaacttcaaaaggctttttcagctgccatcgtaatagatataataaataaaattcgataaactatagatacattaggaggtatagatggttctgacaaatttgactttaaaactaactcttaactcagtatcatattaactataaaatttattgcaggggtaggggatttgggcggccgtgtggcggagccgaggagcacgtcgctgcgtcaggactcaggacgggagaataaagagtaaacaaacccatccgcgctgcaacagtgcggtgtttgtgaatgcaaaatctagccagacagctgaggaagggtgaaagcctccttgttcctgtagactgcagtgcgaggaggaggccgccgcatcctccccttccaaaccactccactccggtccccatcccacctgcgccagcttcgtcttgctttgagctttcgcccgccggcgatctgctagctatctcgctcgcacgtggtgcctgactgcctggtggcggtggccatggctgccccgctgggctttttctgcatgctgctgcttcttcttcttcagctgggccactcttcttgtaacaatgtgtacattgtgtacatgggggcgaggaatcccgagctgcacccggcgctggtccgggacgcgcaccacggcatgctcgccggccttctcggcagcgagcaggcggccaaggacgccatcctttacagctacaggcacggcttctccgggttcgccgccgtgctgacggacagccaggcggcgcggctcgccggttcgcctggggttgtgcgagtggtgcggaaccgtgttcttgacctgcacaccaccaggagctgggacttcatgcgagtggatccatcgcattcggctggaatcctcccagagagtaggttcggtgaggattccattatcggtgtgctagacactggaatctggccagagtcggccagttttagagacgacggcatgagcgaggctccgcggcggtggaaagggcaatgcgtcgccggggacaggttcaatgtttccaactgcaacaggataggaaaataataggcgcgaagtggtacatcaaagggtacgaagccgagtacgggaagatgaacaccaccgacatctacgagttcatgtccgcgagagacgccgtcgggcatggcacgcacacagcctccaccgccgctggtgctctggtagccggtgcaagcttcaggggactcgccggtggcgtcgcaaggggaggggcacccagggcgaggctcgcggtctacaaagtgtgctgggccaccggagactgcacttcggcagatatcctcgctgccttcgacgacgcgatacatgatggcgttgacgtgctttcggtgtccctaggccaagcgccaccgctccccgcgtacgttgacgacgtcctgtccattgggtcctttcatgctgtcgcgagagggattgtcgtggtctgctccgcaggaaattctgggccttattcagagacggtgatcaactcggcgccgtggctcgtgaccgtcgctgctggcaccattgataggactttcctcgcaaagatcatccttggcaacaatagcacctatgtgggtcaaacactgtactctggaaagcatcctgggaatagcatgcgcatattctatgctgaagacgttgcatctaataacgcagacgatacagatgcaagaagctgcactgcaggatctctgaactcgactctagtgaagggaactgtggtactttgcttccaaacaagggcacagagatcagctgcagtggcagtggagactgtcaagaaagctcgtggcgtcggagtcatcttcgcccagttcttaactaaggacatcgcgtcttcattcgatattccctgttttcaagtagactaccaggttggaacagctatactcgcatacaccactagcacgagaaatccaacagtccagtttggctcagcaaaaacgattcttggagaactgatgggcccagaagttgcatatttctcatctcggggtccaagttctctgtcccccgctgttctgaagccagacattgctgctccaggtgtcaacattttggcagcatggactcctgctgctgccatatcatcagccattggatctgtgaagttcaagatcgattcgggaacctcgatgtcctgtccccacatctcaggagttgttgctctcctcaaatcaatgcatcccaattggagtcctgctgcagtaaaatcagcacttgttacaacagtgtccatgacacatatgggtttgagattgtatccgaggcggcgccctacaatcaggcgaacccatttgattacggaggcgggcatgtggatccaaacagcgctgcacaccccggtcttgtgtatgacatggggacatctgactatgtgcgcttcctttgctccatgggctacaacgtctcagccatcagctccctggctcaacagcatgagacctgtcagcacacaccaaagacgcagctgaacctgaacctgccatccatcagtattcccgaactgaggggcaggctcactgtgtcaagaacggtcaccaacgttggctcagccttgacgaagtacagagctcgtgtggaagctcctccaggagtggatgtcaccgtgagcccctcactcctgaccttcaactcgacggtgagaaagttgacgttcaaggtgacattccaggccaaactgaaggtgcaagggagatactacttcggcagcttgacatgggaagatggcgtgcacgccgtgaggatccctcttgtggttcggacgatgatcagtaagttctatgccaattcatgagctggtgggtgtttgtgtgtactgtgtactaactttcgctcaccaccggtgacggtgggacagataagatgtaacctgctaatttgtcccaattctaatggcattggtgattggttggggttccttgactagaattcggttactgattattaagagaaattgaatctttcttttgtttgtaataactcataacttcctcctgttacacaacaaggaggctgaattgacaaagcatcttaatctagcatataacacagcaggaaaacaagagaactgtaatgtctcgagtgctaagaattggtaccggcgtatgtgaatctggtgagacgccagcaatctaattcagttcagagcagaagaggtcattacacatgagaggcgcacttcaggatttggcaccttctttgggcttggtatcagcagagtcgtccttgccgccggagcctgaggaggccgcgcgcgcggcgagggccttgtcgtacgcgtcgagctcgtcgaaatatatgtcccagacgcagcgaacgcagccgctgccgcagcagtcgcccgggagaggcttctcgggcggcagcggcgttggcgcgggcgtgggagccggcgcggcgtcgggcttcccggtgccgccatcgcaaggggtggccgaggccatgggcgtttcgggcgggaggtagtggcggcggcggaggagaggggcgcgtcggcccgggcaggaaaggtaggatcgggcccgggacacggacgacggcgcccagcatacagcccctcgctcgtcgaaaggggaggggaggggacggtcgcggaggccaagaggctgcgtgattgggacgcaggagaatccaactgccacaaggcaactcggacgaac

SEQ ID NO: 66457 - DNA, 3610 bp, Zea Mays
ataaactatagatacattaggaggtatagatggttctgacaaatttgactttaaaactaactcttaactcagtatcatattaactataaaatttattgcaggggtaggggatttgggcggccgtgtggcggagccgaggagcacgtcgctgcgtcaggactcaggacgggagaataaagagtaaacaaacccatccgcgctgcaacagtgcggtgtttgtgaatgcaaaatctagccagacagctgaggaagggtgaaagcctccttgttcctgtagactgcagtgcgaggaggaggccgccgcatcctccccttccaaaccactccactccggtccccatcccacctgcgccagcttcgtcttgctttgagctttcgcccgccggcgatctgctagctatctcgctcgcacgtggtgcctgactgcctggtggcggtggccatggctgccccgctgggctttttctgcatgctgctgcttcttcttcttcagctgggccactcttcttgtaacaatgtgtacattgtgtacatgggggcgaggaatcccgagctgcacccggcgctggtccgggacgcgcaccacggcatgctcgccggccttctcggcagcgagcaggcggccaaggacgccatcctttacagctacaggcacggcttctccgggttcgccgccgtgctgacggacagccaggcggcgcggctcgccggttcgcctggggttgtgcgagtggtgcggaaccgtgttcttgacctgcacaccaccaggagctgggacttcatgcgagtggatccatcgcattcggctggaatcctcccagagagtaggttcggtgaggattccattatcggtgtgctagacactggaatctggccagagtcggccagttttagagacgacggcatgagcgaggctccgcggcggtggaaagggcaatgcgtcgccggggacaggttcaatgtttccaactgcaacaggaaaataataggcgcgaagtggtacatcaaagggtacgaagccgagtacgggaagatgaacaccaccgacatctacgagttcatgtccgcgagagacgccgtcgggcatggcacgcacacagcctccaccgccgctggtgctctggtagccggtgcaagcttcaggggactcgccggtggcgtcgcaaggggaggggcacccagggcgaggctcgcggtctacaaagtgtgctgggccaccggagactgcacttcggcagatatcctcgctgccttcgacgacgcgatacatgatggcgttgacgtgctttcggtgtccctaggccaagcgccaccgctccccgcgtacgttgacgacgtcctgtccattgggtcctttcatgctgtcgcgagagggattgtcgtggtctgctccgcaggaaattctgggccttattcagagacggtgatcaactcggcgccgtggctcgtgaccgtcgctgctggcaccattgataggactttcctcgcaaagatcatccttggcaacaatagcacctatgtgggtcaaacactgtactctggaaagcatcctgggaatagcatgcgcatattctatgctgaagacgttgcatctaataacgcagacgatacagatgcaagaagctgcactgcaggatctctgaactcgactctagtgaagggaactgtggtactttgcttccaaacaagggcacagagatcagctgcagtggcagtggagactgtcaagaaagctcgtggcgtcggagtcatcttcgcccagttcttaactaaggacatcgcgtcttcattcgatattccctgttttcaagtagactaccaggttggaacagctatactcgcatacaccactagcacgagaaatccaacagtccagtttggctcagcaaaaacgattcttggagaactgatgggcccagaagttgcatatttctcatctcggggtccaagttctctgtcccccgctgttctgaagccagacattgctgctccaggtgtcaacattttggcagcatggactcctgctgctgccatatcatcagccattggatctgtgaagttcaagatcgattcgggaacctcgatgtcctgtccccacatctcaggagttgttgctctcctcaaatcaatgcatcccaattggagtcctgctgcagtaaaatcagcacttgttacaacagtgtccatgacacatatgggtttgagattgtatccgaggcggcgccctacaatcaggcgaacccatttgattacggaggcgggcatgtggatccaaacagcgctgcacaccccggtcttgtgtatgacatggggacatctgactatgtgcgcttcctttgctccatgggctacaacgtctcagccatcagctccctggctcaacagcatgagacctgtcagcacacaccaaagacgcagctgaacctgaacctgccatccatcagtattcccgaactgaggggcaggctcactgtgtcaagaacggtcaccaacgttggctcagccttgacgaagtacagagctcgtgtggaagctcctccaggagtggatgtcaccgtgagcccctcactcctgaccttcaactcgacggtgagaaagttgacgttcaaggtgacattccaggccaaactgaaggtgcaagggagatactacttcggcagcttgacatgggaagatggcgtgcacgccgtgaggatccctcttgtggttcggacgatgatcagtaagttctatgccaattcatgagctggtgggtgtttgtgtgtactgtgtactaactttcgctcaccaccggtgacggtgggacagataagatgtaacctgctaatttgtcccaattctaatggcattggtgattggttggggttccttgactagaattcggttactgattattaagagaaattgaatctttcttttgtttgtaataactcataacttcctcctgttacacaacaaggaggctgaattgacaaagcatcttaatctagcatataacacagcaggaaaacaagagaactgtaatgtctcgagtgctaagaattggtaccggcgtatgtgaatctggtgagacgccagcaatctaattcagttcagagcagaagaggtcattacacatgagaggcgcacttcaggatttggcaccttctttgggcttggtatcagcagagtcgtccttgccgccggagcctgaggaggccgcgcgcgcggcgagggccttgtcgtacgcgtcgagctcgtcgaaatatatgtcccagacgcagcgaacgcagccgctgccgcagcagtcgcccgggagaggcttctcgggcggcagcggcgttggcgcgggcgtgggagccggcgcggcgtcgggcttcccggtgccgccatcgcaaggggtggccgaggccatgggcgtttcgggcgggaggtagtggcggcggcggaggagaggggcgcgtcggcccgggcaggaaaggtaggatcgggcccgggacacggacgacggcgcccagcatacagcccctcgctcgtcgaaaggggaggggaggggacggtcgcggaggccaagaggctgcgtgattgggacgcaggagaatccaactgccacaaggcaactcggacgaac

SEQ ID NO: 66458 - DNA, 3606 bp, Zea Mays
ataaactatagatacattaggaggtatagatggttctgacaaatttgactttaaaactaactcttaactcagtatcatattaactataaaatttattgcaggggtaggggatttgggcggccgtgtggcggagccgaggagcacgtcgctgcgtcaggactcaggacgggagaataaagagtaaacaaacccatccgcgctgcaacagtgcggtgtttgtgaatgcaaaatctagccagacagctgaggaagggtgaaagcctccttgttcctgtagactgcagtgcgaggaggaggccgccgcatcctccccttccaaaccactccactccggtccccatcccacctgcgccagcttcgtcttgctttgagctttcgcccgccggcgatctgctagctatctcgctcgcacgtggtgcctgactgcctggtggcggtggccatggctgccccgctgggctttttctgcatgctgctgcttcttcttcttcagctgggccactcttcttgtaacaatgtgtacattgtgtacatgggggcgaggaatcccgagctgcacccggcgctggtccgggacgcgcaccacggcatgctcgccggccttctcggcagcgagcaggcggccaaggacgccatcctttacagctacaggcacggcttctccgggttcgccgccgtgctgacggacagccaggcggcgcggctcgccggttcgcctggggttgtgcgagtggtgcggaaccgtgttcttgacctgcacaccaccaggagctgggacttcatgcgagtggatccatcgcattcggctggaatcctcccagagagtaggttcggtgaggattccattatcggtgtgctagacactggaatctggccagagtcggccagttttagagacgacggcatgagcgaggctccgcggcggtggaaagggcaatgcgtcgccggggacaggttcaatgtttccaactgcaacaggaaaataataggcgcgaagtggtacatcaaagggtacgaagccgagtacgggaagatgaacaccaccgacatctacgagttcatgtccgcgagagacgccgtcgggcatggcacgcacacagcctccaccgccgctggtgctctggtagccggtgcaagcttcaggggactcgccggtggcgtcgcaaggggaggggcacccagggcgaggctcgcggtctacaaagtgtgctgggccaccggagactgcacttcggcagatatcctcgctgccttcgacgacgcgatacatgatggcgttgacgtgctttcggtgtccctaggccaagcgccaccgctccccgcgtacgttgacgacgtcctgtccattgggtcctttcatgctgtcgcgagagggattgtcgtggtctgctccgcaggaaattctgggccttattcagagacggtgatcaactcggcgccgtggctcgtgaccgtcgctgctggcaccattgataggactttcctcgcaaagatcatccttggcaacaatagcacctatgtgggtcaaacactgtactctggaaagcatcctgggaatagcatgcgcatattctatgctgaagacgttgcatctaataacgcagacgatacagatgcaagaagctgcactgcaggatctctgaactcgactctagtgaagggaactgtggtactttgcttccaaacaagggcacagagatcagctgcagtggcagtggagactgtcaagaaagctcgtggcgtcggagtcatcttcgcccagttcttaactaaggacatcgcgtcttcattcgatattccctgttttcaagtagactaccaggttggaacagctatactcgcatacaccactagcacgagaaatccaacagtccagtttggctcagcaaaaacgattcttggagaactgatgggcccagaagttgcatatttctcatctcggggtccaagttctctgtcccccgctgttctgaagacattgctgctccaggtgtcaacattttggcagcatggactcctgctgctgccatatcatcagccattggatctgtgaagttcaagatcgattcgggaacctcgatgtcctgtccccacatctcaggagttgttgctctcctcaaatcaatgcatcccaattggagtcctgctgcagtaaaatcagcacttgttacaacagtgtccatgacacatatgggtttgagattgtatccgaggcggcgccctacaatcaggcgaacccatttgattacggaggcgggcatgtggatccaaacagcgctgcacaccccggtcttgtgtatgacatggggacatctgactatgtgcgcttcctttgctccatgggctacaacgtctcagccatcagctccctggctcaacagcatgagacctgtcagcacacaccaaagacgcagctgaacctgaacctgccatccatcagtattcccgaactgaggggcaggctcactgtgtcaagaacggtcaccaacgttggctcagccttgacgaagtacagagctcgtgtggaagctcctccaggagtggatgtcaccgtgagcccctcactcctgaccttcaactcgacggtgagaaagttgacgttcaaggtgacattccaggccaaactgaaggtgcaagggagatactacttcggcagcttgacatgggaagatggcgtgcacgccgtgaggatccctcttgtggttcggacgatgatcagtaagttctatgccaattcatgagctggtgggtgtttgtgtgtactgtgtactaactttcgctcaccaccggtgacggtgggacagataagatgtaacctgctaatttgtcccaattctaatggcattggtgattggttggggttccttgactagaattcggttactgattattaagagaaattgaatctttcttttgtttgtaataactcataacttcctcctgttacacaacaaggaggctgaattgacaaagcatcttaatctagcatataacacagcaggaaaacaagagaactgtaatgtctcgagtgctaagaattggtaccggcgtatgtgaatctggtgagacgccagcaatctaattcagttcagagcagaagaggtcattacacatgagaggcgcacttcaggatttggcaccttctttgggcttggtatcagcagagtcgtccttgccgccggagcctgaggaggccgcgcgcgcggcgagggccttgtcgtacgcgtcgagctcgtcgaaatatatgtcccagacgcagcgaacgcagccgctgccgcagcagtcgcccgggagaggcttctcgggcggcagcggcgttggcgcgggcgtgggagccggcgcggcgtcgggcttcccggtgccgccatcgcaaggggtggccgaggccatgggcgtttcgggcgggaggtagtggcggcggcggaggagaggggcgcgtcggcccgggcaggaaaggtaggatcgggcccgggacacggacgacggcgcccagcatacagcccctcgctcgtcgaaaggggaggggaggggacggtcgcggaggccaagaggctgcgtgattgggacgcaggagaatccaactgccacaaggcaactcggacgaac

SEQ ID NO: 66459 - DNA, 3402 bp, Zea Mays
gtgtttgtgaatgcaaaatctagccagacagctgaggaagggtgaaagcctccttgttcctgtagactgcagtgcgaggaggaggccgccgcatcctccccttccaaaccactccactccggtccccatcccacctgcgccagcttcgtcttgctttgagctttcgcccgccggcgatctgctagctatctcgctcgcacgtggtgcctgactgcctggtggcggtggccatggctgccccgctgggctttttctgcatgctgctgcttcttcttcttcagctgggccactcttcttgtaacaatgtgtacattgtgtacatgggggcgaggaatcccgagctgcacccggcgctggtccgggacgcgcaccacggcatgctcgccggccttctcggcagcgagcaggcggccaaggacgccatcctttacagctacaggcacggcttctccgggttcgccgccgtgctgacggacagccaggcggcgcggctcgccggttcgcctggggttgtgcgagtggtgcggaaccgtgttcttgacctgcacaccaccaggagctgggacttcatgcgagtggatccatcgcattcggctggaatcctcccagagagtaggttcggtgaggattccattatcggtgtgctagacactggaatctggccagagtcggccagttttagagacgacggcatgagcgaggctccgcggcggtggaaagggcaatgcgtcgccggggacaggttcaatgtttccaactgcaacaggaaaataataggcgcgaagtggtacatcaaagggtacgaagccgagtacgggaagatgaacaccaccgacatctacgagttcatgtccgcgagagacgccgtcgggcatggcacgcacacagcctccaccgccgctggtgctctggtagccggtgcaagcttcaggggactcgccggtggcgtcgcaaggggaggggcacccagggcgaggctcgcggtctacaaagtgtgctgggccaccggagactgcacttcggcagatatcctcgctgccttcgacgacgcgatacatgatggcgttgacgtgctttcggtgtccctaggccaagcgccaccgctccccgcgtacgttgacgacgtcctgtccattgggtcctttcatgctgtcgcgagagggattgtcgtggtctgctccgcaggaaattctgggccttattcagagacggtgatcaactcggcgccgtggctcgtgaccgtcgctgctggcaccattgataggactttcctcgcaaagatcatccttggcaacaatagcacctatgtgggtcaaacactgtactctggaaagcatcctgggaatagcatgcgcatattctatgctgaagacgttgcatctaataacgcagacgatacagatgcaagaagctgcactgcaggatctctgaactcgactctagtgaagggaactgtggtactttgcttccaaacaagggcacagagatcagctgcagtggcagtggagactgtcaagaaagctcgtggcgtcggagtcatcttcgcccagttcttaactaaggacatcgcgtcttcattcgatattccctgttttcaagtagactaccaggttggaacagctatactcgcatacaccactagcacgagaaatccaacagtccagtttggctcagcaaaaacgattcttggagaactgatgggcccagaagttgcatatttctcatctcggggtccaagttctctgtcccccgctgttctgaagccagacattgctgctccaggtgtcaacattttggcagcatggactcctgctgctgccatatcatcagccattggatctgtgaagttcaagatcgattcgggaacctcgatgtcctgtccccacatctcaggagttgttgctctcctcaaatcaatgcatcccaattggagtcctgctgcagtaaaatcagcacttgttacaacagccagtgtccatgacacatatgggtttgagattgtatccgaggcggcgccctacaatcaggcgaacccatttgattacggaggcgggcatgtggatccaaacagcgctgcacaccccggtcttgtgtatgacatggggacatctgactatgtgcgcttcctttgctccatgggctacaacgtctcagccatcagctccctggctcaacagcatgagacctgtcagcacacaccaaagacgcagctgaacctgaacctgccatccatcagtattcccgaactgaggggcaggctcactgtgtcaagaacggtcaccaacgttggctcagccttgacgaagtacagagctcgtgtggaagctcctccaggagtggatgtcaccgtgagcccctcactcctgaccttcaactcgacggtgagaaagttgacgttcaaggtgacattccaggccaaactgaaggtgcaagggagatactacttcggcagcttgacatgggaagatggcgtgcacgccgtgaggatccctcttgtggttcggacgatgatcagtaagttctatgccaattcatgagctggtgggtgtttgtgtgtactgtgtactaactttcgctcaccaccggtgacggtgggacagataagatgtaacctgctaatttgtcccaattctaatggcattggtgattggttggggttccttgactagaattcggttactgattattaagagaaattgaatctttcttttgtttgtaataactcataacttcctcctgttacacaacaaggaggctgaattgacaaagcatcttaatctagcatataacacagcaggaaaacaagagaactgtaatgtctcgagtgctaagaattggtaccggcgtatgtgaatctggtgagacgccagcaatctaattcagttcagagcagaagaggtcattacacatgagaggcgcacttcaggatttggcaccttctttgggcttggtatcagcagagtcgtccttgccgccggagcctgaggaggccgcgcgcgcggcgagggccttgtcgtacgcgtcgagctcgtcgaaatatatgtcccagacgcagcgaacgcagccgctgccgcagcagtcgcccgggagaggcttctcgggcggcagcggcgttggcgcgggcgtgggagccggcgcggcgtcgggcttcccggtgccgccatcgcaaggggtggccgaggccatgggcgtttcgggcgggaggtagtggcggcggcggaggagaggggcgcgtcggcccgggcaggaaaggtaggatcgggcccgggacacggacgacggcgcccagcatacagcccctcgctcgtcgaaaggggaggggaggggacggtcgcggaggccaagaggctgcgtgattgggacgcaggagaatccaactgccacaaggcaactcggacgaac

SEQ ID NO: 66460 - DNA, 3407 bp, Zea Mays
gtgtttgtgaatgcaaaatctagccagacagctgaggaagggtgaaagcctccttgttcctgtagactgcagtgcgaggaggaggccgccgcatcctccccttccaaaccactccactccggtccccatcccacctgcgccagcttcgtcttgctttgagctttcgcccgccggcgatctgctagctatctcgctcgcacgtggtgcctgactgcctggtggcggtggccatggctgccccgctgggctttttctgcatgctgctgcttcttcttcttcagctgggccactcttcttgtaacaatgtgtacattgtgtacatgggggcgaggaatcccgagctgcacccggcgctggtccgggacgcgcaccacggcatgctcgccggccttctcggcagcgagcaggcggccaaggacgccatcctttacagctacaggcacggcttctccgggttcgccgccgtgctgacggacagccaggcggcgcggctcgccggttcgcctggggttgtgcgagtggtgcggaaccgtgttcttgacctgcacaccaccaggagctgggacttcatgcgagtggatccatcgcattcggctggaatcctcccagagagtaggttcggtgaggattccattatcggtgtgctagacactggaatctggccagagtcggccagttttagagacgacggcatgagcgaggctccgcggcggtggaaagggcaatgcgtcgccggggacaggttcaatgtttccaactgcaacaggataggaaaataataggcgcgaagtggtacatcaaagggtacgaagccgagtacgggaagatgaacaccaccgacatctacgagttcatgtccgcgagagacgccgtcgggcatggcacgcacacagcctccaccgccgctggtgctctggtagccggtgcaagcttcaggggactcgccggtggcgtcgcaaggggaggggcacccagggcgaggctcgcggtctacaaagtgtgctgggccaccggagactgcacttcggcagatatcctcgctgccttcgacgacgcgatacatgatggcgttgacgtgctttcggtgtccctaggccaagcgccaccgctccccgcgtacgttgacgacgtcctgtccattgggtcctttcatgctgtcgcgagagggattgtcgtggtctgctccgcaggaaattctgggccttattcagagacggtgatcaactcggcgccgtggctcgtgaccgtcgctgctggcaccattgataggactttcctcgcaaagatcatccttggcaacaatagcacctatgtgggtcaaacactgtactctggaaagcatcctgggaatagcatgcgcatattctatgctgaagacgttgcatctaataacgcagacgatacagatgcaagaagctgcactgcaggatctctgaactcgactctagtgaagggaactgtggtactttgcttccaaacaagggcacagagatcagctgcagtggcagtggagactgtcaagaaagctcgtggcgtcggagtcatcttcgcccagttcttaactaaggacatcgcgtcttcattcgatattccctgttttcaagtagactaccaggttggaacagctatactcgcatacaccactagcacgagaaatccaacagtccagtttggctcagcaaaaacgattcttggagaactgatgggcccagaagttgcatatttctcatctcggggtccaagttctctgtcccccgctgttctgaagccagacattgctgctccaggtgtcaacattttggcagcatggactcctgctgctgccatatcatcagccattggatctgtgaagttcaagatcgattcgggaacctcgatgtcctgtccccacatctcaggagttgttgctctcctcaaatcaatgcatcccaattggagtcctgctgcagtaaaatcagcacttgttacaacagccagtgtccatgacacatatgggtttgagattgtatccgaggcggcgccctacaatcaggcgaacccatttgattacggaggcgggcatgtggatccaaacagcgctgcacaccccggtcttgtgtatgacatggggacatctgactatgtgcgcttcctttgctccatgggctacaacgtctcagccatcagctccctggctcaacagcatgagacctgtcagcacacaccaaagacgcagctgaacctgaacctgccatccatcagtattcccgaactgaggggcaggctcactgtgtcaagaacggtcaccaacgttggctcagccttgacgaagtacagagctcgtgtggaagctcctccaggagtggatgtcaccgtgagcccctcactcctgaccttcaactcgacggtgagaaagttgacgttcaaggtgacattccaggccaaactgaaggtgcaagggagatactacttcggcagcttgacatgggaagatggcgtgcacgccgtgaggatccctcttgtggttcggacgatgatcagtaagttctatgccaattcatgagctggtgggtgtttgtgtgtactgtgtactaactttcgctcaccaccggtgacggtgggacagataagatgtaacctgctaatttgtcccaattctaatggcattggtgattggttggggttccttgactagaattcggttactgattattaagagaaattgaatctttcttttgtttgtaataactcataacttcctcctgttacacaacaaggaggctgaattgacaaagcatcttaatctagcatataacacagcaggaaaacaagagaactgtaatgtctcgagtgctaagaattggtaccggcgtatgtgaatctggtgagacgccagcaatctaattcagttcagagcagaagaggtcattacacatgagaggcgcacttcaggatttggcaccttctttgggcttggtatcagcagagtcgtccttgccgccggagcctgaggaggccgcgcgcgcggcgagggccttgtcgtacgcgtcgagctcgtcgaaatatatgtcccagacgcagcgaacgcagccgctgccgcagcagtcgcccgggagaggcttctcgggcggcagcggcgttggcgcgggcgtgggagccggcgcggcgtcgggcttcccggtgccgccatcgcaaggggtggccgaggccatgggcgtttcgggcgggaggtagtggcggcggcggaggagaggggcgcgtcggcccgggcaggaaaggtaggatcgggcccgggacacggacgacggcgcccagcatacagcccctcgctcgtcgaaaggggaggggaggggacggtcgcggaggccaagaggctgcgtgattgggacgcaggagaatccaactgccacaaggcaactcggacgaac

SEQ ID NO: 66461 - DNA, 2057 bp, Zea Mays
tggaaagcatcctgggaatagcatgcgcatattctatgctgaagacgttgcatctaataacgcagacgatacagatgcaaggatctctgaactcgactctagtgaagggaactgtggtactttgcttccaaacaagggcacagagatcagctgcagtggcagtggagactgtcaagaaagctcgtggcgtcggagtcatcttcgcccagttcttaactaaggacatcgcgtcttcattcgatattccctgttttcaagtagactaccaggttggaacagctatactcgcatacaccactagcacgagaaatccaacagtccagtttggctcagcaaaaacgattcttggagaactgatgggcccagaagttgcatatttctcatctcggggtccaagttctctgtcccccgctgttctgaagccagacattgctgctccaggtgtcaacattttggcagcatggactcctgctgctgccatatcatcagccattggatctgtgaagttcaagatcgattcgggaacctcgatgtcctgtccccacatctcaggagttgttgctctcctcaaatcaatgcatcccaattggagtcctgctgcagtaaaatcagcacttgttacaacagtgtccatgacacatatgggtttgagattgtatccgaggcggcgccctacaatcaggcgaacccatttgattacggaggcgggcatgtggatccaaacagcgctgcacaccccggtcttgtgtatgacatggggacatctgactatgtgcgcttcctttgctccatgggctacaacgtctcagccatcagctccctggctcaacagcatgagacctgtcagcacacaccaaagacgcagctgaacctgaacctgccatccatcagtattcccgaactgaggggcaggctcactgtgtcaagaacggtcaccaacgttggctcagccttgacgaagtacagagctcgtgtggaagctcctccaggagtggatgtcaccgtgagcccctcactcctgaccttcaactcgacggtgagaaagttgacgttcaaggtgacattccaggccaaactgaaggtgcaagggagatactacttcggcagcttgacatgggaagatggcgtgcacgccgtgaggatccctcttgtggttcggacgatgatcagtaagttctatgccaattcatgagctggtgggtgtttgtgtgtactgtgtactaactttcgctcaccaccggtgacggtgggacagataagatgtaacctgctaatttgtcccaattctaatggcattggtgattggttggggttccttgactagaattcggttactgattattaagagaaattgaatctttcttttgtttgtaataactcataacttcctcctgttacacaacaaggaggctgaattgacaaagcatcttaatctagcatataacacagcaggaaaacaagagaactgtaatgtctcgagtgctaagaattggtaccggcgtatgtgaatctggtgagacgccagcaatctaattcagttcagagcagaagaggtcattacacatgagaggcgcacttcaggatttggcaccttctttgggcttggtatcagcagagtcgtccttgccgccggagcctgaggaggccgcgcgcgcggcgagggccttgtcgtacgcgtcgagctcgtcgaaatatatgtcccagacgcagcgaacgcagccgctgccgcagcagtcgcccgggagaggcttctcgggcggcagcggcgttggcgcgggcgtgggagccggcgcggcgtcgggcttcccggtgccgccatcgcaaggggtggccgaggccatgggcgtttcgggcgggaggtagtggcggcggcggaggagaggggcgcgtcggcccgggcaggaaaggtaggatcgggcccgggacacggacgacggcgcccagcatacagcccctcgctcgtcgaaaggggaggggaggggacggtcgcggaggccaagaggctgcgtgattgggacgcaggagaatccaactgccacaaggcaactcggacgaac

SEQ ID NO: 66462 - DNA, 2020 bp, Zea Mays
aagacgttgcatctaataacgcagacgatacagatgcaaggatctctgaactcgactctagtgaagggaactgtggtactttgcttccaaacaagggcacagagatcagctgcagtggcagtggagactgtcaagaaagctcgtggcgtcggagtcatcttcgcccagttcttaactaaggacatcgcgtcttcattcgatattccctgttttcaagtagactaccaggttggaacagctatactcgcatacaccactagcacgagaaatccaacagtccagtttggctcagcaaaaacgattcttggagaactgatgggcccagaagttgcatatttctcatctcggggtccaagttctctgtcccccgctgttctgaagccagacattgctgctccaggtgtcaacattttggcagcatggactcctgctgctgccatatcatcagccattggatctgtgaagttcaagatcgattcgggaacctcgatgtcctgtccccacatctcaggagttgttgctctcctcaaatcaatgcatcccaattggagtcctgctgcagtaaaatcagcacttgttacaacagccagtgtccatgacacatatgggtttgagattgtatccgaggcggcgccctacaatcaggcgaacccatttgattacggaggcgggcatgtggatccaaacagcgctgcacaccccggtcttgtgtatgacatggggacatctgactatgtgcgcttcctttgctccatgggctacaacgtctcagccatcagctccctggctcaacagcatgagacctgtcagcacacaccaaagacgcagctgaacctgaacctgccatccatcagtattcccgaactgaggggcaggctcactgtgtcaagaacggtcaccaacgttggctcagccttgacgaagtacagagctcgtgtggaagctcctccaggagtggatgtcaccgtgagcccctcactcctgaccttcaactcgacggtgagaaagttgacgttcaaggtgacattccaggccaaactgaaggtgcaagggagatactacttcggcagcttgacatgggaagatggcgtgcacgccgtgaggatccctcttgtggttcggacgatgatcagtaagttctatgccaattcatgagctggtgggtgtttgtgtgtactgtgtactaactttcgctcaccaccggtgacggtgggacagataagatgtaacctgctaatttgtcccaattctaatggcattggtgattggttggggttccttgactagaattcggttactgattattaagagaaattgaatctttcttttgtttgtaataactcataacttcctcctgttacacaacaaggaggctgaattgacaaagcatcttaatctagcatataacacagcaggaaaacaagagaactgtaatgtctcgagtgctaagaattggtaccggcgtatgtgaatctggtgagacgccagcaatctaattcagttcagagcagaagaggtcattacacatgagaggcgcacttcaggatttggcaccttctttgggcttggtatcagcagagtcgtccttgccgccggagcctgaggaggccgcgcgcgcggcgagggccttgtcgtacgcgtcgagctcgtcgaaatatatgtcccagacgcagcgaacgcagccgctgccgcagcagtcgcccgggagaggcttctcgggcggcagcggcgttggcgcgggcgtgggagccggcgcggcgtcgggcttcccggtgccgccatcgcaaggggtggccgaggccatgggcgtttcgggcgggaggtagtggcggcggcggaggagaggggcgcgtcggcccgggcaggaaaggtaggatcgggcccgggacacggacgacggcgcccagcatacagcccctcgctcgtcgaaaggggaggggaggggacggtcgcggaggccaagaggctgcgtgattgggacgcaggagaatccaactgccacaaggcaactcggacgaac

SEQ ID NO: 66463 - DNA, 2563 bp, Zea Mays
ctgctctgttgcgcgtttccctggcctctgctgcgaacctgcaggtgcggacttgcggctgcggcgccccactgcagcactgctgtactgtactggccgcagcgttcgccgtcctccgccacagaaaattcacgcacgattccgagcagccgccctccgccacaatttcgccatgggcgcgccctagccccgcccttcttatccccgctcttccccgcctatggctgccgctgctacagctgacgcctccgcgcagcccctcccatggctctgcttgcgctacggttcgggccgcttctccctgccccgccccaccaccgtcgggtcctgcggaaccgatgccgagtccggatcgtcgcctccaatgcccccacccccgtgagggacgggggcgctgccgcggtggtgtggtttaagcatgatctccgcatcgacgaccacccgggcctcgccgccgccgtctcggagccgcggcgccccgtcgtgccgctttacgtcttcgaccgacgcatcctcgccggctattcagataaaatgctggaactgctgctatttgctctgaaagatcttaagatgacgttgaaatctcaagattctgatttgctcataggcctgggaaacgctgaagatgttgtgctgaagcttgtgaatgaggtacaagcaggtctcgtttttacagaagaagaagttgaatatagagtgcgtgatgttcttgccaatgttgaatcatctttatctaatgggtcattctcatggggaagccctcccaagatagtggcttggagtgccccattgtatgactataagaatctgggagcagtaccgacatcacatgacgattttttaaagaaaaaattaccattggccacaccttcttgctgcggcgaccttgcctgctctaaatttggagttagacacaggttctctacccactctggaagaattaaaatgtttcctgaaagaaataacaccagaggacaattgggctcctctcaagagaatgcccgcaagatctatccttaaaaggacaatcagtcaaaggaagatcaaaagtaatgctacattaagcaccatcaatgaagaaaacatagatgatgctgccaccatggattctgttgcatcaggaaagaggattataaactcgaagtttgcatcagagaactcactggaagttagtggtggaacagaaattactttggatgctttggctgcttacctaaaatatcttgaaggcacaggaaatgctagttggcaagagttgcatgataaagtgcgtttagctgaaaccagatatggtgcttcattctacatcttgtttggtcctgcaattcaacttggagtcatatctaggaggaaagcttacactgagactatccaatatgaaaaagatcgcaatgcaggttttctatcaccatttgggtactcaacacctacagtaacatcagcagtagatgctatatgttcaatggagtggtattggctcttggcatcaaaatcccaagtatgcatcgaggggaaatattctataagaatttggagatggaagggttatcttgtacagtacacctttcttggcaacgaaggtccacctgttcttcttgtgcatggttttggagctttcctggagcattttcgtgacaatatagacaagattgctgctacgggccaccgagtttgggcaattactcttgttggctttgggaaatcagagaaaccaaatgtcaactattcagaacttttctggtctgaactactgagggattttattgttgaaattgtgagggagcctgttcatcttcttggcaactctattggaggttatctctgtgctattgctgctggtttatggccttctcttgcaaagtctctggttcttttaaactcagctggttcagttgttccaaattactccttcatcccactgagtgaagaaagacgaacatcatggatttccaggttgcaggcacagctccttttgctcttcttgaggtcaagggcagaaggcattcttaaagaatattatcctacaagaactgaacgggtggacaagccacttctggaccagattgtaagagcttcatatgatcctggtgctgcaaaagtccttgagagtgtattcaacttcaatctttcaattcctcttaacttcttatttgattcttttggagggaagatattagttatccagggtatgaaagacccccttacaaaatctgaggcatttgtcaccatgctccgagaacattgcagcaaggttcaaatcagagagttaaatgcaggtcatgctccacatgatgaagttccagatgaagtaaataccatactatgtaaatgggtggagcagattgaagttaagccagccctggagaagaccaaggcaatatagccgtgaccctctagagcttgatctgggttctaagtttaaacgtaggatcagagcagacccggacgcctggtttcaatatcagcacatgccatcataggctcacgacgacgaagaggtaaggcggttatttacgccgatattttttgagctgtcagtcatcacagtccctagtgcggc

SEQ ID NO: 66464 - DNA, 3372 bp, Zea Mays
ctgctctgttgcgcgtttccctggcctctgctgcgaacctgcaggtgcggacttgcggctgcggcgccccactgcagcactgctgtactgtactggccgcagcgttcgccgtcctccgccacagaaaattcacgcacgattccgagcagccgccctccgccacaatttcgccatgggcgcgccctagccccgcccttcttatccccgctcttccccgcctatggctgccgctgctacagctgacgcctccgcgcagcccctcccatggctctgcttgcgctacggttcgggccgcttctccctgccccgccccaccaccgtcgggtcctgcggaaccgatgccgagtccggatcgtcgcctccaatgcccccacccccgtgagggacgggggcgctgccgcggtggtgtggtttaagcatgatctccgcatcgacgaccacccgggcctcgccgccgccgtctcggagccgcggcgccccgtcgtgccgctttacgtcttcgaccgacgcatcctcgccggctattcagataaaatgctggaactgctgctatttgctctgaaagatcttaagatgacgttgaaatctcaagattctgatttgctcataggcctgggaaacgctgaagatgttgtgctgaagcttgtgaatgaggtacaagcaggtctcgtttttacagaagaagaagttgaatatagagtgcgtgatgttcttgccaatgttgaatcatctttatctaatgggtcattctcatggggaagccctcccaagatagtggcttggagtgccccattgtatgactataagaatctgggagcagtaccgacatcacatgacgattttttaaagaaaaaattaccattggccacaccttcttgctgcggcgaccttgcctgctctaaatttggagttagacacaggttctctacccactctggaagaattaaaatgtttcctgaaagaaataacaccagaggacaattgggctcctctcaagagaatgcccgcaagatctatccttaaaaggacaatcagtcaaaggaagatcaaaagtaatgctacattaagcaccatcaatgaagaaaacatagatgatgctgccaccatggattctgttgcatcaggaaagaggattataaactcgaagtttgcatcagagaactcactggaagttagtggtggaacagaaattactttggatgctttggctgcttacctaaaatatcttgaaggcacaggaaatgctagttggcaagagttgcatgataaagtgcgtttagctgaaaccagatatggtgcttcattctacatcttgtttggtcctgcaattcaacttggagtcatatctaggaggaaagcttacactgagactatccaatatgaaaaagatcgcaatgcaggttttctatcaccatttgggtactcaacacctacagtaacatcagcagtagatgctatatgttcaatggagtggtattggctcttggcatcaaaatcccaagtatgcatcgaggggaaatattctataagaatttggagatggaagggttatcttgtacagtacacctttcttggcaacgaaggtccacctgttcttcttgtgcatggttttggagctttcctggagcattttcgtgacaatatagacaagattgctgctacgggccaccgagtttgggcaattactcttgttggctttgggaaatcagagaaaccaaatgtcaactattcagaacttttctggtctgaactactgagggattttattgttgaaattgtgagggagcctgttcatcttcttggcaactctattggaggttatctctgtgctattgctgctggtttatggccttctcttgcaaagtctctggttcttttaaactcagctggttcagttgttccaaattactccttcatcccactgagtgaagaaagacgaacatcatggatttccaggttgcaggcacagctccttttgctcttcttgaggtcaagggcagaaggcattcttaaagaatattatcctacaagaactgaacgggtggacaagccacttctggaccagattgtaagagcttcatatgatcctggtgctgcaaaagtccttgagagtgtattcaacttcaatctttcaattcctcttaacttcttatttgattcttttggagggaagatattagttatccagggtatgaaagacccccttacaaaatctgaggcatttgtcaccatgctccgagaacattgcagcaaggttcaaatcagagagttaaatgcaggtcatgctccacatgatgaagttccagatgaagtaaataccatactatgtaaatgggtggagcagattgaagttaagccagccctggagaagaccaaggcaatataggtaacatttagaattatggacaccctatccattggttgattgtttaacatgatcttcaggagcaccttggtacattttcagtgacctaccaaaacttgtgtgattaaagcattgtgaattgttagccctatacaaattgtgattaaagtattgtgaattgttagctatatacaaaacttggtacattttctttcagctgatgttgagatgaacatacatgaaaccaaaaggacttttttttgggggtggggggtgggctagcatttgagcatgtttctgagtaagtttgcagagccgagatgcattctaagttgcacataacatgcctggttctgcttcttagggcttgtttagatagagggactagagctgatccctgttttatgggatgaaaagattgggtcagatccctgccaattcagacaagccctaaatgttgcttttgattaaaggctgaatctgaccggaaataaaccttggaccctcaacgacatataatctaaaatcacaatagttgcgcttgtgatcccattgtgcaagtaatgtttaatcatgctacttctatacttgcatccactgtactccactcctgcttgttttattgagacagcagcgtcacacaattattttttatctcacgccaactggtgctttatcatgtcatttatgtaattatgtgcaatcagcaatttcatgagagaagccaattgtaatcaccttgttgaactattctccagcaaggtgagctgctggaacttttagtgaaggatttgaactggatgtgttagtattcttttgttatagtgcagccgtgaccctctagagcttgatctgggttctaagtttaaacgtaggatcagagcagacccggacgcctggtttcaatatcagcacatgccatcataggctcacgacgacgaagaggtaaggcggttatttacgccgatattttttgagctgtcagtcatcacagtccctagtgcggc

SEQ ID NO: 66465 - DNA, 2477 bp, Zea Mays
ctgctctgttgcgcgtttccctggcctctgctgcgaacctgcaggtgcggacttgcggctgcggcgccccactgcagcactgctgtactgtactggccgcagcgttcgccgtcctccgccacagaaaattcacgcacgattccgagcagccgccctccgccacaatttcgccatgggcgcgccctagccccgcccttcttatccccgctcttccccgcctatggctgccgctgctacagctgacgcctccgcgcagcccctcccatggctctgcttgcgctacggttcgggccgcttctccctgccccgccccaccaccgtcgggtcctgcggaaccgatgccgagtccggatcgtcgcctccaatgcccccacccccgtgagggacgggggcgctgccgcggtggtgtggtttaagcatgatctccgcatcgacgaccacccgggcctcgccgccgccgtctcggagccgcggcgccccgtcgtgccgctttacgtcttcgaccgacgcatcctcgccggctattcagataaaatgctggaactgctgctatttgctctgaaagatcttaagatgacgttgaaatctcaagattctgatttgctcataggcctgggaaacgctgaagatgttgtgctgaagcttgtgaatgaggtcactatgcaaggtacaagcaggtctcgtttttacagaagaagaagttgaatatagagtgcgtgatgttcttgccaatgttgaatcatctttatctaatgggtcattctcatggggaagccctcccaagatagtggcttggagtgccccattgtatgactataagaatctgggagcagtaccgacatcacatgacgattttttaaagaaaaaattaccattggccacaccttcttgctgcggcgaccttgcctgctctaaatttggagttagacacaggttctctacccactctggaagaattaaaatgtttcctgaaagaaataacaccagaggacaattgggctcctctcaagagaatgcccgcaagatctatccttaaaaggacaatcagtcaaaggaagatcaaaagtaatgctacattaagcaccatcaatgaagaaaacatagatgatgctgccaccatggattctgttgcatcaggaaagaggattataaactcgaagtttgcatcagagaactcactggaagttagtggtggaacagaaattactttggatgctttggctgcttacctaaaatatcttgaaggcacaggaaatgctagttggcaagagttgcatgataaagtgcgtttagctgaaaccagatatggtgcttcattctacatcttgtttggtcctgcaattcaacttggagtcatatctaggaggaaagcttacactgagactatccaatatgaaaaagatcgcaatgcaggttttctatcaccatttgggtactcaacacctacagtaacatcagcagtagatgctatatgttcaatggagtggtattggctcttggcatcaaaatcccaagtatgcatcgaggggaaatattctataagaatttggagatggaagggttatcttgtacagtacacctttcttggcaacgaaggtccacctgttcttcttgtgcatggttttggagctttcctggagcattttcgtgacaatatagacaagattgctgctacgggccaccgagtttgggcaattactcttgttggctttgggaaatcagagaaaccaaatgtcaactattcagaacttttctggtctgaactactgagggattttattgttgaaattgtgagggagcctgttcatcttcttggcaactctattggaggttatctctgtgctattgctgctggtttatggccttctcttgcaaagtctctggttcttttaaactcagctggttcagttgttccaaattactccttcatcccactgagtgaagaaagacgaacatcatggatttccaggttgcaggcacagctccttttgctcttcttgaggtcaagggcagaaggcattcttaaagaatattatcctacaagaactgaacgggtggacaagccacttctggaccagattgtaagagcttcatatgatcctggtgctgcaaaagtccttgagagtgtattcaacttcaatctttcaattcctcttaacttcttatttgattcttttggagggaagatattagttatccagggtatgaaagacccccttacaaaatctgaggcatttgtcaccatgctccgagaacattgcagcaaggttcaaatcagagagttaaatgcaggtcatgctccacatgatgaagttccagatgaagtaaataccatactatgtaaatgggtggagcagattgaagttaagccagccctggagaagaccaaggcaatataggatcagagcagacccggacgcctggtttcaatatcagcacatgccatcataggctcacgacgacgaagagaaacaaat

SEQ ID NO: 66466 - DNA, 3129 bp, Zea Mays
ctgctctgttgcgcgtttccctggcctctgctgcgaacctgcaggtgcggacttgcggctgcggcgccccactgcagcactgctgtactgtactggccgcagcgttcgccgtcctccgccacagaaaattcacgcacgattccgagcagccgccctccgccacaatttcgccatgggcgcgccctagccccgcccttcttatccccgctcttccccgcctatggctgccgctgctacagctgacgcctccgcgcagcccctcccatggctctgcttgcgctacggttcgggccgcttctccctgccccgccccaccaccgtcgggtcctgcggaaccgatgccgagtccggatcgtcgcctccaatgcccccacccccgtgagggacgggggcgctgccgcggtggtgtggtttaagcatgatctccgcatcgacgaccacccgggcctcgccgccgccgtctcggagccgcggcgccccgtcgtgccgctttacgtcttcgaccgacgcatcctcgccggctattcagataaaatgctggaactgctgctatttgctctgaaagatcttaagatgacgttgaaatctcaagattctgatttgctcataggcctgggaaacgctgaagatgttgtgctgaagcttgtgaatgaggtacaagcaggtctcgtttttacagaagaagaagttgaatatagagtgcgtgatgttcttgccaatgttgaatcatctttatctaatgggtcattctcatggggaagccctcccaagatagtggcttggagtgccccattgtatgactataagaatctgggagcagtaccgacatcacatgacgattttttaaagaaaaaattaccattggccacaccttcttgctgcggcgaccttgcctgctctaaatttggagttagacacagataagcccagaagcaggtctggatgagcttttctaagaaacctgcttttggaaaagctccacccgcagaaactcaaacagacatgcaagtgattctccagatgtcgggaacccgtgagaggccacaaggaagaagataatgcgaagggatgtcaaataagctgggtttgaaccttggatgttagcaagttcagggatgtgaaactgcaaattaatagttccaggacttacatgcatctctggacaagctcaaagatgctgatgttctctacccactctggaagaattaaaatgtttcctgaaagaaataacaccagaggacaattgggctcctctcaagagaatgcccgcaagatctatccttaaaaggacaatcagtcaaaggaagatcaaaagtaatgctacattaagcaccatcaatgaagaaaacatagatgatgctgccaccatggattctgttgcatcaggaaagaggattataaactcgaagtttgcatcagagaactcactggaagttagtggtggaacagaaattactttggatgctttggctgcttacctaaaatatcttgaaggcacaggaaatgctagttggcaagagttgcatgataaagtgcgtttagctgaaaccagatatggtgcttcattctacatcttgtttggtcctgcaattcaacttggagtcatatctaggaggaaagcttacactgagactatccaatatgaaaaagatcgcaatgcaggttttctatcaccatttgggtactcaacacctacagtaacatcagcagtagatgctatatgttcaatggagtggtattggctcttggcatcaaaatcccaagtatgcatcgaggggaaatattctataagaatttggagatggaagggttatcttgtacagtacacctttcttggcaacgaaggtccacctgttcttcttgtgcatggttttggagctttcctggagcattttcgtgacaatatagacaagattgctgctacgggccaccgagtttgggcaattactcttgttggctttgggaaatcagagaaaccaaatgtcaactattcagaacttttctggtctgaactactgagggattttattgttgaaattgtgagggagcctgttcatcttcttggcaactctattggaggttatctctgtgctattgctgctggtttatggccttctcttgcaaagtctctggttcttttaaactcagctggttcagttgttccaaattactccttcatcccactgagtgaagaaagacgaacatcatggatttccaggttgcaggcacagctccttttgctcttcttgaggtcaagggcagaaggcattcttaaagaatattatcctacaagaactgaacgggtggacaagccacttctggaccagattgtaagagcttcatatgatcctggtgctgcaaaagtccttgagagtgtattcaacttcaatctttcaattcctcttaacttcttatttgattcttttggagggaagatattagttatccagggtatgaaagacccccttacaaaatctgaggcatttgtcaccatgctccgagaacattgcagcaaggttcaaatcagagagttaaatgcaggtcatgctccacatgatgaagttccagatgaagtaaataccatactatgtaaatgggtggagcagattgaagttaagccagccctggagaagaccaaggcaatatagaaacaaatcagcagtgcttccaccagtcatgagccctggtgaccatccgagaaatctttgggcgcgcatcagtgaggccataaaacaaaagcgctgattgggatcgcccaaccaacgcaccttatcagctttccccctctctcttggtttcaccaaatctgacggtgacgcgcccggtgcatggcctccggaagatgtcaagttgcagaatgatgcagcctagctttgttatctctgtcacggaagccaaattgttaatgccccaaagcctagcatacgcccgctgaatgttcagcagatgaaagtggcgtttggttagaaaattgactagaggtgtacaattattgggtgcatataggtcaagatgcttgctatattcctcttgtatctaaggacagtatgtaaggaaaatgcaattttaccactagcgcgtcgacgtcaaaatatatatatgttcgtgaggtttaattttatctatata

SEQ ID NO: 66467 - DNA, 2672 bp, Zea Mays
ctgctctgttgcgcgtttccctggcctctgctgcgaacctgcaggtgcggacttgcggctgcggcgccccactgcagcactgctgtactgtactggccgcagcgttcgccgtcctccgccacagaaaattcacgcacgattccgagcagccgccctccgccacaatttcgccatgggcgcgccctagccccgcccttcttatccccgctcttccccgcctatggctgccgctgctacagctgacgcctccgcgcagcccctcccatggctctgcttgcgctacggttcgggccgcttctccctgccccgccccaccaccgtcgggtcctgcggaaccgatgccgagtccggatcgtcgcctccaatgcccccacccccgtgagggacgggggcgctgccgcggtggtgtggtttaagcatgatctccgcatcgacgaccacccgggcctcgccgccgccgtctcggagccgcggcgccccgtcgtgccgctttacgtcttcgaccgacgcatcctcgccggctattcagataaaatgctggaactgctgctatttgctctgaaagatcttaagatgacgttgaaatctcaagattctgatttgctcataggcctgggaaacgctgaagatgttgtgctgaagcttgtgaatgaggtcactatgcaaggtacaagcaggtctcgtttttacagaagaagaagttgaatatagagtgcgtgatgttcttgccaatgttgaatcatctttatctaatgggtcattctcatggggaagccctcccaagatagtggcttggagtgccccattgtatgactataagaatctgggagcagtaccgacatcacatgacgattttttaaagaaaaaattaccattggccacaccttcttgctgcggcgaccttgcctgctctaaatttggagttagacacaggttctctacccactctggaagaattaaaatgtttcctgaaagaaataacaccagaggacaattgggctcctctcaagagaatgcccgcaagatctatccttaaaaggacaatcagtcaaaggaagatcaaaagtaatgctacattaagcaccatcaatgaagaaaacatagatgatgctgccaccatggattctgttgcatcaggaaagaggattataaactcgaagtttgcatcagagaactcactggaagttagtggtggaacagaaattactttggatgctttggctgcttacctaaaatatcttgaaggcacaggaaatgctagttggcaagagttgcatgataaagtgcgtttagctgaaaccagatatggtgcttcattctacatcttgtttggtcctgcaattcaacttggagtcatatctaggaggaaagcttacactgagactatccaatatgaaaaagatcgcaatgcaggttttctatcaccatttgggtactcaacacctacagtaacatcagcagtagatgctatatgttcaatggagtggtattggctcttggcatcaaaatcccaagtatgcatcgaggggaaatattctataagaatttggagatggaagggttatcttgtacagtacacctttcttggcaacgaaggtccacctgttcttcttgtgcatggttttggagctttcctggagcattttcgtgacaatatagacaagattgctgctacgggccaccgagtttgggcaattactcttgttggctttgggaaatcagagaaaccaaatgtcaactattcagaacttttctggtctgaactactgagggattttattgttgaaattgtgagggagcctgttcatcttcttggcaactctattggaggttatctctgtgctattgctgctggtttatggccttctcttgcaaagtctctggttcttttaaactcagctggttcagttgttccaaattactccttcatcccactgagtgaagaaagacgaacatcatggatttccaggttgcaggcacagctccttttgctcttcttgaggtcaagggcagaaggcattcttaaagaatattatcctacaagaactgaacgggtggacaagccacttctggaccagattgtaagagcttcatatgatcctggtgctgcaaaagtccttgagagtgtattcaacttcaatctttcaattcctcttaacttcttatttgattcttttggagggaagatattagttatccagggtatgaaagacccccttacaaaatctgaggcatttgtcaccatgctccgagaacattgcagcaaggttcaaatcagagagttaaatgcaggtcatgctccacatgatgaagttccagatgaagtaaataccatactatgtaaatgggtggagcagattgaagttaagccagccctggagaagaccaaggcaatatagaatgatgcagcctagctttgttatctctgtcacggaagccaaattgttaatgccccaaagcctagcatacgcccgctgaatgttcagcagatgaaagtggcgtttggttagaaaattgactagaggtgtacaattattgggtgcatataggtcaagatgcttgctatattcctcttgtatctaaggacagtatgtaaggaaaatgcaattttaccactagcgcgtcgacgtcaaaatatatatatgttcgtgaggtttaattttatctatata

SEQ ID NO: 66468 - DNA, 4058 bp, Zea Mays
ctgctctgttgcgcgtttccctggcctctgctgcgaacctgcaggtgcggacttgcggctgcggcgccccactgcagcactgctgtactgtactggccgcagcgttcgccgtcctccgccacagaaaattcacgcacgattccgagcagccgccctccgccacaatttcgccatgggcgcgccctagccccgcccttcttatccccgctcttccccgcctatggctgccgctgctacagctgacgcctccgcgcagcccctcccatggctctgcttgcgctacggttcgggccgcttctccctgccccgccccaccaccgtcgggtcctgcggaaccgatgccgagtccggatcgtcgcctccaatgcccccacccccgtgagggacgggggcgctgccgcggtggtgtggtttaagcatgatctccgcatcgacgaccacccgggcctcgccgccgccgtctcggagccgcggcgccccgtcgtgccgctttacgtcttcgaccgacgcatcctcgccggctattcagataaaatgctggaactgctgctatttgctctgaaagatcttaagatgacgttgaaatctcaagattctgatttgctcataggcctgggaaacgctgaagatgttgtgctgaagcttgtgaatgaggtacaagcaggtctcgtttttacagaagaagaagttgaatatagagtgcgtgatgttcttgccaatgttgaatcatctttatctaatgggtcattctcatggggaagccctcccaagatagtggcttggagtgccccattgtatgactataagaatctgggagcagtaccgacatcacatgacgattttttaaagaaaaaattaccattggccacaccttcttgctgcggcgaccttgcctgctctaaatttggagttagacacaggttctctacccactctggaagaattaaaatgtttcctgaaagaaataacaccagaggacaattgggctcctctcaagagaatgcccgcaagatctatccttaaaaggacaatcagtcaaaggaagatcaaaagtaatgctacattaagcaccatcaatgaagaaaacatagatgatgctgccaccatggattctgttgcatcaggaaagaggattataaactcgaagtttgcatcagagaactcactggaagttagtggtggaacagaaattactttggatgctttggctgcttacctaaaatatcttgaaggcacaggaaatgctagttggcaagagttgcatgataaagtgcgtttagctgaaaccagatatggtgcttcattctacatcttgtttggtcctgcaattcaacttggagtcatatctaggaggaaagcttacactgagactatccaatatgaaaaagatcgcaatgcaggttttctatcaccatttgggtactcaacacctacagtaacatcagcagtagatgctatatgttcaatggagtggtattggctcttggcatcaaaatcccaagtatgcatcgaggggaaatattctataagaatttggagatggaagggttatcttgtacagtacacctttcttggcaacgaaggtccacctgttcttcttgtgcatggttttggagctttcctggagcattttcgtgacaatatagacaagattgctgctacgggccaccgagtttgggcaattactcttgttggctttgggaaatcagagaaaccaaatgtcaactattcagaacttttctggtctgaactactgagggattttattgttgaaattgtgagggagcctgttcatcttcttggcaactctattggaggttatctctgtgctattgctgctggtttatggccttctcttgcaaagtctctggttcttttaaactcagctggttcagttgttccaaattactccttcatcccactgagtgaagaaagacgaacatcatggatttccaggttgcaggcacagctccttttgctcttcttgaggtcaagggcagaaggcattcttaaagaatattatcctacaagaactgaacgggtggacaagccacttctggaccagattgtaagagcttcatatgatcctggtgctgcaaaagtccttgagagtgtattcaacttcaatctttcaattcctcttaacttcttatttgattcttttggagggaagatattagttatccagggtatgaaagacccccttacaaaatctgaggcatttgtcaccatgctccgagaacattgcagcaaggttcaaatcagagagttaaatgcaggtcatgctccacatgatgaagttccagatgaagtaaataccatactatgtaaatgggtggagcagattgaagttaagccagccctggagaagaccaaggcaatatagaaacaaatcagcagtgcttccaccagtcatgagccctggtgaccatccgagaaatctttgggcgcgcatcagtgaggccataaaacaaaagcgctgattgggatcgcccaaccaacgcaccttatcagctttccccctctctcttggtttcaccaaatctgacggtgacgcgcccggtgcatggcctccggaagatgtcaagttgcagtcggtccggtcactcgtggatgttacaagctgctgctcatgggccaccagttgctgcactcttgctgtctgctttcaagccaagtgctctctccagtctcctcccttgtgctggatttcttggcgagttcttacgctagtgcctaggcgtagcgacgtgcgttgcgcaggtcgggcgacagaatcggggccgggctgtgaaacttctggagcttttccggtaggacaggagtgtaggacctctttcgaacaagctacgttttagaatttaaacacaaaatatatgttccatccgtcctaaaaaactggtctgtagtttataacaaaaatactatcaacaggtatggttatatataggaatatgtgaaaggttattttgaggaattcaataactcttatttaatatcattaatatttatacatttttaatagaaaatggtcaaaatgaagattgtttgacctatcatcggagtgagaagtataccatttttaggacggaaaagtatacactaagattgtctctagcggtttctctaaagggccccttgtcctatatctggagaaaattcttctcctctatacgctctagcagtgtcttctagatatagatgatgtttctctatcctctctctatatagattctctcttctatctacttattttatagcaaaactaaactatttataagatatttgagtgcatgataaatacatacatacataaatctagaacaaaatatgtttttaatattatttaacgtaaagaggacggaatatgaaggacgctggggagaaataagacatgagggaatgtttttagaggagactgtaaatgagatatatagatgaggaatatagatgatatggttggagatagtacaagactgtaaaattgctatgattttgacattggaactgttaatatattaaaccatttctatgtgaaactcttaaattccaaatagtcgctacacgctttgtttgagtacgcatacctatggctatgttggctttgcaaaaagaaacacaggcaagtatgcaggtcgaatatattagtactgttacacattgtcatgtcgtgtctgattacggcaacttattctaagagaggtcaaaaggagtgtcgcttgcgaagttggtacactagagactgatgttgtttcattgtttgtcctttgatgatggggtcgaagaatgatgcagcctagctttgttatctctgtcacggaagccaaattgttaatgccccaaagcctagcatacgcccgctgaatgttcagcagatgaaagtggcgtttggttagaaaattgactagaggtgtacaattattgggtgcatataggtcaagatgcttgctatattcctcttgtatctaaggacagtatgtaaggaaaatgcaattttaccactagcgcgtcgacgtcaaaatatatatatgttcgtgaggtttaattttatctatata

SEQ ID NO: 66469 - DNA, 4668 bp, Zea Mays
ctgctctgttgcgcgtttccctggcctctgctgcgaacctgcaggtgcggacttgcggctgcggcgccccactgcagcactgctgtactgtactggccgcagcgttcgccgtcctccgccacagaaaattcacgcacgattccgagcagccgccctccgccacaatttcgccatgggcgcgccctagccccgcccttcttatccccgctcttccccgcctatggctgccgctgctacagctgacgcctccgcgcagcccctcccatggctctgcttgcgctacggttcgggccgcttctccctgccccgccccaccaccgtcgggtcctgcggaaccgatgccgagtccggatcgtcgcctccaatgcccccacccccgtgagggacgggggcgctgccgcggtggtgtggtttaagcatgatctccgcatcgacgaccacccgggcctcgccgccgccgtctcggagccgcggcgccccgtcgtgccgctttacgtcttcgaccgacgcatcctcgccggctattcagataaaatgctggaactgctgctatttgctctgaaagatcttaagatgacgttgaaatctcaagattctgatttgctcataggcctgggaaacgctgaagatgttgtgctgaagcttgtgaatgaggtcactatgcaaggtacaagcaggtctcgtttttacagaagaagaagttgaatatagagtgcgtgatgttcttgccaatgttgaatcatctttatctaatgggtcattctcatggggaagccctcccaagatagtggcttggagtgccccattgtatgactataagaatctgggagcagtaccgacatcacatgacgattttttaaagaaaaaattaccattggccacaccttcttgctgcggcgaccttgcctgctctaaatttggagttagacacagataagcccagaagcaggtctggatgagcttttctaagaaacctgcttttggaaaagctccacccgcagaaactcaaacagacatgcaagtgattctccagatgtcgggaacccgtgagaggccacaaggaagaagataatgcgaagggatgtcaaataagctgggtttgaaccttggatgttagcaagttcagggatgtgaaactgcaaattaatagttccaggacttacatgcatctctggacaagctcaaagatgctgatgttctctacccactctggaagaattaaaatgtttcctgaaagaaataacaccagaggacaattgggctcctctcaagagaatgcccgcaagatctatccttaaaaggacaatcagtcaaaggaagatcaaaagtaatgctacattaagcaccatcaatgaagaaaacatagatgatgctgccaccatggattctgttgcatcaggaaagaggattataaactcgaagtttgcatcagagaactcactggaagttagtggtggaacagaaattactttggatgctttggctgcttacctaaaatatcttgaaggcacaggaaatgctagttggcaagagttgcatgataaagtgcgtttagctgaaaccagatatggtgcttcattctacatcttgtttggtcctgcaattcaacttggagtcatatctaggaggaaagcttacactgagactatccaatatgaaaaagatcgcaatgcaggttttctatcaccatttgggtactcaacacctacagtaacatcagcagtagatgctatatgttcaatggagtggtattggctcttggcatcaaaatcccaagtatgcatcgaggggaaatattctataagaatttggagatggaagggttatcttgtacagtacacctttcttggcaacgaaggtccacctgttcttcttgtgcatggttttggagctttcctggagcattttcgtgacaatatagacaagattgctgctacgggccaccgagtttgggcaattactcttgttggctttgggaaatcagagaaaccaaatgtcaactattcagaacttttctggtctgaactactgagggattttattgttgaaattgtgagggagcctgttcatcttcttggcaactctattggaggttatctctgtgctattgctgctggtttatggccttctcttgcaaagtctctggttcttttaaactcagctggttcagttgttccaaattactccttcatcccactgagtgaagaaagacgaacatcatggatttccaggttgcaggcacagctccttttgctcttcttgaggtcaagggcagaaggcattcttaaagaatattatcctacaagaactgaacgggtggacaagccacttctggaccagattgtaagagcttcatatgatcctggtgctgcaaaagtccttgagagtgtattcaacttcaatctttcaattcctcttaacttcttatttgattcttttggagggaagatattagttatccagggtatgaaagacccccttacaaaatctgaggcatttgtcaccatgctccgagaacattgcagcaaggttcaaatcagagagttaaatgcaggtcatgctccacatgatgaagttccagatgaagtaaataccatactatgtaaatgggtggagcagattgaagttaagccagccctggagaagaccaaggcaatataggtaacatttagaattatggacaccctatccattggttgattgtttaacatgatcttcaggagcaccttggtacattttcagtgacctaccaaaacttgtgtgattaaagcattgtgaattgttagccctatacaaattgtgattaaagtattgtgaattgttagctatatacaaaacttggtacattttctttcagctgatgttgagatgaacatacatgaaaccaaaaggacttttttttgggggtggggggtgggctagcatttgagcatgtttctgagtaagtttgcagagccgagatgcattctaagttgcacataacatgcctggttctgcttcttagggcttgtttagatagagggactagagctgatccctgttttatgggatgaaaagattgggtcagatccctgccaattcagacaagccctaaatgttgcttttgattaaaggctgaatctgaccggaaataaaccttggaccctcaacgacatataatctaaaatcacaatagttgcgcttgtgatcccattgtgcaagtaatgtttaatcatgctacttctatacttgcatccactgtactccactcctgcttgttttattgagacagcagcgtcacacaattattttttatctcacgccaactggtgctttatcatgtcatttatgtaattatgtgcaatcagcaatttcatgagagaagccaattgtaatcaccttgttgaactattctccagcaaggtgagctgctggaacttttagtgaaggatttgaactggatgtgttagtattcttttgttatagtgcagccgtgaccctctagagcttgatctgggttctaagtttaaacgtaggatcagagcagacccggacgcctggtttcaatatcagcacatgccatcataggctcacgacgacgaagaggtaaggcggttatttacgccgatattttttgagctgtcagtcatcacagtccctagtgcggctgtgttaatcagaagacactggattatatacgtatagattatataatagagagaccaagttcggtgtcgtagtttgtcaaatgctcccctttctgcttgcgtattgtaccccttcttttccgtactgaacaattcgtgctcggttgttcagtatggaacacacttgtcgacactggagcagggtttcgtttcatcatcctgcgtttgcattacatcagttgtgcagttccagttccatttccacgccaatctactaatcgctggtgcttccatcctttcgcggtgccatactgtcatgaaactgcagctgtcactttggccaccttcccccagcaaaaagaacgcgagcattacctctagggccaggcggacagcgaccactcagagtgaatatcaatcccctcatgagcatgaccgccacgcatcacgcatgctgtcattgtttttttcgctttgctgaccaaatattcagtgccttaattctttcttttttctgtcccagaaacaaatcagcagtgcttccaccagtcatgagccctggtgaccatccgagaaatctttgggcgcgcatcagtgaggccataaaacaaaagcgctgattgggatcgcccaaccaacgcaccttatcagctttccccctctctcttggtttcaccaaatctgacggtgacgcgcccggtgcatggcctccggaagatgtcaagttgcaggtgattttttaattcagagggaaaaaagagacgtacacgcggaagctttttactctagtagttagagttagttgttagtactattgcagtgtagagtaatttttttaaaattgatcatagcgtggccatgtacaagattttttttgggtttactgttgtgacgcagcatgcatgcatgcacgcatttttcttccatgcaaaggcttcccacaaaacttctgttagacaggtcagtaggtcatcactcactcgatcagtttcggccaacacgtcgatttgctgcatatacacgtattggcgccacacgcgtg

SEQ ID NO: 66470 - DNA, 6859 bp, Zea Mays
ctgctctgttgcgcgtttccctggcctctgctgcgaacctgcaggtgcggacttgcggctgcggcgccccactgcagcactgctgtactgtactggccgcagcgttcgccgtcctccgccacagaaaattcacgcacgattccgagcagccgccctccgccacaatttcgccatgggcgcgccctagccccgcccttcttatccccgctcttccccgcctatggctgccgctgctacagctgacgcctccgcgcagcccctcccatggctctgcttgcgctacggttcgggccgcttctccctgccccgccccaccaccgtcgggtcctgcggaaccgatgccgagtccggatcgtcgcctccaatgcccccacccccgtgagggacgggggcgctgccgcggtggtgtggtttaagcatgatctccgcatcgacgaccacccgggcctcgccgccgccgtctcggagccgcggcgccccgtcgtgccgctttacgtcttcgaccgacgcatcctcgccggctattcagataaaatgctggaactgctgctatttgctctgaaagatcttaagatgacgttgaaatctcaagattctgatttgctcataggcctgggaaacgctgaagatgttgtgctgaagcttgtgaatgaggtcactatgcaaggtacaagcaggtctcgtttttacagaagaagaagttgaatatagagtgcgtgatgttcttgccaatgttgaatcatctttatctaatgggtcattctcatggggaagccctcccaagatagtggcttggagtgccccattgtatgactataagaatctgggagcagtaccgacatcacatgacgattttttaaagaaaaaattaccattggccacaccttcttgctgcggcgaccttgcctgctctaaatttggagttagacacaggttctctacccactctggaagaattaaaatgtttcctgaaagaaataacaccagaggacaattgggctcctctcaagagaatgcccgcaagatctatccttaaaaggacaatcagtcaaaggaagatcaaaagtaatgctacattaagcaccatcaatgaagaaaacatagatgatgctgccaccatggattctgttgcatcaggaaagaggattataaactcgaagtttgcatcagagaactcactggaagttagtggtggaacagaaattactttggatgctttggctgcttacctaaaatatcttgaaggcacaggaaatgctagttggcaagagttgcatgataaagtgcgtttagctgaaaccagatatggtgcttcattctacatcttgtttggtcctgcaattcaacttggagtcatatctaggaggaaagcttacactgagactatccaatatgaaaaagatcgcaatgcaggttttctatcaccatttgggtactcaacacctacagtaacatcagcagtagatgctatatgttcaatggagtggtattggctcttggcatcaaaatcccaagtatgcatcgaggggaaatattctataagaatttggagatggaagggttatcttgtacagtacacctttcttggcaacgaaggtccacctgttcttcttgtgcatggttttggagctttcctggagcattttcgtgacaatatagacaagattgctgctacgggccaccgagtttgggcaattactcttgttggctttgggaaatcagagaaaccaaatgtcaactattcagaacttttctggtctgaactactgagggattttattgttgaaattgtgagggagcctgttcatcttcttggcaactctattggaggttatctctgtgctattgctgctggtttatggccttctcttgcaaagtctctggttcttttaaactcagctggttcagttgttccaaattactccttcatcccactgagtgaagaaagacgaacatcatggatttccaggttgcaggcacagctccttttgctcttcttgaggtcaagggcagaaggcattcttaaagaatattatcctacaagaactgaacgggtggacaagccacttctggaccagattgtaagagcttcatatgatcctggtgctgcaaaagtccttgagagtgtattcaacttcaatctttcaattcctcttaacttcttatttgattcttttggagggaagatattagttatccagggtatgaaagacccccttacaaaatctgaggcatttgtcaccatgctccgagaacattgcagcaaggttcaaatcagagagttaaatgcaggtcatgctccacatgatgaagttccagatgaagtaaataccatactatgtaaatgggtggagcagattgaagttaagccagccctggagaagaccaaggcaatatagaaacaaatcagcagtgcttccaccagtcatgagccctggtgaccatccgagaaatctttgggcgcgcatcagtgaggccataaaacaaaagcgctgattgggatcgcccaaccaacgcaccttatcagctttccccctctctcttggtttcaccaaatctgacggtgacgcgcccggtgcatggcctccggaagatgtcaagttgcaggatctcttataaaactggtgtacttctcgcgacatgctgagctctccactgaagataagcacaagatatccacaaagagaagacttgggatgtttaatggtggcaggagaagctacccgattcttggagggaggctccacttcgtaaagtttgagactgggaagctaaatgaatgtttggacttcatttcttccaaacaactacatcgtggtggaattgattcaccttcatggcgctctggggctcagtctgatgacattgtaattaaggcaacaggtggtggagcattcaagtatgcagatgtcttcaaggaaagattgggagtcagccttgaaaaggaagatgaaatggactgtcttgtggctggagcaaactttttgcttaaggctatacgtcatgaagcttttacacacatggatggccagaagcaatatgttcagattgatcagaatgacttgtttcccttccttcttgttaatgtcggatctggtgttagtataatcaaggttgatgggcatgggaaatttcagcgagtaagtgggacaaatgttggtggtggtacgtactggggattggggaggctaatgacgaagtgcaaaagttttgatgagttgctagagttgagccagcgtggagacaatagcaccatggacatgcttgtaggagacatatatggtggtctggactactccaagattggcctttcagcatctacaattgcctctagttttggaaagataatttcagaaaacaaggagctatcagattatagacctgaagatatatcgctctctctgttacggatgatttcatataatattggccagatttcctatcttaatgcacttcgttatggactcaagaggatattttttggtggattcttcatccgtggtcatgcctacactatggatacaatttcttttgcagtgcatttctggtcaaaaggagaggcacaagctatgtttctgcgccatgagggctttctaggagctcttggtgcatttatgagttatgagaagcatggtcttgatgacttaagggtacatcatttggttgaacgcttcccaatgggtgctccatatgttggtggaaagattcacgggccacctcttggagatctcaatgagaagatatcatggatggagaagtttgtgcaaaagggtactcagattatagcccctgtacctatgggagttccagctacgacaggtatgggaggctttgaaaggccgactgctaagggtgacatcttgcggtcagatgcaagtgcagcgctaaatgtcggtgttctccatcttgtacccacattggatgtatttccattgttggaagatccaaagacgtatgaaccaaacacaattgatcttgaccaggatgagttcaagtactggttcaagattttgtcagatcattcgccggacctcgtggacaaggcagttgctagtgaaggtgggactgatgatgccaaaagacggggtgatgcatttgcacatgccttttctgctcatctggcaagattgatggaggagccagctgcttatggaaagtttggtttggccaacctgttggaattgagagaagaatgtctgagggaatttcagttcgttgatgcatatattagcatcaagcaaagggaaaatgaagcttcactggctgttttaccggatcttctgatggaacttgatagtatgaatgaggaagctaggctgcttgcactaattgaaggtgtccttgctgcaaatatatttgattgggggtctcgagcttgtgtagaactttatcacaagggaactataatagaaatctatcgcatgagtcgcaagaagatgcaacgtccttggcggattgatgactttgacatgttcaaaaagagaatgcttactgataggaaggaccaatcatacaaaagagcactgctttttgttgataactcaggtgctgatgtggtccttggaatgcttcctttagctagggagcttttacgccatggaacagaggtagttcttgttgcaaattcgttgccggctttgaatgatgttaccgctaatgaacttccagaagttatagctgaagcctcaaagcactgtggtatccttcggaaagctgcagaagctggtggattgatagtcgatgcaatggctggcatccaagatgatctcaaggatgagacagtgtcagtgccactaatggttgttgagaatggatgcggcagtccatgtattgatttccggcaggttagctcagagcttgctgctgctgcaaaggatgcagatttgttaattttagaaggcatggggcgatcactgcataccaacctcaatgcccgttttaagtgtgatgctctaaagcttgctatggtcaagaatcagcgattggcagaaaaactcttcaatgggagtctatacgactgcatctgtaaatttgaaccagttccttaacaacatggtagcgactgcggaggcaactagcagaagcagcttgattggtgtagccggtgagacagaaacaatcatacagcgtacggcataaccgatccttccatgtacggggtacaagaaacgccctttcaataaaacaataacagtgttttctgaaacgatataataaaggctctaaaggctctttccagaaatattgaagggaaaagtttgagccagcaactggagttcgtgtttaagccagaactagttagcagcctaccatggcgaaagtaacatactcgaaccaatcttggaaagatcctgtcattcttgtgccatgctcgaatcaatccataaattgttcagacactgccgggacaatgccatcactcaaatgctaagaatcagttattagtcttcgcatgtgggcaactataataaatcaataaacgacacagtagtcacgagacatgtaaaacaagaggggatgtgaggcattttttcttcagcatacaccagttgatccactaatcaacaagccgtccatcgctccagaaactaccagctctaggcaaagttgatgtcatacgccttactgccgtccgccctgaagatgccaaagtggcgctcgaactcggggccgggcttgccgtcctcgtcgtacaagtcgaacaggaacacctccacgggcacgccgggccgcttcggcgtgccgacgccgcgcgccgccctctccacaatcttggcgttgtacgctgcggcgttctgcggggtggcggccgggtgccccgcggttggccacccggtctcggtcaccgcgaccggcacgccgtcgaacccctccttctccagcgcggccaccagcgcgtctaccgtggcgtcgaacaggttcgtgtacaccagcgcgccgtcctgcaccggcgccgcgcccgctccgaagagcgcgtacgcgagctgcacgttcgccgggtcgttcacgtggctgatgaaagggtaggcgttcaccatgaagggcgcaccggtgtcggccaggaaccgcagcatggggcggaggacggggagggaggcggcgtcgaacgcgccggcggagggcgggtacgaggcggccagcaccgaggaggcgtgcgcggaggagaccttgaccctgccgtccagccccagggtggcgagcgcggcgtgcaggttccgcatggccggcacgaggtgaggcgcatagaactggttgttgtacagcacctcgttgccgacggcgaggcaccggacgcgctcggcgggggcgtgggccaggaccgcggaccgcagccactgcgccgcgccctcgggccccgccgcggccaggaaggtgaggttctcgttgggcacgcccaccatgaggtcgatgcccgccgcggcgaaggccgggagcacggccgggtccggcaggaagagccgcgccttggtgatcccgttccgcttgagcagtgccgcggcggccgacggcggcgggaggttactgccaacgcggccgtggcagatgccgatcttgcccgcgtcaccggccgccgccgccactgccatcgacgcgacggcgaggaggacgtggccgagaagacacaaggctattctcgtggccattggtgaaggaaagaaggaaggaagaatgccacgctttggttgtgttgtcgccgttaaatagattctgctttggcaagaattgtatggttctggttgcttgtagttgtagttgtggcagatcgaggaagttaaggttgagacttgaggatgggctttgtggcagatccacgtgggtcactgcttggttatgatgcttatggtcttttgatgggctg

SEQ ID NO: 66471 - DNA, 2523 bp, Zea Mays
atgtgaaactgcaaattaatagttccaggacttacatgcatctctggacaagctcaaagatgctgatgttctctacccactctggaagaattaaaatgtttcctgaaagaaataacaccagaggacaattgggctcctctcaagagaatgcccgcaagatctatccttaaaaggacaatcagtcaaaggaagatcaaaagtaatgctacattaagcaccatcaatgaagaaaacatagatgatgctgccaccatggattctgttgcatcaggaaagaggattataaactcgaagtttgcatcagagaactcactggaagttagtggtggaacagaaattactttggatgctttggctgcttacctaaaatatcttgaaggcacaggaaatgctagttggcaagagttgcatgataaagtgcgtttagctgaaaccagatatggtgcttcattctacatcttgtttggtcctgcaattcaacttggagtcatatctaggaggaaagcttacactgagactatccaatatgaaaaagatcgcaatgcaggttttctatcaccatttgggtactcaacacctacagtaacatcagcagtagatgctatatgttcaatggagtggtattggctcttggcatcaaaatcccaagtatgcatcgaggggaaatattctataagaatttggagatggaagggttatcttgtacagtacacctttcttggcaacgaaggtccacctgttcttcttgtgcatggttttggagctttcctggagcattttcgtgacaatatagacaagattgctgctacgggccaccgagtttgggcaattactcttgttggctttgggaaatcagagaaaccaaatgtcaactattcagaacttttctggtctgaactactgagggattttattgttgaaattgtgagggagcctgttcatcttcttggcaactctattggaggttatctctgtgctattgctgctggtttatggccttctcttgcaaagtctctggttcttttaaactcagctggttcagttgttccaaattactccttcatcccactgagtgaagaaagacgaacatcatggatttccaggttgcaggcacagctccttttgctcttcttgaggtcaagggcagaaggcattcttaaagaatattatcctacaagaactgaacgggtggacaagccacttctggaccagattgtaagagcttcatatgatcctggtgctgcaaaagtccttgagagtgtattcaacttcaatctttcaattcctcttaacttcttatttgattcttttggagggaagatattagttatccaggtatggtatgaaagacccccttacaaaatctgaggcatttgtcaccatgctccgagaacattgcagcaaggttcaaatcagagagttaaatgcaggtcatgctccacatgatgaagttccagatgaagtaaataccatactatgtaaatgggtggagcagattgaagttaagccagccctggagaagaccaaggcaatataggtaacatttagaattatggacaccctatccattggttgattgtttaacatgatcttcaggagcaccttggtacattttcagtgacctaccaaaacttgtgtgattaaagcattgtgaattgttagccctatacaaattgtgattaaagtattgtgaattgttagctatatacaaaacttggtacattttctttcagctgatgttgagatgaacatacatgaaaccaaaaggacttttttttgggggtggggggtgggctagcatttgagcatgtttctgagtaagtttgcagagccgagatgcattctaagttgcacataacatgcctggttctgcttcttagggcttgtttagatagagggactagagctgatccctgttttatgggatgaaaagattgggtcagatccctgccaattcagacaagccctaaatgttgcttttgattaaaggctgaatctgaccggaaataaaccttggaccctcaacgacatataatctaaaatcacaatagttgcgcttgtgatcccattgtgcaagtaatgtttaatcatgctacttctatacttgcatccactgtactccactcctgcttgttttattgagacagcagcgtcacacaattattttttatctcacgccaactggtgctttatcatgtcatttatgtaattatgtgcaatcagcaatttcatgagagaagccaattgtaatcaccttgttgaactattctccagcaaggtgagctgctggaacttttagtgaaggatttgaactggatgtgttagtattcttttgttatagtgcagccgtgaccctctagagcttgatctgggttctaagtttaaacgtaggatcagagcagacccggacgcctggtttcaatatcagcacatgccatcataggctcacgacgacgaagaggtaaggcggttatttacgccgatattttttgagctgtcagtcatcacagtccctagtgcggc

SEQ ID NO: 66472 - DNA, 2985 bp, Zea Mays
cttactctgaatattttgcttgatatgggaattgcaagatcatttgtaacactgaagtgtgatatctaggaaagacgaacatcatggatttccaggttgcaggcacagctccttttgctcttcttgaggtcaagggcagaaggcattcttaaagaatattatcctacaagaactgaacgggtggacaagccacttctggaccagattgtaagagcttcatatgatcctggtgctgcaaaagtccttgagagtgtattcaacttcaatctttcaattcctcttaacttcttatttgattcttttggagggaagatattagttatccagggtatgaaagacccccttacaaaatctgaggcatttgtcaccatgctccgagaacattgcagcaaggttcaaatcagagagttaaatgcaggtcatgctccacatgatgaagttccagatgaagtaaataccatactatgtaaatgggtggagcagattgaagttaagccagccctggagaagaccaaggcaatatagaaacaaatcagcagtgcttccaccagtcatgagccctggtgaccatccgagaaatctttgggcgcgcatcagtgaggccataaaacaaaagcgctgattgggatcgcccaaccaacgcaccttatcagctttccccctctctcttggtttcaccaaatctgacggtgacgcgcccggtgcatggcctccggaagatgtcaagttgcaggtgaccgttccatccctcacaagctactgacctcctccccctcttccctctaatgatatcgatagataggctaggctgggccctgccctgaggtcacttgcacttcgtccacggccactgcttgaattgctcgccctagctacaagcctccacggaattgtttgtgatccagctgctttcgctcgtgtccagtcggtccggtcactcgtggatgttacaagctgctgctcatgggccaccagttgctgcactcttgctgtctgctttcaagccaagtgctctctccagtctcctcccttgtgctggatttcttggcgagttcttacgctagtgcctaggcgtagcgacgtgcgttgcgcaggtcgggcgacagaatcggggccgggctgtgaaacttctggagcttttccggtaggacaggagtgtaggacctctttcgaacaagctacgttttagaatttaaacacaaaatatatgttccatccgtcctaaaaaactggtctgtagtttataacaaaaatactatcaacaggtatggttatatataggaatatgtgaaaggttattttgaggaattcaataactcttatttaatatcattaatatttatacatttttaatagaaaatggtcaaaatgaagattgtttgacctatcatcggagtgagaagtataccatttttaggacggaaaagtatacactaagattgtctctagcggtttctctaaagggccccttgtcctatatctggagaaaattcttctcctctatacgctctagcagtgtcttctagatatagatgatgtttctctatcctctctctatatagattctctcttctatctacttattttatagcaaaactaaactatttataagatatttgagtgcatgataaatacatacatacataaatctagaacaaaatatgtttttaatattatttaacgtaaagaggacggaatatgaaggacgctggggagaaataagacatgagggaatgtttttagaggagactgtaaatgagatatatagatgaggaatatagatgatatggttggagatagtacaagactgtaaaattgctatgattttgacattggaactgttaatatattaaaccatttctatgtgaaactcttaaattccaaatagtcgctacacgctttgtttgagtacgcatacctatggctatgttggctttgcaaaaagaaacacaggcaagtatgcaggtcgaatatattagtactgttacacattgtcatgtcgtgtctgattacggcaacttattctaagagaggtcaaaaggagtgtcgcttgcgaagttggtacactagagactgatgttgtttcattgtttgtcctttgatgatggggtcgaagaatgatgcagcctagctttgttatctctgtcacggaagccaaattgttaatgccccaaagcctagcatacgcccgctgaatgttcagcagatgaaagtggcgtttggttagaaaattgactagaggtgtacaattattgggtgcatataggtcaagatgcttgctatattcctcttgtatctaaggacagtatgtaaggaaaatgcaattttaccactagcgcgtcgacgtcaaaatatatatatgttcgtgaggtttaattttatctatatattccactgattattagcaggtgattttttaattcagagggaaaaaagagacgtacacgcggaagctttttactctagtagttagagttagttgttagtactattgcagtgtagagtaatttttttaaaattgatcatagcgtggccatgtacaagattttttttgggtttactgttgtgacgcagcatgcatgcatgcacgcatttttcttccatgcaaaggcttcccacaaaacttctgttagacaggtcagtaggtcatcactcactcgatcagtttcggccaacacgtcgatttgctgcatatacacgtattggcgccacacgcgtggatggcattaatttgagcatcatggctgacaggtgaaacagtggagcaagctaacaataaaacctgcgtcagttgatgtgtatctggtcatcactgtttccgtcaactgaaatactactacgaatgagtatctagccactcattgacaaatgctgctaacgtgtactggcatgctcatgagatcacatcagcaatgttctggggtttggtcacttggagtctgccactgcaaataccttcattagtacgtattgtgcaacctgctg

SEQ ID NO: 66473 - DNA, 1331 bp, Zea Mays
agcctgcgtgcgtgcgtgcgtgccgggggcgcttttatactgtttcctcggagccttttccttttatcccccgcgatggcgacggagcacacagcggcccccaagggaaagagggagctggggggcagaccggggccatgaaaggttagtacttgctcggtctctctctacctcctacctgcccttgcactggacagggtaatactaacaaacaaacctagcccatggatgataacttagcctttagatcaagcattaaaagacgctaccaacgttttccaagcacgtcatgaattgttctgcgacttttaaatccaaccttatattagcttgcttgcttgtgttgtgttgtccacatggagaatccttgcacacgactaaccccagctatagggcctgctatgcacgaacgaactcccaaactgaagctgcattctgaactaaggctcagatttgaacctctacgctctacgtgcgagttgcgagttgcgactgctatatatgtatgacctgtatggattctacgtgaccaaacgctttcaccttttgctagcttgccctgctcttcagggtaactgaagctgcgacacaaaagtttgcgtagcatcaggtaggcgccccaccatgcacgatcaaaagctacagtttggtgtgccacaaggctttggcactcccgtttcccacgggggacggggacgaggggggcttacctctcagttgcgtccttacgcaaggattccatcaaccattccgtcagccagccgcaaaaccacctcgcgcaggacacacggcacgagtccccgtcccaggcacaccaaactgcagccacgcgccgcgactgcacgctcgtgcaggtgcgcacacgcctgcagccggccccagacgccaccatgcctttgcgcacaaggtgctcaacccagtcccgggccccctctcgcttcccataggcagataggctgcacgcacccattcgtccacagtaaaaagagatcggacgacgagagtcggcagtgactccgtcagtgcatggcggggctcaccggctcactcaccttcgatcgcctgccgaccacagcccacaggtgcacttacctagctctggcccgatccacgtcggcacgggcagcctgccgcctggttccttcctccctaggcgcaactttatttgcccgatcgacgggacggctgatgagggaaggaaggaagaaacatgagttagacagggtctcatgtcagccataccgtcggtcgccttcctcccatctgtagttactaattgacttgctgtaaccggcaagccaaccacccaagcttggacacccgttgttgtt

SEQ ID NO: 66474 - DNA, 4955 bp, Zea Mays
ccacaacaccactctattcacttagctttaattcgtatcgatttatactgtttcaataatattctttgtctctatagatacaacagtataaataatcgactttaatctaaagcaactagcaagacattgacatacagtgtttttttttactgcaacacacggcatatgatatgagcgaagcagcgtttcaccgagagccacaagcccgcaagcaacaaatccgcgctccctgattcgccatcctcttcaccaagttaggcgacgactggcgcccatcgtcgattccccgttctccgtttccgtctcgcgtgtttggtgctttcgatctccccaaggcggcaggcggcagcgccgtacgcgttgcgggaagattttggttggtggattgttggtggcggctccactccgtcccagtgcactggtccaatccaaatggcggccaataatagcgacccgatccaggatcagctgggggaaggaggggcgggcgtgaggcacgaggctgaggaggaggaggtgggggaggagacgtcttctgccgcggcgcaggcgaccgcgacgacgatgctgccccggtcgagctcgcggccgcagctggacctcagcggcgcggcgatccacgggacgctggaggaccgtaaccctaccatccttttgcccaaccagtccgacgacatctctcacctcgcccttgacatcggcggatctcttataaaactggtgtacttctcgcgacatgctgagctctccactgaagataagcacaagatatccacaaagagaagacttgggatgtttaatggtggcaggagaagctacccgattcttggagggaggctccacttcgtaaagtttgagactgggaagctaaatgaatgtttggacttcatttcttccaaacaactacatcgtggtggaattgattcaccttcatggcgctctggggctcagtctgatgacattgtaattaaggcaacaggtggtggagcattcaagtatgcagatgtcttcaaggaaagattgggagtcagccttgaaaaggaagatgaaatggactgtcttgtggctggagcaaactttttgcttaaggctatacgtcatgaagcttttacacacatggatggccagaagcaatatgttcagattgatcagaatgacttgtttcccttccttcttgttaatgtcggatctggtgttagtataatcaaggttgatgggcatgggaaatttcagcgagtaagtgggacaaatgttggtggtggtacgtactggggattggggaggctaatgacgaagtgcaaaagttttgatgagttgctagagttgagccagcgtggagacaatagcaccatggacatgcttgtaggagacatatatggtggtctggactactccaagattggcctttcagcatctacaattgcctctagttttggaaagataatttcagaaaacaaggagctatcagattatagacctgaagatatatcgctctctctgttacggatgatttcatataatattggccagatttcctatcttaatgcacttcgttatggactcaagaggatattttttggtggattcttcatccgtggtcatgcctacactatggatacaatttcttttgcagtgcatttctggtcaaaaggagaggcacaagctatgtttctgcgccatgagggctttctaggagctcttggtgcatttatgagttatgagaagcatggtcttgatgacttaagggtacatcatttggttgaacgcttcccaatgggtgctccatatgttggtggaaagattcacgggccacctcttggagatctcaatgagaagatatcatggatggagaagtttgtgcaaaagggtactcagattatagcccctgtacctatgggagttccagctacgacaggtatgggaggctttgaaaggccgactgctaagggtgacatcttgcggtcagatgcaagtgcagcgctaaatgtcggtgttctccatcttgtacccacattggatgtatttccattgttggaagatccaaagacgtatgaaccaaacacaattgatcttgaccaggatgagttcaagtactggttcaagattttgtcagatcattcgccggacctcgtggacaaggcagttgctagtgaaggtgggactgatgatgccaaaagacggggtgatgcatttgcacatgccttttctgctcatctggcaagattgatggaggagccagctgcttatggaaagtttggtttggccaacctgttggaattgagagaagaatgtctgagggaatttcagttcgttgatgcatatattagcatcaagcaaagggaaaatgaagcttcactggctgttttaccggatcttctgatggaacttgatagtatgaatgaggaagctaggctgcttgcactaattgaaggtgtccttgctgcaaatatatttgattgggggtctcgagcttgtgtagaactttatcacaagggaactataatagaaatctatcgcatgagtcgcaagaagatgcaacgtccttggcggattgatgactttgacatgttcaaaaagagaatgcttactgataggaaggaccaatcatacaaaagagcactgctttttgttgataactcaggtgctgatgtggtccttggaatgcttcctttagctagggagcttttacgccatggaacagaggtagttcttgttgcaaattcgttgccggctttgaatgatgttaccgctaatgaacttccagaagttatagctgaagcctcaaagcactgtggtatccttcggaaagctgcagaagctggtggattgatagtcgatgcaatggctggcatccaagatgatctcaaggatgagacagtgtcagtgccactaatggttgttgagaatggatgcggcagtccatgtattgatttccggcaggttagctcagagcttgctgctgctgcaaaggatgcagatttgttaattttagaaggcatggggcgatcactgcataccaacctcaatgcccgttttaagtgtgatgctctaaagcttgctatggtcaagaatcagcgattggcagaaaaactcttcaatgggagtctatacgactgcatctgtaaatttgaaccagttccttaacaacatggtagcgactgcggaggcaactagcagaagcagcttgattggtgtagccggtgagacagaaacaatcatacagcgtacggcataaccgatccttccatgtacggggtacaagaaacgccctttcaataaaacaataacagtgttttctgaaacgatataataaaggctctaaaggctctttccagaaatattgaagggaaaagtttgagccagcaactggagttcgtgtttaagccagaactagttagcagcctaccatggcgaaagtaacatactcgaaccaatcttggaaagatcctgtcattcttgtgccatgctcgaatcaatccataaattgttcagacactgccgggacaatgccatcactcaaatgctaagaatcagttattagtcttcgcatgtgggcaactataataaatcaataaacgacacagtagtcacgagacatgtaaaacaagaggggatgtgaggcattttttcttcagcatacaccagttgatccactaatcaacaagccgtccatcgctccagaaactaccagctctaggcaaagttgatgtcatacgccttactgccgtccgccctgaagatgccaaagtggcgctcgaactcggggccgggcttgccgtcctcgtcgtacaagtcgaacaggaacacctccacgggcacgccgggccgcttcggcgtgccgacgccgcgcgccgccctctccacaatcttggcgttgtacgctgcggcgttctgcggggtggcggccgggtgccccgcggttggccacccggtctcggtcaccgcgaccggcacgccgtcgaacccctccttctccagcgcggccaccagcgcgtctaccgtggcgtcgaacaggttcgtgtacaccagcgcgccgtcctgcaccggcgccgcgcccgctccgaagagcgcgtacgcgagctgcacgttcgccgggtcgttcacgtggctgatgaaagggtaggcgttcaccatgaagggcgcaccggtgtcggccaggaaccgcagcatggggcggaggacggggagggaggcggcgtcgaacgcgccggcggagggcgggtacgaggcggccagcaccgaggaggcgtgcgcggaggagaccttgaccctgccgtccagccccagggtggcgagcgcggcgtgcaggttccgcatggccggcacgaggtgaggcgcatagaactggttgttgtacagcacctcgttgccgacggcgaggcaccggacgcgctcggcgggggcgtgggccaggaccgcggaccgcagccactgcgccgcgccctcgggccccgccgcggccaggaaggtgaggttctcgttgggcacgcccaccatgaggtcgatgcccgccgcggcgaaggccgggagcacggccgggtccggcaggaagagccgcgccttggtgatcccgttccgcttgagcagtgccgcggcggccgacggcggcgggaggttactgccaacgcggccgtggcagatgccgatcttgcccgcgtcaccggccgccgccgccactgccatcgacgcgacggcgaggaggacgtggccgagaagacacaaggctattctcgtggccattggtgaaggaaagaaggaaggaagaatgccacgctttggttgtgttgtcgccgttaaatagattctgctttggcaagaattgtatggttctggttgcttgtagttgtagttgtggcagatcgaggaagttaaggttgagacttgaggatgggctttgtggcagatccacgtgggtcactgcttggttatgatgcttatggtcttttgatgggctg

SEQ ID NO: 66475 - DNA, 2882 bp, Zea Mays
caataatattctttgtctctatagatacaacagtataaataatcgactttaatctaaagcaactagcaagacattgacatacagtgtttttttttactgcaacacacggcatatgatatgagcgaaggtaatcagtttttagtgtttctgcagcgtgggcccaatgaatcccaagtccaaacatcagtcagattttgacatttccgcagcgtttcaccgagagccacaagcccgcaagcaacaaatccgcgctccctgattcgccatcctcttcaccaagttaggcgacgactggcgcccatcgtcgattccccgttctccgtttccgtctcgcgtgtttggtgctttcgatctccccaaggcggcaggcggcagcgccgtacgcgttgcgggaagattttggttggtggattgttggtggcggctccactccgtcccagtgcactggtccaatccaaatggcggccaataatagcgacccgatccaggatcagctgggggaaggaggggcgggcgtgaggcacgaggctgaggaggaggaggtgggggaggagacgtcttctgccgcggcgcaggcgaccgcgacgacgatgctgccccggtcgagctcgcggccgcagctggacctcagcggcgcggcgatccacgggacgctggaggaccgtaaccctaccatccttttgcccaaccagtccgacgacatctctcacctcgcccttgacatcggcggatctcttataaaactggtgtacttctcgcgacatgctgagctctccactgaagataagcacaagatatccacaaagagaagacttgggatgtttaatggtggcaggagaagctacccgattcttggagggaggctccacttcgtaaagtttgagactgggaagctaaatgaatgtttggacttcatttcttccaaacaactacatcgtggtggaattgattcaccttcatggcgctctggggctcagtctgatgacattgtaattaaggcaacaggtggtggagcattcaagtatgcagatgtcttcaaggaaagattgggagtcagccttgaaaaggaagatgaaatggactgtcttgtggctggagcaaactttttgcttaaggctatacgtcatgaagcttttacacacatggatggccagaagcaatatgttcagattgatcagaatgacttgtttcccttccttcttgttaatgtcggatctggtgttagtataatcaaggttgatgggcatgggaaatttcagcgagtaagtgggacaaatgttggtggtggtacgtactggggattggggaggctaatgacgaagtgcaaaagttttgatgagttgctagagttgagccagcgtggagacaatagcaccatggacatgcttgtaggagacatatatggtggtctggactactccaagattggcctttcagcatctacaattgcctctagttttggaaagataatttcagaaaacaaggagctatcagattatagacctgaagatatatcgctctctctgttacggatgatttcatataatattggccagatttcctatcttaatgcacttcgttatggactcaagaggatattttttggtggattcttcatccgtggtcatgcctacactatggatacaatttcttttgcagtgcatttctggtcaaaaggagaggcacaagctatgtttctgcgccatgagggctttctaggagctcttggtgcatttatgagttatgagaagcatggtcttgatgacttaagggtacatcatttggttgaacgcttcccaatgggtgctccatatgttggtggaaagattcacgggccacctcttggagatctcaatgagaagatatcatggatggagaagtttgtgcaaaagggtactcagattatagcccctgtacctatgggagttccagctacgacaggtatgggaggctttgaaaggccgactgctaagggtgacatcttgcggtcagatgcaagtgcagcgctaaatgtcggtgttctccatcttgtacccacattggatgtatttccattgttggaagatccaaagacgtatgaaccaaacacaattgatcttgaccaggatgagttcaagtactggttcaagattttgtcagatcattcgccggacctcgtggacaaggcagttgctagtgaaggtgggactgatgatgccaaaagacggggtgatgcatttgcacatgccttttctgctcatctggcaagattgatggaggagccagctgcttatggaaagtttggtttggccaacctgttggaattgagagaagaatgtctgagggaatttcagttcgttgatgcatatattagcatcaagcaaagggaaaatgaagcttcactggctgttttaccggatcttctgatggaacttgatagtatgaatgaggaagctaggctgcttgcactaattgaaggtgtccttgctgcaaatatatttgattgggggtctcgagcttgtgtagaactttatcacaagggaactataatagaaatctatcgcatgagtcgcaagaagatgcaacgtccttggcggattgatgactttgacatgttcaaaaagagaatgcttactgataggaaggaccaatcatacaaaagagcactgctttttgttgataactcaggtgctgatgtggtccttggaatgcttcctttagctagggagcttttacgccatggaacagagggagttcagacccttgcgcaacttcttattggaagggccaataagggtcaagcttacttcctcccaccagtcatcaaaggaagtagaattgagactaggagtgagatgctgcaaaccgacagctttcaggatattaaaccaaacttcccttga

SEQ ID NO: 66476 - DNA, 4821 bp, Zea Mays
ccaaacatcagtcagattttgacatttccgcagcgtttcaccgagagccacaagcccgcaagcaacaaatccgcgctccctgattcgccatcctcttcaccaagttaggcgacgactggcgcccatcgtcgattccccgttctccgtttccgtctcgcgtgtttggtgctttcgatctccccaaggcggcaggcggcagcgccgtacgcgttgcgggaagattttggttggtggattgttggtggcggctccactccgtcccagtgcactggtccaatccaaatggcggccaataatagcgacccgatccaggatcagctgggggaaggaggggcgggcgtgaggcacgaggctgaggaggaggaggtgggggaggagacgtcttctgccgcggcgcaggcgaccgcgacgacgatgctgccccggtcgagctcgcggccgcagctggacctcagcggcgcggcgatccacgggacgctggaggaccgtaaccctaccatccttttgcccaaccagtccgacgacatctctcacctcgcccttgacatcggcggatctcttataaaactggtgtacttctcgcgacatgctgagctctccactgaagataagcacaagatatccacaaagagaagacttgggatgtttaatggtggcaggagaagctacccgattcttggagggaggctccacttcgtaaagtttgagactgggaagctaaatgaatgtttggacttcatttcttccaaacaactacatcgtggtggaattgattcaccttcatggcgctctggggctcagtctgatgacattgtaattaaggcaacaggtggtggagcattcaagtatgcagatgtcttcaaggaaagattgggagtcagccttgaaaaggaagatgaaatggactgtcttgtggctggagcaaactttttgcttaaggctatacgtcatgaagcttttacacacatggatggccagaagcaatatgttcagattgatcagaatgacttgtttcccttccttcttgttaatgtcggatctggtgttagtataatcaaggttgatgggcatgggaaatttcagcgagtaagtgggacaaatgttggtggtggtacgtactggggattggggaggctaatgacgaagtgcaaaagttttgatgagttgctagagttgagccagcgtggagacaatagcaccatggacatgcttgtaggagacatatatggtggtctggactactccaagattggcctttcagcatctacaattgcctctagttttggaaagataatttcagaaaacaaggagctatcagattatagacctgaagatatatcgctctctctgttacggatgatttcatataatattggccagatttcctatcttaatgcacttcgttatggactcaagaggatattttttggtggattcttcatccgtggtcatgcctacactatggatacaatttcttttgcagtgcatttctggtcaaaaggagaggcacaagctatgtttctgcgccatgagggctttctaggagctcttggtgcatttatgagttatgagaagcatggtcttgatgacttaagggtacatcatttggttgaacgcttcccaatgggtgctccatatgttggtggaaagattcacgggccacctcttggagatctcaatgagaagatatcatggatggagaagtttgtgcaaaagggtactcagattatagcccctgtacctatgggagttccagctacgacaggtatgggaggctttgaaaggccgactgctaagggtgacatcttgcggtcagatgcaagtgcagcgctaaatgtcggtgttctccatcttgtacccacattggatgtatttccattgttggaagatccaaagacgtatgaaccaaacacaattgatcttgaccaggatgagttcaagtactggttcaagattttgtcagatcattcgccggacctcgtggacaaggcagttgctagtgaaggtgggactgatgatgccaaaagacggggtgatgcatttgcacatgccttttctgctcatctggcaagattgatggaggagccagctgcttatggaaagtttggtttggccaacctgttggaattgagagaagaatgtctgagggaatttcagttcgttgatgcatatattagcatcaagcaaagggaaaatgaagcttcactggctgttttaccggatcttctgatggaacttgatagtatgaatgaggaagctaggctgcttgcactaattgaaggtgtccttgctgcaaatatatttgattgggggtctcgagcttgtgtagaactttatcacaagggaactataatagaaatctatcgcatgagtcgcaagaagatgcaacgtccttggcggattgatgactttgacatgttcaaaaagagaatgcttactgataggaaggaccaatcatacaaaagagcactgctttttgttgataactcaggtgctgatgtggtccttggaatgcttcctttagctagggagcttttacgccatggaacagaggtagttcttgttgcaaattcgttgccggctttgaatgatgttaccgctaatgaacttccagaagttatagctgaagcctcaaagcactgtggtatccttcggaaagctgcagaagctggtggattgatagtcgatgcaatggctggcatccaagatgatctcaaggatgagacagtgtcagtgccactaatggttgttgagaatggatgcggcagtccatgtattgatttccggcaggttagctcagagcttgctgctgctgcaaaggatgcagatttgttaattttagaaggcatggggcgatcactgcataccaacctcaatgcccgttttaagtgtgatgctctaaagcttgctatggtcaagaatcagcgattggcagaaaaactcttcaatgggagtctatacgactgcatctgtaaatttgaaccagttccttaacaacatggtagcgactgcggaggttgtgtcatcttgcagcaactagcagaagcagcttgattggtgtagccggtgagacagaaacaatcatacagcgtacggcataaccgatccttccatgtacggggtacaagaaacgccctttcaataaaacaataacagtgttttctgaaacgatataataaaggctctaaaggctctttccagaaatattgaagggaaaagtttgagccagcaactggagttcgtgtttaagccagaactagttagcagcctaccatggcgaaagtaacatactcgaaccaatcttggaaagatcctgtcattcttgtgccatgctcgaatcaatccataaattgttcagacactgccgggacaatgccatcactcaaatgctaagaatcagttattagtcttcgcatgtgggcaactataataaatcaataaacgacacagtagtcacgagacatgtaaaacaagaggggatgtgaggcattttttcttcagcatacaccagttgatccactaatcaacaagccgtccatcgctccagaaactaccagctctaggcaaagttgatgtcatacgccttactgccgtccgccctgaagatgccaaagtggcgctcgaactcggggccgggcttgccgtcctcgtcgtacaagtcgaacaggaacacctccacgggcacgccgggccgcttcggcgtgccgacgccgcgcgccgccctctccacaatcttggcgttgtacgctgcggcgttctgcggggtggcggccgggtgccccgcggttggccacccggtctcggtcaccgcgaccggcacgccgtcgaacccctccttctccagcgcggccaccagcgcgtctaccgtggcgtcgaacaggttcgtgtacaccagcgcgccgtcctgcaccggcgccgcgcccgctccgaagagcgcgtacgcgagctgcacgttcgccgggtcgttcacgtggctgatgaaagggtaggcgttcaccatgaagggcgcaccggtgtcggccaggaaccgcagcatggggcggaggacggggagggaggcggcgtcgaacgcgccggcggagggcgggtacgaggcggccagcaccgaggaggcgtgcgcggaggagaccttgaccctgccgtccagccccagggtggcgagcgcggcgtgcaggttccgcatggccggcacgaggtgaggcgcatagaactggttgttgtacagcacctcgttgccgacggcgaggcaccggacgcgctcggcgggggcgtgggccaggaccgcggaccgcagccactgcgccgcgccctcgggccccgccgcggccaggaaggtgaggttctcgttgggcacgcccaccatgaggtcgatgcccgccgcggcgaaggccgggagcacggccgggtccggcaggaagagccgcgccttggtgatcccgttccgcttgagcagtgccgcggcggccgacggcggcgggaggttactgccaacgcggccgtggcagatgccgatcttgcccgcgtcaccggccgccgccgccactgccatcgacgcgacggcgaggaggacgtggccgagaagacacaaggctattctcgtggccattggtgaaggaaagaaggaaggaagaatgccacgctttggttgtgttgtcgccgttaaatagattctgctttggcaagaattgtatggttctggttgcttgtagttgtagttgtggcagatcgaggaagttaaggttgagacttgaggatgggctttgtggcagatccacgtgggtcactgcttggttatgatgcttatggtcttttgatgggctg

SEQ ID NO: 66477 - DNA, 4808 bp, Zea Mays
gtcagattttgacatttccgcagcgtttcaccgagagccacaagcccgcaagcaacaaatccgcgctccctgattcgccatcctcttcaccaagttaggcgacgactggcgcccatcgtcgattccccgttctccgtttccgtctcgcgtgtttggtgctttcgatctccccaaggcggcaggcggcagcgccgtacgcgttgcgggaagattttggttggtggattgttggtggcggctccactccgtcccagtgcactggtccaatccaaatggcggccaataatagcgacccgatccaggatcagctgggggaaggaggggcgggcgtgaggcacgaggctgaggaggaggaggtgggggaggagacgtcttctgccgcggcgcaggcgaccgcgacgacgatgctgccccggtcgagctcgcggccgcagctggacctcagcggcgcggcgatccacgggacgctggaggaccgtaaccctaccatccttttgcccaaccagtccgacgacatctctcacctcgcccttgacatcggcggatctcttataaaactggtgtacttctcgcgacatgctgagctctccactgaagataagcacaagatatccacaaagagaagacttgggatgtttaatggtggcaggagaagctacccgattcttggagggaggctccacttcgtaaagtttgagactgggaagctaaatgaatgtttggacttcatttcttccaaacaactacatcgtggtggaattgattcaccttcatggcgctctggggctcagtctgatgacattgtaattaaggcaacaggtggtggagcattcaagtatgcagatgtcttcaaggaaagattgggagtcagccttgaaaaggaagatgaaatggactgtcttgtggctggagcaaactttttgcttaaggctatacgtcatgaagcttttacacacatggatggccagaagcaatatgttcagattgatcagaatgacttgtttcccttccttcttgttaatgtcggatctggtgttagtataatcaaggttgatgggcatgggaaatttcagcgagtaagtgggacaaatgttggtggtggtacgtactggggattggggaggctaatgacgaagtgcaaaagttttgatgagttgctagagttgagccagcgtggagacaatagcaccatggacatgcttgtaggagacatatatggtggtctggactactccaagattggcctttcagcatctacaattgcctctagttttggaaagataatttcagaaaacaaggagctatcagattatagacctgaagatatatcgctctctctgttacggatgatttcatataatattggccagatttcctatcttaatgcacttcgttatggactcaagaggatattttttggtggattcttcatccgtggtcatgcctacactatggatacaatttcttttgcagtgcatttctggtcaaaaggagaggcacaagctatgtttctgcgccatgagggctttctaggagctcttggtgcatttatgagttatgagaagcatggtcttgatgacttaagggtacatcatttggttgaacgcttcccaatgggtgctccatatgttggtggaaagattcacgggccacctcttggagatctcaatgagaagatatcatggatggagaagtttgtgcaaaagggtactcagattatagcccctgtacctatgggagttccagctacgacaggtatgggaggctttgaaaggccgactgctaagggtgacatcttgcggtcagatgcaagtgcagcgctaaatgtcggtgttctccatcttgtacccacattggatgtatttccattgttggaagatccaaagacgtatgaaccaaacacaattgatcttgaccaggatgagttcaagtactggttcaagattttgtcagatcattcgccggacctcgtggacaaggcagttgctagtgaaggtgggactgatgatgccaaaagacggggtgatgcatttgcacatgccttttctgctcatctggcaagattgatggaggagccagctgcttatggaaagtttggtttggccaacctgttggaattgagagaagaatgtctgagggaatttcagttcgttgatgcatatattagcatcaagcaaagggaaaatgaagcttcactggctgttttaccggatcttctgatggaacttgatagtatgaatgaggaagctaggctgcttgcactaattgaaggtgtccttgctgcaaatatatttgattgggggtctcgagcttgtgtagaactttatcacaagggaactataatagaaatctatcgcatgagtcgcaagaagatgcaacgtccttggcggattgatgactttgacatgttcaaaaagagaatgcttactgataggaaggaccaatcatacaaaagagcactgctttttgttgataactcaggtgctgatgtggtccttggaatgcttcctttagctagggagcttttacgccatggaacagaggtagttcttgttgcaaattcgttgccggctttgaatgatgttaccgctaatgaacttccagaagttatagctgaagcctcaaagcactgtggtatccttcggaaagctgcagaagctggtggattgatagtcgatgcaatggctggcatccaagatgatctcaaggatgagacagtgtcagtgccactaatggttgttgagaatggatgcggcagtccatgtattgatttccggcaggttagctcagagcttgctgctgctgcaaaggatgcagatttgttaattttagaaggcatggggcgatcactgcataccaacctcaatgcccgttttaagtgtgatgctctaaagcttttatgcgcagcttgctatggtcaagaatcagcgattggcagaaaaactcttcaatgggagtctatacgactgcatctgtaaatttgaaccagttccttaacaacatggtagcgactgcggaggcaactagcagaagcagcttgattggtgtagccggtgagacagaaacaatcatacagcgtacggcataaccgatccttccatgtacggggtacaagaaacgccctttcaataaaacaataacagtgttttctgaaacgatataataaaggctctaaaggctctttccagaaatattgaagggaaaagtttgagccagcaactggagttcgtgtttaagccagaactagttagcagcctaccatggcgaaagtaacatactcgaaccaatcttggaaagatcctgtcattcttgtgccatgctcgaatcaatccataaattgttcagacactgccgggacaatgccatcactcaaatgctaagaatcagttattagtcttcgcatgtgggcaactataataaatcaataaacgacacagtagtcacgagacatgtaaaacaagaggggatgtgaggcattttttcttcagcatacaccagttgatccactaatcaacaagccgtccatcgctccagaaactaccagctctaggcaaagttgatgtcatacgccttactgccgtccgccctgaagatgccaaagtggcgctcgaactcggggccgggcttgccgtcctcgtcgtacaagtcgaacaggaacacctccacgggcacgccgggccgcttcggcgtgccgacgccgcgcgccgccctctccacaatcttggcgttgtacgctgcggcgttctgcggggtggcggccgggtgccccgcggttggccacccggtctcggtcaccgcgaccggcacgccgtcgaacccctccttctccagcgcggccaccagcgcgtctaccgtggcgtcgaacaggttcgtgtacaccagcgcgccgtcctgcaccggcgccgcgcccgctccgaagagcgcgtacgcgagctgcacgttcgccgggtcgttcacgtggctgatgaaagggtaggcgttcaccatgaagggcgcaccggtgtcggccaggaaccgcagcatggggcggaggacggggagggaggcggcgtcgaacgcgccggcggagggcgggtacgaggcggccagcaccgaggaggcgtgcgcggaggagaccttgaccctgccgtccagccccagggtggcgagcgcggcgtgcaggttccgcatggccggcacgaggtgaggcgcatagaactggttgttgtacagcacctcgttgccgacggcgaggcaccggacgcgctcggcgggggcgtgggccaggaccgcggaccgcagccactgcgccgcgccctcgggccccgccgcggccaggaaggtgaggttctcgttgggcacgcccaccatgaggtcgatgcccgccgcggcgaaggccgggagcacggccgggtccggcaggaagagccgcgccttggtgatcccgttccgcttgagcagtgccgcggcggccgacggcggcgggaggttactgccaacgcggccgtggcagatgccgatcttgcccgcgtcaccggccgccgccgccactgccatcgacgcgacggcgaggaggacgtggccgagaagacacaaggctattctcgtggccattggtgaaggaaagaaggaaggaagaatgccacgctttggttgtgttgtcgccgttaaatagattctgctttggcaagaattgtatggttctggttgcttgtagttgtagttgtggcagatcgaggaagttaaggttgagacttgaggatgggctttgtggcagatccacgtgggtcactgcttggttatgatgcttatggtcttttgatgggctg

SEQ ID NO: 66478 - DNA, 4749 bp, Zea Mays
gtcagattttgacatttccgcagcgtttcaccgagagccacaagcccgcaagcaacaaatccgcgctccctgattcgccatcctcttcaccaagttaggcgacgactggcgcccatcgtcgattccccgttctccgtttccgtctcgcgtgtttggtgctttcgatctccccaaggcggcaggcggcagcgccgtacgcgttgcgggaagattttggttggtggattgttggtggcggctccactccgtcccagtgcactggtccaatccaaatggcggccaataatagcgacccgatccaggatcagctgggggaaggaggggcgggcgtgaggcacgaggctgaggaggaggaggtgggggaggagacgtcttctgccgcggcgcaggcgaccgcgacgacgatgctgccccggtcgagctcgcggccgcagctggacctcagcggcgcggcgatccacgggacgctggaggaccgtaaccctaccatccttttgcccaaccagtccgacgacatctctcacctcgcccttgacatcggcggatctcttataaaactggtgtacttctcgcgacatgctgagctctccactgaagataagcacaagatatccacaaagagaagacttgggatgtttaatggtggcaggagaagctacccgattcttggagggaggctccacttcgtaaagtttgagactgggaagctaaatgaatgtttggacttcatttcttccaaacaactacatcgtggtggaattgattcaccttcatggcgctctggggctcagtctgatgacattgtaattaaggcaacaggtggtggagcattcaagtatgcagatgtcttcaaggaaagattgggagtcagccttgaaaaggaagatgaaatggactgtcttgtggctggagcaaactttttgcttaaggctatacgtcatgaagcttttacacacatggatggccagaagcaatatgttcagattgatcagaatgacttgtttcccttccttcttgttaatgtcggatctggtgttagtataatcaaggttgatgggcatgggaaatttcagcgagtaagtgggacaaatgttggtggtggtacgtactggggattggggaggctaatgacgaagtgcaaaagttttgatgagttgctagagttgagccagcgtggagacaatagcaccatggacatgcttgtaggagacatatatggtggtctggactactccaagattggcctttcagcatctacaattgcctctagttttggaaagataatttcagaaaacaaggagctatcagattatagacctgaagatatatcgctctctctgttacggatgatttcatataatattggccagatttcctatcttaatgcacttcgttatggactcaagaggatattttttggtggattcttcatccgtggtcatgcctacactatggatacaatttcttttgcagtgcatttctggtcaaaaggagaggcacaagctatgtttctgcgccatgagggctttctaggagctcttggtgcatttatgagttatgagaagcatggtcttgatgacttaagggtacatcatttggttgaacgcttcccaatgggtgctccatatgttggtggaaagattcacgggccacctcttggagatctcaatgagaagatatcatggatggagaagtttgtgcaaaagggtactcagattatagcccctgtacctatgggagttccagctacgacaggtatgggaggctttgaaaggccgactgctaagggtgacatcttgcggtcagatgcaagtgcagcgctaaatgtcggtgttctccatcttgtacccacattggatgtatttccattgttggaagatccaaagacgtatgaaccaaacacaattgatcttgaccaggatgagttcaagtactggttcaagattttgtcagatcattcgccggacctcgtggacaaggcagttgctagtgaaggtgggactgatgatgccaaaagacggggtgatgcatttgcacatgccttttctgctcatctggcaagattgatggaggagccagctgcttatggaaagtttggtttggccaacctgttggaattgagagaagaatgtctgagggaatttcagttcgttgatgcatatattagcatcaagcaaagggaaaatgaagcttcactggctgttttaccggatcttctgatggaacttgatagtatgaatgaggaagctaggctgcttgcactaattgaaggtgtccttgctgcaaatatatttgattgggggtctcgagcttgtgtagaactttatcacaagggaactataatagaaatctatcgcatgagtcgcaagaagatgcaacgtccttggcggattgatgactttgacatgttcaaaaagagaatgcttactgataggaaggaccaatcatacaaaagagcactgctttttgttgataactcaggtagttcttgttgcaaattcgttgccggctttgaatgatgttaccgctaatgaacttccagaagttatagctgaagcctcaaagcactgtggtatccttcggaaagctgcagaagctggtggattgatagtcgatgcaatggctggcatccaagatgatctcaaggatgagacagtgtcagtgccactaatggttgttgagaatggatgcggcagtccatgtattgatttccggcaggttagctcagagcttgctgctgctgcaaaggatgcagatttgttaattttagaaggcatggggcgatcactgcataccaacctcaatgcccgttttaagtgtgatgctctaaagcttgctatggtcaagaatcagcgattggcagaaaaactcttcaatgggagtctatacgactgcatctgtaaatttgaaccagttccttaacaacatggtagcgactgcggaggttgtgtcatcttgcagcaactagcagaagcagcttgattggtgtagccggtgagacagaaacaatcatacagcgtacggcataaccgatccttccatgtacggggtacaagaaacgccctttcaataaaacaataacagtgttttctgaaacgatataataaaggctctaaaggctctttccagaaatattgaagggaaaagtttgagccagcaactggagttcgtgtttaagccagaactagttagcagcctaccatggcgaaagtaacatactcgaaccaatcttggaaagatcctgtcattcttgtgccatgctcgaatcaatccataaattgttcagacactgccgggacaatgccatcactcaaatgctaagaatcagttattagtcttcgcatgtgggcaactataataaatcaataaacgacacagtagtcacgagacatgtaaaacaagaggggatgtgaggcattttttcttcagcatacaccagttgatccactaatcaacaagccgtccatcgctccagaaactaccagctctaggcaaagttgatgtcatacgccttactgccgtccgccctgaagatgccaaagtggcgctcgaactcggggccgggcttgccgtcctcgtcgtacaagtcgaacaggaacacctccacgggcacgccgggccgcttcggcgtgccgacgccgcgcgccgccctctccacaatcttggcgttgtacgctgcggcgttctgcggggtggcggccgggtgccccgcggttggccacccggtctcggtcaccgcgaccggcacgccgtcgaacccctccttctccagcgcggccaccagcgcgtctaccgtggcgtcgaacaggttcgtgtacaccagcgcgccgtcctgcaccggcgccgcgcccgctccgaagagcgcgtacgcgagctgcacgttcgccgggtcgttcacgtggctgatgaaagggtaggcgttcaccatgaagggcgcaccggtgtcggccaggaaccgcagcatggggcggaggacggggagggaggcggcgtcgaacgcgccggcggagggcgggtacgaggcggccagcaccgaggaggcgtgcgcggaggagaccttgaccctgccgtccagccccagggtggcgagcgcggcgtgcaggttccgcatggccggcacgaggtgaggcgcatagaactggttgttgtacagcacctcgttgccgacggcgaggcaccggacgcgctcggcgggggcgtgggccaggaccgcggaccgcagccactgcgccgcgccctcgggccccgccgcggccaggaaggtgaggttctcgttgggcacgcccaccatgaggtcgatgcccgccgcggcgaaggccgggagcacggccgggtccggcaggaagagccgcgccttggtgatcccgttccgcttgagcagtgccgcggcggccgacggcggcgggaggttactgccaacgcggccgtggcagatgccgatcttgcccgcgtcaccggccgccgccgccactgccatcgacgcgacggcgaggaggacgtggccgagaagacacaaggctattctcgtggccattggtgaaggaaagaaggaaggaagaatgccacgctttggttgtgttgtcgccgttaaatagattctgctttggcaagaattgtatggttctggttgcttgtagttgtagttgtggcagatcgaggaagttaaggttgagacttgaggatgggctttgtggcagatccacgtgggtcactgcttggttatgatgcttatggtcttttgatgggctg

SEQ ID NO: 66479 - DNA, 1841 bp, Zea Mays
gattcgccatcctcttcaccaagttaggcgacgactggcgcccatcgtcgattccccgttctccgtttccgtctcgcgtgtttggtgctttcgatctccccaaggcggcaggcggcagcgccgtacgcgttgcgggaagattttggttggtggattgttggtggcggctccactccgtcccagtgcactggtccaatccaaatggcggccaataatagcgacccgatccaggatcagctgggggaaggaggggcgggcgtgaggcacgaggctgaggaggaggaggtgggggaggagacgtcttctgccgcggcgcaggcgaccgcgacgacgatgctgccccggtcgagctcgcggccgcagctggacctcagcggcgcggcgatccacgggacgctggaggaccgtaaccctaccatccttttgcccaaccagtccgacgacatctctcacctcgcccttgacatcggcggatctcttataaaactggtgtacttctcgcgacatgctgagctctccactgaagataagcacaagatatccacaaagagaagacttgggatgtttaatggtggcaggagaagctacccgattcttggagggaggctccacttcgtaaagtttgagactgggaagctaaatgaatgtttggacttcatttcttccaaacaactacatcgtggtggaattgattcaccttcatggcgctctggggctcagtctgatgacattgtaattaaggcaacaggtggtggagcattcaagtatgcagatgtcttcaaggaaagattgggagtcagccttgaaaaggaagatgaaatggactgtcttgtggctggagcaaactttttgcttaaggctatacgtcatgaagcttttacacacatggatggccagaagcaatatgttcagattgatcagaatgacttgtttcccttccttcttgttaatgtcggatctggtgttagtataatcaaggttgatgggcatgggaaatttcagcgagtaagtgggacaaatgttggtggtggtacgtactggggattggggaggctaatgacgaagtgcaaaagttttgatgagttgctagagttgagccagcgtggagacaatagcaccatggacatgcttgtaggagacatatatggtggtctggactactccaagattggcctttcagcatctacaattgcctctagttttggaaagataatttcagaaaacaaggagctatcagattatagacctgaagatatatcgctctctctgttacggatgatttcatataatattggccagatttcctatcttaatgcacttcgttatggactcaagaggatattttttggtggattcttcatccgtggtcatgcctacactatggatacaatttcttttgcagtgcatttctggagaggcacaagctatgtttctgcgccatgagggctttctaggagctcttggtgcatttatgagttatgagaagcatggtcttgatgacttaagggtacatcatttggttgaacgcttcccaatgggtgctccatatgttggtggaaagattcacgggccacctcttggagatctcaatgagaaggcaagagcatcttctcctgatcatgcttaagtttatggctatgatggtttggttatttttctaagtatgacatcctctactaacacaaatttgatgctcgataaattacacctttgaaaactcaaaatgagtgttagatgtcactcaatctaactatacgacggacatgcacaagaaccaaaaggatcaaccaaaattttacctatattgaaaagactgctagaattttgtcgataaccttttg

SEQ ID NO: 66480 - DNA, 4074 bp, Zea Mays
cttacctcggtttatcccgtcactatgaattgattcaccttcatggcgctctggggctcagtctgatgacattgtaattaaggcaacaggtggtggagcattcaagtatgcagatgtcttcaaggaaagattgggagtcagccttgaaaaggaagatgaaatggactgtcttgtggctggagcaaactttttgcttaaggctatacgtcatgaagcttttacacacatggatggccagaagcaatatgttcagattgatcagaatgacttgtttcccttccttcttgttaatgtcggatctggtgttagtataatcaaggttgatgggcatgggaaatttcagcgagtaagtgggacaaatgttggtggtggtacgtactggggattggggaggctaatgacgaagtgcaaaagttttgatgagttgctagagttgagccagcgtggagacaatagcaccatggacatgcttgtaggagacatatatggtggtctggactactccaagattggcctttcagcatctacaattgcctctagttttggaaagataatttcagaaaacaaggagctatcagattatagacctgaagatatatcgctctctctgttacggatgatttcatataatattggccagatttcctatcttaatgcacttcgttatggactcaagaggatattttttggtggattcttcatccgtggtcatgcctacactatggatacaatttcttttgcagtgcatttctggtcaaaaggagaggcacaagctatgtttctgcgccatgagggctttctaggagctcttggtgcatttatgagttatgagaagcatggtcttgatgacttaagggtacatcatttggttgaacgcttcccaatgggtgctccatatgttggtggaaagattcacgggccacctcttggagatctcaatgagaagatatcatggatggagaagtttgtgcaaaagggtactcagattatagcccctgtacctatgggagttccagctacgacaggtatgggaggctttgaaaggccgactgctaagggtgacatcttgcggtcagatgcaagtgcagcgctaaatgtcggtgttctccatcttgtacccacattggatgtatttccattgttggaagatccaaagacgtatgaaccaaacacaattgatcttgaccaggatgagttcaagtactggttcaagattttgtcagatcattcgccggacctcgtggacaagttgctagtgaaggtgggactgatgatgccaaaagacggggtgatgcatttgcacatgccttttctgctcatctggcaagattgatggaggagccagctgcttatggaaagtttggtttggccaacctgttggaattgagagaagaatgtctgagggaatttcagttcgttgatgcatatattagcatcaagcaaagggaaaatgaagcttcactggctgttttaccggatcttctgatggaacttgatagtatgaatgaggaagctaggctgcttgcactaattgaaggtgtccttgctgcaaatatatttgattgggggtctcgagcttgtgtagaactttatcacaagggaactataatagaaatctatcgcatgagtcgcaagaagatgcaacgtccttggcggattgatgactttgacatgttcaaaaagagaatgcttactgataggaaggaccaatcatacaaaagagcactgctttttgttgataactcaggtgctgatgtggtccttggaatgcttcctttagctagggagcttttacgccatggaacagaggtagttcttgttgcaaattcgttgccggctttgaatgatgttaccgctaatgaacttccagaagttatagctgaagcctcaaagcactgtggtatccttcggaaagctgcagaagctggtggattgatagtcgatgcaatggctggcatccaagatgatctcaaggatgagacagtgtcagtgccactaatggttgttgagaatggatgcggcagtccatgtattgatttccggcaggttagctcagagcttgctgctgctgcaaaggatgcagatttgttaattttagaaggcatggggcgatcactgcataccaacctcaatgcccgttttaagtgtgatgctctaaagcttttatgcgcagcttgctatggtcaagaatcagcgattggcagaaaaactcttcaatgggagtctatacgactgcatctgtaaatttgaaccagttccttaacaacatggtagcgactgcggaggcaactagcagaagcagcttgattggtgtagccggtgagacagaaacaatcatacagcgtacggcataaccgatccttccatgtacggggtacaagaaacgccctttcaataaaacaataacagtgttttctgaaacgatataataaaggctctaaaggctctttccagaaatattgaagggaaaagtttgagccagcaactggagttcgtgtttaagccagaactagttagcagcctaccatggcgaaagtaacatactcgaaccaatcttggaaagatcctgtcattcttgtgccatgctcgaatcaatccataaattgttcagacactgccgggacaatgccatcactcaaatgctaagaatcagttattagtcttcgcatgtgggcaactataataaatcaataaacgacacagtagtcacgagacatgtaaaacaagaggggatgtgaggcattttttcttcagcatacaccagttgatccactaatcaacaagccgtccatcgctccagaaactaccagctctaggcaaagttgatgtcatacgccttactgccgtccgccctgaagatgccaaagtggcgctcgaactcggggccgggcttgccgtcctcgtcgtacaagtcgaacaggaacacctccacgggcacgccgggccgcttcggcgtgccgacgccgcgcgccgccctctccacaatcttggcgttgtacgctgcggcgttctgcggggtggcggccgggtgccccgcggttggccacccggtctcggtcaccgcgaccggcacgccgtcgaacccctccttctccagcgcggccaccagcgcgtctaccgtggcgtcgaacaggttcgtgtacaccagcgcgccgtcctgcaccggcgccgcgcccgctccgaagagcgcgtacgcgagctgcacgttcgccgggtcgttcacgtggctgatgaaagggtaggcgttcaccatgaagggcgcaccggtgtcggccaggaaccgcagcatggggcggaggacggggagggaggcggcgtcgaacgcgccggcggagggcgggtacgaggcggccagcaccgaggaggcgtgcgcggaggagaccttgaccctgccgtccagccccagggtggcgagcgcggcgtgcaggttccgcatggccggcacgaggtgaggcgcatagaactggttgttgtacagcacctcgttgccgacggcgaggcaccggacgcgctcggcgggggcgtgggccaggaccgcggaccgcagccactgcgccgcgccctcgggccccgccgcggccaggaaggtgaggttctcgttgggcacgcccaccatgaggtcgatgcccgccgcggcgaaggccgggagcacggccgggtccggcaggaagagccgcgccttggtgatcccgttccgcttgagcagtgccgcggcggccgacggcggcgggaggttactgccaacgcggccgtggcagatgccgatcttgcccgcgtcaccggccgccgccgccactgccatcgacgcgacggcgaggaggacgtggccgagaagacacaaggctattctcgtggccattggtgaaggaaagaaggaaggaagaatgccacgctttggttgtgttgtcgccgttaaatagattctgctttggcaagaattgtatggttctggttgcttgtagttgtagttgtggcagatcgaggaagttaaggttgagacttgaggatgggctttgtggcagatccacgtgggtcactgcttggttatgatgcttatggtcttttgatgggctg

SEQ ID NO: 66481 - DNA, 2053 bp, Zea Mays
ccgtgccgacgccgctcgctgcctcgctcctccgtgcattcaatcagactcggtgatcttccagccgcccgccaagaacaaaccgacgcggcgtggctgacactcgtcgacccatcccaatagaaaaatcggaaccgtccaagcccgcctcctataaactaaccaacgaccaaccttcctcagcccggcccgggtggcagaggcagtccccagattcattctcttctcgctgcacgccgcactgcgccagcgtcagcatgggcggctgcggcctcggacgcggccgccgcaccgcctgcctgctgctgctcctcccgccgcttctcctgttcgccgtggccgatgccgccgcctcggggaaggagaagcagggggtgtccggtaagctgcggttccggcgggagagcgggacgttcaaggtggtgcaggtggcggacatgcactacgcggacggccggagcacggcctgcgaggacgtgctcccttcccaggtggccggctgcaccgacctcaacaccaccgccttcctctaccgcgtcttccgcgccgaggaccccgacctcgtcgtcttcacaggtgataacatctatggtgctgattcaactgatgcagccaagtctatggatgcagcaattgctccagccattgacatgaaactgccttgggctgctgtgatcgggaaccatgaccaagagggtacgctatcgcgtgagggtgtgatgcgtcaccttgtgggcatgaaaaacacccttgcaagcttcaatccggaaggaattgaaattgatggttacggaaattacaatttggaagtttccggggttgaagggacatccatggatgaaaaatcagtgctcaacctgtatttcctggacagcggtgactattccactgtgccgtcaatcaatggttatggttggatcaaggcttcacagcaagtctggttccaacaaacatcttcaagtctacaggcaaagtatatgaataagaacccgaaacagaaggaaccagcacctggccttgtatttttccacattccactaccagagttcagcagttttacggcatccaatttcacaggagtaaagcaggagggtatcagctcagcatcaattaactctgggttctttgcctccatggtggaggctggagatgtgagagctgcctttgtgggacatgatcacattaatgacttctgtgggaagctcagtggtattcagctctgctatgctggtggatttggttaccatgcctatgggaaagctgggtggtcaagaagagcgagggtactgtctgtgcaacttgagaaaacagacagcggtgaatggcgaggagtcaagtccatcaagacatggaagaggcttgatgataaacatctgagcacaattgactctgaggttctctggaacagaggctctaatgggaggcgcgggaaaaatcctgatggtagttaacttttgatgcagacaggaatggtgctccataagggatctctacatcggtgtgtattgttggatggccagtttactatagaatcagaaatatgcagaagtgtgtacatgggggagaaggtcaaatacagacacatacacgcagactcgtatatagtgtggtcaaaggaaaacgagaatgcaatgtcattgtagtctcatctctcgtgtattgttaaactcggtcggaaagagaaagactgtccttccaatattatattaaaaaaagaccgaaacatggtttctgtcaagaaaatccttgaaccctagtgcccattactagcaggctgtcaccatgtaacccaggagcaggcaaagcacaacaagtggatttttttaaccatgttagaaattcgtcctcgagggaatcgaatcgaagacctagaggggttactcggaagttttaaccattacactagaggccctttcacttatctcatgtattgttactagcaccgtctagctgcaactgaaacctcagagctgccacaatatcatttttcatatatactgaatgttcttatgcaaatttgcaatcaattaagaagctgataagtaaaaacaat

SEQ ID NO: 66482 - DNA, 2065 bp, Zea Mays
ccgtgccgacgccgctcgctgcctcgctcctccgtgcattcaatcagactcggtgatcttccagccgcccgccaagaacaaaccgacgcggcgtggctgacactcgtcgacccatcccaatagaaaaatcggaaccgtccaagcccgcctcctataaactaaccaacgaccaaccttcctcagcccggcccgggtggcagaggcagtccccagattcattctcttctcgctgcacgccgcactgcgccagcgtcagcatgggcggctgcggcctcggacgcggccgccgcaccgcctgcctgctgctgctcctcccgccgcttctcctgttcgccgtggccgatgccgccgcctcggggaaggagaagcagggggtgtccggtaagctgcggttccggcgggagagcgggacgttcaaggtggtgcaggtggcggacatgcactacgcggacggccggagcacggcctgcgaggacgtgctcccttcccaggtggccggctgcaccgacctcaacaccaccgccttcctctaccgcgtcttccgcgccgaggaccccgacctcgtcgtcttcacaggtgataacatctatggtgctgattcaactgatgcagccaagtctatggatgcagcaattgctccagccattgacatgaaactgccttgggctgctgtgatcgggaaccatgaccaagagggtacgctatcgcgtgagggtgtgatgcgtcaccttgtgggcatgaaaaacacccttgcaagcttcaatccggaaggaattgaaattgatggttacggaaattacaatttggaagtttccggggttgaagggacatccatggatgaaaaatcagtgctcaacctgtatttcctggacagcggtgactattccactgtgccgtcaatcaatggttatggttggatcaaggcttcacagcaagtctggttccaacaaacatcttcaagtctacaggcaaagtatatgaataagaacccgaaacagaaggaaccagcacctggccttgtatttttccacattccactaccagagttcagcagttttacggcatccaatttcacaggagtaaagcaggagggtatcagctcagcatcaattaactctgggttctttgcctccatggtggaggctggagatgtgagagctgcctttgtgggacatgatcacattaatgacttctgtgggaagctcagtggtattcagctctgctatgctggtggatttggttaccatgcctatgggaaagctgggtggtcaagaagagcgagggtactgtctgtgcaacttgagaaaacagacagcggtgaatggcgaggagtcaagtccatcaagacatggaagaggcttgatgataaacatctgagcacaattgactctgaggttctctggaacagaggctctaatgggaggcgcgggaaaaatcctgatggtagttaacttttgatgcagacaggaatggtgctccataagggatctctacatcggtgtgtattgttggatggccagtttactatagaatcagaaatatgcagaagtgtgtacatgggggagaaggtcaaatacagacacatacacgcaggtggtctcatagactcgtatatagtgtggtcaaaggaaaacgagaatgcaatgtcattgtagtctcatctctcgtgtattgttaaactcggtcggaaagagaaagactgtccttccaatattatattaaaaaaagaccgaaacatggtttctgtcaagaaaatccttgaaccctagtgcccattactagcaggctgtcaccatgtaacccaggagcaggcaaagcacaacaagtggatttttttaaccatgttagaaattcgtcctcgagggaatcgaatcgaagacctagaggggttactcggaagttttaaccattacactagaggccctttcacttatctcatgtattgttactagcaccgtctagctgcaactgaaacctcagagctgccacaatatcatttttcatatatactgaatgttcttatgcaaatttgcaatcaattaagaagctgataagtaaaaacaat

SEQ ID NO: 66483 - DNA, 1065 bp, Zea Mays
caacaacaccgcaaactcaactttgaccaggctaaaacaatactcgctgactatccctcaagtctcaggatttaactgcattatttctagctgttagactgtactgcagctttgtcatggagtatgacatccatacaattctggacactgctacacttgtagccacactgtttgttatttatatgatacggttcaaactgaggtcaacttatatggtggataaggataactttgcgttgtattatgtggtgttaccgtgtgctggactggcactacttattcatccgtcaacatctcataacattgtgaaccggatctcctgggggttctgtgtttacttggaagctgtttcagtgcttccgcagttacacttgatgcaaaatactaagattgttgaaccctttacagctcactatgtatttgcattgggagttgcaaggtttcttagctgcgcccactgggttctacaggttttggacacgcgtggtcgtctgttgacagctcttggctatggtttgtggccgtctatggtgcttttatcagaaatcgtgcagacattcatccttgcagatttctgctactactatgtgaagagtcttgttggtgggcaactggtgctacggcttccctcaggggtggtgtaagaagtgcagaagagatactctgaataacagttatgctctagtgcccaacctgggagccttcttttagctgatgatgttgcaagtaatgactatgtatgacaaaattgctgcaagggttctcttaaaacatagtttgtcattgagacttcatagctgcgccgtttcttgatgcccaatctccgagtactagcttcctgtgactgtcgtggtggtcttagaatcaggtggttagtgatctcattggattatataattctataatgctttcatatgaaacagattgatcttgatgtatcagcagaactagccacgtgaaaatggttggaccaaggtcatcaggtttgtatttacttaacattgggattatcagtaggggttcctttcgggtccactactaatctttagtactagttttctttta

SEQ ID NO: 66484 - DNA, 2174 bp, Zea Mays
agccatatagacatctatacccccacccacccaaccttcggcagtccccatcctctcctgtgggcgctccctctccccggcccccaaatcaccgcgcctccctcgccacgcctcacagggccggttgcgtaggagaaaggagaaaggaaggaggggaggcggtcgtcgggcgagatgagcgactccttctgccccgactgcaagaagcatacggaggtggcgttcgaccactcggcgggggacatggtgtgcaccgagtgcggcctcgtcctcgaggcgcactccgtcgacgagacctccgagtggcgcaccttcgcgaacgagtccaacgacaacgaccccgtccgtgtcggtggccccaccaacccgctcctcaccgatggcggcctctccaccgtcatcgccaagcccaacggtgcgcagggcgacttcctatcctcctccctcggcaggtggcagaaccgcggctccaaccccgaccgatccctcatcctcgccttccgcaccatcgccaacatggctgaccggtccgcctccccccttctccgctgctcccttttctcacgctataggtccgatccgattcgatcaaattatgtggcttgctagtagtttgcgctgatttgtaggatatggcgtgtgcttgttacgttcatgcgtgcggcgcgctgcctgattttacgcctggggctatggaatgtgaccagggttggttatgactgcgggtctagatttggaacatctgattgatatattgcgtctagtatttttgcatgttcttgcagggtttggtgctggatgatttgtcccttggatctactgaaatcccgttctttataatatgggaacccatctaatatccttaatttcttcgggaactgtcaaaggttaggtttttatttgggcacacaataggtttggctagagtagttgtgctgcttgcacctatgcatcattattcactatgttatgcaaaattagcattggggatgttaatcgtgatgtcgtgtattacctataccttaggcacatgatttgttagtgaaggatcattctagattgcggcatatattatagatacagtaaaaatatatcgccgcatatttctgatttgggcgaatagatgcacagtactcaagttgataactaattttattttagctgtgtcgactttaatttcataacatctgtcgtgtgctgatacaaactatggcttctgcaggctaggtcttgtggctactattaaggaccgagcaaatgaaatctacaagaaagttgaagatctcaaatctatcaggggaagaaatcaagatgccatattagctgcatgcctatatattgcttgtagacaagaagatcggcctagaactgtgaaagaaatatgttcagttgctaatggggccacaaagaaagaaattggcagagcaaaagaatttatagtgaaacaactggaagttgagatggggcaatctatggagatgggaaccattcacgctggaaattttctgagacgtttctgctcaactcttgggatgaacaatcaagctgttagggcagcccaggatgcagttaagcactcggaggagcttgatataaggaggagccctatctcaattgcagccgctgtcatttatatgataacccaactctcagaggacaagaagccacttaaagatatatccttggctactggtgtagcagaaggcaccatcagaaattcgtacaaggatctgtatccttatgcctcaaggctcatcccgaatacctacgccaaggaagaagacctgaagaatctctgcacaccttaggaggcttacttttttccccctttctgttactacataattcggaattagatttgtcaaagaggagtgagtgaagttgttcctcgttgtgactgtaccgggcaaggtgtcgtccccgccgtgcttaactttatgatggaatttcttttcagagcacctaccacctgaagatttgtgggatacgtatactcacttcggaaagaatgtagatagcaagcagttggacaagcacaagattttaatttaaaacatgattttgttctccatcttctgaagaaaccatcacttgtccatctttattctaagtgcccttggattccaagagaattgttagttggctaaaaattgggtaaaattatgatatgtttg

SEQ ID NO: 66485 - DNA, 4740 bp, Zea Mays
agccatatagacatctatacccccacccacccaaccttcggcagtccccatcctctcctgtgggcgctccctctccccggcccccaaatcaccgcgcctccctcgccacgcctcacagggccggttgcgtaggagaaaggagaaaggaaggaggggaggcggtcgtcgggcgagatgagcgactccttctgccccgactgcaagaagcatacggaggtggcgttcgaccactcggcgggggacatggtgtgcaccgagtgcggcctcgtcctcgaggcgcactccgtcgacgagacctccgagtggcgcaccttcgcgaacgagtccaacgacaacgaccccgtccgtgtcggtggccccaccaacccgctcctcaccgatggcggcctctccaccgtcatcgccaagcccaacggtgcgcagggcgacttcctatcctcctccctcggcaggtggcagaaccgcggctccaaccccgaccgatccctcatcctcgccttccgcaccatcgccaacatggctgaccggctaggtcttgtggctactattaaggtaacgaatctgatggttactgtccattatttatagctgactgtcaacatttttttatatagttgcttttttgagtgttagctgtgagcctgtgatctaccattttagtcgctgataggttttgtctactgtcctaataattggtcaattgtaaaatactgaaacctattttgatctcttttttgtatgctcccttgataggaatatctgtagttcatcagatattcagattacatgtttctttctcgaacatgcaagagttgcatatcattatattaagaagaaaaaaaggggaagaacccttacaacacacacccgagcacacttggttgattacatgttattttttaaaacttaagtgagtgtatatgctaaggctctgttcggattggaggaattccaaagggaaattgtatggatcacaaaacggaggaaaggaaatcagggtgcacgtttggaatactggaagagacaattcctttctcttggaatcctgtgggtagatgttcgttccacagcgctgttcgcctaaatggcagtcagcctgtttatactgtttgaaagctacccagtacacatgggtttattttttcatttaattgatcgtttacccgtttaggtggccgtttggcccaaataatggctaaacagcaagtgaccgactgtttatcgtttaggataaccaaggttattaaggcgttaaggcgagacatggtgaccgacccccttccaaacgcctaggcgagttaggcgtgcggcgaggcgacgccatatgagcatcacctaggcgaggatatgcaaaaaaaatcctaacaatctaacacttgcaatagcaaaattggtaaggttagagaatacaatacaagcctttgattgatgagggtgctgttgcagtgttgctggcttgctatatacaaaataggagatgagggagagcaggcgagcagcagcagaggaactgatgaagaggaagagcagaggaaaccaccgtgcatcggatggagcagacagcagaggaaagcaccgggccactggatggagcagcttgccgccgcgcgccggatggaggaggtcggccgccggatggaggaggctagggctggaaacgagccgagccaggctcggctcggctcggtgcagctcggaggtggaaaggctcgagcctggctcggctcgctggtacaacgagctgccaaaataggctcgactcggctcgggtacggctcgcgagcctgtgagcctattcgtattgggctttaggcggttgctttgcttgtgggcctattcgtattgggctgctccgctgatgcctgctggtgcgcgccgtgggcttggctcgcgagccggctcgcgaccttgcgcgagctggcttggctcggctcgggattttttcgagcttgcgaaaccgcctcggctcgccggtagctcgcgagccggctcgagcctgcacgagccgcaacgagctcgagccggctcaccgagcccgagctttttttccagccctagaggaggcggcggcgcggcgcaccggatggaggagaggcggcacgccggatggaggagaggcggcgcgcaggatggaggcaacgagccaacggcgcactgcaggaaaggccccaccctctcttccttctctttccctcccactctctcggtttggcgcgctgcaaaaccctaaaccctagcatgtacgcacgcaaagccgcgaaccctaaaaacctcccgcgtaagcacctttgtgtggcgtctgtggcgaaattggacgccatggcgacgcctaggcacgccaggcaacgccatacgcatccaaggcgcggcgggatcgacgcctagaacctaggctcgcctggacgcctaggcgacgccataataaccttgaggataacactacttcaaaggaaaccaaacatcaactcctatctctggtcttcttttcctttggggatgtctgagacagtgcgtacgaagaagggaggcgagaacaaggaagcaccgaatcacacctcaagaagttgtctgccccatcctgatcttgtctcttccactgctgacgctgatctaggaaccaccggaagtaggtaaatggggagtcagaacgaagagttgaaagccaaggccgagattagattggggacaatgttttcaagtcagacgacttgctgatcgttctggctgatcgactagggcgattaattgtgattggtccaaaccgacttggacgattaatgggacaacttgaaaacattgattggggaaagtgcataatatgccttttttactatgtagtgaatagataaggagcattggaagaaaatatttaatgaaatgagtaaagatgttgccttttatgttggtttctcatgttatttagactgatttaataatatataaatttcaatcaaacaataagtcaataatactccactttgtgtattatgatacctgtgttccaaacacctgcttcttcagctttcctgtctttttctattcctctattttgcacgctcattcctttcctattcgtacattttctacagttctgcgttccacattcctaggttccaaacataccctaatggtgtgtttggtttgtggagtcaccatatgcttcatgaggtgatgcatcataagttcttcccataaattttggtggactcaatccactcatcatgtatatactaattattagcttatgaggaataagatgatgatggatcaactcattctattccataaaccaaataaaaaagtgaggagtgagaagaagatgaaccacttcattcttcaaaccaaacacaccctaagtgattcatgttatgtatatgtatggtagccttttttctctttttgaagatagatgacatgtttaacacttccctaaatactcattgagtcattgaacatattgttgcttcctgtgttcgatagaacaataacttatagcttaattcagctaaattactgatatgtagtactccctccattaaaaaatggtaatcatattagaccagagaaaaagtcattcaaaatagattttgaccatcaatttctcttgtaatgtaaagtcgacggtctaaaaataaataccatcttataggcacttttaacacaaatctattgatgcagattatatgctctaaactttaatggaatttgattagttggtcaaaatttatgaagtttgactttttctctggccaaatatgattaccacttctgaacggagggagtaattatttgtttttgtctttactcttcaaggaccgagcaaatgaaatctacaagaaagttgaagatctcaaatctatcaggggaagaaatcaagatgccatattagctgcatgcctatatattgcttgtagacaagaagatcggcctagaactgtgaaagaaatatgttcagttgctaatggggccacaaagaaagaaattggcagagcaaaagaatttatagtgaaacaactggaagttgagatggggcaatctatggagatgggaaccattcacgctggaaattttctgagacgtttctgctcaactcttgggatgaacaatcaagctgttagggcagcccaggatgcagttaagcactcggaggagcttgatataaggaggagccctatctcaattgcagccgctgtcatttatatgataacccaactctcagaggacaagaagccacttaaagatatatccttggctactggtgtagcagaaggcaccatcagaaattcgtacaaggatctgtatccttatgcctcaaggctcatcccgaatacctacgccaaggaagaagacctgaagaatctctgcacaccttaggaggcttacttttttccccctttctgttactacataattcggaattagatttgtcaaagaggagtgagtgaagttgttcctcgttgtgactgtaccgggcaaggtgtcgtccccgccgtgcttaactttatgatggaatttcttttcagagcacctaccacctgaagatttgtgggatacgtatactcacttcggaaagaatgtagatagcaagcagttggacaagcacaagattttaatttaaaacatgattttgttctccatcttctgaagaaaccatcacttgtccatctttattctaagtgcccttggattccaagagaattgttagttggctaaaaattgggtaaaattatgatatgtttg

SEQ ID NO: 66486 - DNA, 2429 bp, Zea Mays
agccatatagacatctatacccccacccacccaaccttcggcagtccccatcctctcctgtgggcgctccctctccccggcccccaaatcaccgcgcctccctcgccacgcctcacagggccggttgcgtaggagaaaggagaaaggaaggaggggaggcggtcgtcgggcgagatgagcgactccttctgccccgactgcaagaagcatacggaggtggcgttcgaccactcggcgggggacatggtgtgcaccgagtgcggcctcgtcctcgaggcgcactccgtcgacgagacctccgagtggcgcaccttcgcgaacgagtccaacgacaacgaccccgtccgtgtcggtggccccaccaacccgctcctcaccgatggcggcctctccaccgtcatcgccaagcccaacggtgcgcagggcgacttcctatcctcctccctcggcaggtggcagaaccgcggctccaaccccgaccgatccctcatcctcgccttccgcaccatcgccaacatggctgaccggtccgcctccccccttctccgctgctcccttttctcacgctataggtccgatccgattcgatcaaattatgtggcttgctagtagtttgcgctgatttgtaggatatggcgtgtgcttgttacgttcatgcgtgcggcgcgctgcctgattttacgcctggggctatggaatgtgaccagggttggttatgactgcgggtctagatttggaacatctgattgatatattgcgtctagtatttttgcatgttcttgcagggtttggtgctggatgatttgtcccttggatctactgaaatcccgttctttataatatgggaacccatctaatatccttaatttcttcgggaactgtcaaaggttaggtttttatttgggcacacaataggtttggctagagtagttgtgctgcttgcacctatgcatcattattcactatgttatgcaaaattagcattggggatgttaatcgtgatgtcgtgtattacctataccttaggcacatgatttgttagtgaaggatcattctagattgcggcatatattatagatacagtaaaaatatatcgccgcatatttctgatttgggcgaatagatgcacagtactcaagttgataactaattttattttagctgtgtcgactttaatttcataacatctgtcgtgtgctgatacaaactatggcttctgcaggctaggtcttgtggctactattaagaccagagaaaaagtcattcaaaatagattttgaccatcaatttctcttgtaatgtaaagtcgacggtctaaaaataaataccatcttataggcacttttaacacaaatctattgatgcagattatatgctctaaactttaatggaatttgattagttggtcaaaatttatgaagtttgactttttctctggccaaatatgattaccacttctgaacggagggagtaattatttgtttttgtctttactcttcaaggaccgagcaaatgaaatctacaagaaagttgaagatctcaaatctatcaggggaagaaatcaagatgccatattagctgcatgcctatatattgcttgtagacaagaagatcggcctagaactgtgaaagaaatatgttcagttgctaatggggccacaaagaaagaaattggcagagcaaaagaatttatagtgaaacaactggaagttgagatggggcaatctatggagatgggaaccattcacgctggaaattttctgagacgtttctgctcaactcttgggatgaacaatcaagctgttagggcagcccaggatgcagttaagcactcggaggagcttgatataaggaggagccctatctcaattgcagccgctgtcatttatatgataacccaactctcagaggacaagaagccacttaaagatatatccttggctactggtgtagcagaaggcaccatcagaaattcgtacaaggatctgtatccttatgcctcaaggctcatcccgaatacctacgccaaggaagaagacctgaagaatctctgcacaccttaggaggcttacttttttccccctttctgttactacataattcggaattagatttgtcaaagaggagtgagtgaagttgttcctcgttgtgactgtaccgggcaaggtgtcgtccccgccgtgcttaactttatgatggaatttcttttcagagcacctaccacctgaagatttgtgggatacgtatactcacttcggaaagaatgtagatagcaagcagttggacaagcacaagattttaatttaaaacatgattttgttctccatcttctgaagaaaccatcacttgtccatctttattctaagtgcccttggattccaagagaattgttagttggctaaaaattgggtaaaattatgatatgtttg

SEQ ID NO: 66487 - DNA, 4095 bp, Zea Mays
agccatatagacatctatacccccacccacccaaccttcggcagtccccatcctctcctgtgggcgctccctctccccggcccccaaatcaccgcgcctccctcgccacgcctcacagggccggttgcgtaggagaaaggagaaaggaaggaggggaggcggtcgtcgggcgagatgagcgactccttctgccccgactgcaagaagcatacggaggtggcgttcgaccactcggcgggggacatggtgtgcaccgagtgcggcctcgtcctcgaggcgcactccgtcgacgagacctccgagtggcgcaccttcgcgaacgagtccaacgacaacgaccccgtccgtgtcggtggccccaccaacccgctcctcaccgatggcggcctctccaccgtcatcgccaagcccaacggtgcgcagggcgacttcctatcctcctccctcggcaggtggcagaaccgcggctccaaccccgaccgatccctcatcctcgccttccgcaccatcgccaacatggctgaccggctaggtcttgtggctactattaaggtaacgaatctgatggttactgtccattatttatagctgactgtcaacatttttttatatagttgcttttttgagtgttagctgtgagcctgtgatctaccattttagtcgctgataggttttgtctactgtcctaataattggtcaattgtaaaatactgaaacctattttgatctcttttttgtatgctcccttgataggaatatctgtagttcatcagatattcagattacatgtttctttctcgaacatgcaagagttgcatatcattatattaagaagaaaaaaaggggaagaacccttacaacacacacccgagcacacttggttgattacatgttattttttaaaacttaagtgagtgtatatgctaaggctctgttcggattggaggaattccaaagggaaattgtatggatcacaaaacggaggaaaggaaatcagggtgcacgtttggaatactggaagagacaattcctttctcttggaatcctgtgggtagatgttcgttccacagcgctgttcgcctaaatggcagtcagcctgtttatactgtttgaaagctacccagtacacatgggtttattttttcatttaattgatcgtttacccgtttaggtggccgtttggcccaaataatggctaaacagcaagtgaccgactgtttatcgtttaggataaccaaggttattaaggcgttaaggcgagacatggtgaccgacccccttccaaacgcctaggcgagttaggcgtgcggcgaggcgacgccatatgagcatcacctaggcgaggatatgcaaaaaaaatcctaacaatctaacacttgcaatagcaaaattggtaaggttagagaatacaatacaagcctttgattgatgagggtgctgttgcagtgttgctggcttgctatatacaaaataggagatgagggagagcaggcgagcagcagcagaggaactgatgaagaggaagagcagaggaaaccaccgtgcatcggatggagcagacagcagaggaaagcaccgggccactggatggagcagcttgccgccgcgcgccggatggaggaggtcggccgccggatggaggaggctagggctggaaacgagccgagccaggctcggctcggctcggtgcagctcggaggtggaaaggctcgagcctggctcggctcgctggtacaacgagctgccaaaataggctcgactcggctcgggtacggctcgcgagcctgtgagcctattcgtattgggctttaggcggttgctttgcttgtgggcctattcgtattgggctgctccgctgatgcctgctggtgcgcgccgtgggcttggctcgcgagccggctcgcgaccttgcgcgagctggcttggctcggctcgggattttttcgagcttgcgaaaccgcctcggctcgccggtagctcgcgagccggctcgagcctgcacgagccgcaacgagctcgagccggctcaccgagcccgagctttttttccagccctagaggaggcggcggcgcggcgcaccggatggaggagaggcggcacgccggatggaggagaggcggcgcgcaggatggaggcaacgagccaacggcgcactgcaggaaaggccccaccctctcttccttctctttccctcccactctctcggtttggcgcgctgcaaaaccctaaaccctagcatgtacgcacgcaaagccgcgaaccctaaaaacctcccgcgtaagcacctttgtgtggcgtctgtggcgaaattggacgccatggcgacgcctaggcacgccaggcaacgccatacgcatccaaggcgcggcgggatcgacgcctagaacctaggctcgcctggacgcctaggcgacgccataataaccttgaggataacactacttcaaaggaaaccaaacatcaactcctatctctggtcttcttttcctttggggatgtctgagacagtgcgtacgaagaagggaggcgagaacaaggaagcaccgaatcacacctcaagaagttgtctgccccatcctgatcttgtctcttccactgctgacgctgatctaggaaccaccggaagtaggtaaatggggagtcagaacgaagagttgaaagccaaggccgagattagattggggacaatgttttcaagtcagacgacttgctgatcgttctggctgatcgactagggcgattaattgtgattggtccaaaccgacttggacgattaatgggacaacttgaaaacattgattggggaaagtgcataatatgccttttttactatgtagtgaatagataaggagcattggaagaaaatatttaatgaaatgagtaaagatgttgccttttatgttggtttctcatgttatttagactgatttaataatatataaatttcaatcaaacaataagtcaataatactccactttgtgtattatgatacctgtgttccaaacacctgcttcttcagctttcctgtctttttctattcctctattttgcacgctcattcctttcctattcgtacattttctacagttctgcgttccacattcctaggttccaaacataccctaatggtgtgtttggtttgtggagtcaccatatgcttcatgaggaccgagcaaatgaaatctacaagaaagttgaagatctcaaatctatcaggggaagaaatcaagatgccatattagctgcatgcctatatattgcttgtagacaagaagatcggcctagaactgtgaaagaaatatgttcagttgctaatggggccacaaagaaagaaattggcagagcaaaagaatttatagtgaaacaactggaagttgagatggggcaatctatggagatgggaaccattcacgctggaaattttctgagacgtttctgctcaactcttgggatgaacaatcaagctgttagggcagcccaggatgcagttaagcactcggaggagcttgatataaggaggagccctatctcaattgcagccgctgtcatttatatgataacccaactctcagaggacaagaagccacttaaagatatatccttggctactggtgtagcagaaggcaccatcagaaattcgtacaaggatctgtatccttatgcctcaaggctcatcccgaatacctacgccaaggaagaagacctgaagaatctctgcacaccttaggaggcttacttttttccccctttctgttactacataattcggaattagatttgtcaaagaggagtgagtgaagttgttcctcgttgtgactgtaccgggcaaggtgtcgtccccgccgtgcttaactttatgatggaatttcttttcagagcacctaccacctgaagatttgtgggatacgtatactcacttcggaaagaatgtagatagcaagcagttggacaagcacaagattttaatttaaaacatgattttgttctccatcttctgaagaaaccatcacttgtccatctttattctaagtgcccttggattccaagagaattgttagttggctaaaaattgggtaaaattatgatatgtttg

SEQ ID NO: 66488 - DNA, 1839 bp, Zea Mays
agccatatagacatctatacccccacccacccaaccttcggcagtccccatcctctcctgtgggcgctccctctccccggcccccaaatcaccgcgcctccctcgccacgcctcacagggccggttgcgtaggagaaaggagaaaggaaggaggggaggcggtcgtcgggcgagatgagcgactccttctgccccgactgcaagaagcatacggaggtggcgttcgaccactcggcgggggacatggtgtgcaccgagtgcggcctcgtcctcgaggcgcactccgtcgacgagacctccgagtggcgcaccttcgcgaacgagtccaacgacaacgaccccgtccgtgtcggtggccccaccaacccgctcctcaccgatggcggcctctccaccgtcatcgccaagcccaacggtgcgcagggcgacttcctatcctcctccctcggcaggtggcagaaccgcggctccaaccccgaccgatccctcatcctcgccttccgcaccatcgccaacatggctgaccggtccgcctccccccttctccgctgctcccttttctcacgctataggtccgatccgattcgatcaaattatgtggcttgctagtagtttgcgctgatttgtaggatatggcgtgtgcttgttacgttcatgcgtgcggcgcgctgcctgattttacgcctggggctatggaatgtgaccagggttggttatgactgcgggtctagatttggaacatctgattgatatattgcgtctagtatttttgcatgttcttgcagggtttggtgctggatgatttgtcccttggatctactgaaatcccgttctttataatatgggaacccatctaatatccttaatttcttcgggaactgtcaaaggctaggtcttgtggctactattaaggaccgagcaaatgaaatctacaagaaagttgaagatctcaaatctatcaggggaagaaatcaagatgccatattagctgcatgcctatatattgcttgtagacaagaagatcggcctagaactgtgaaagaaatatgttcagttgctaatggggccacaaagaaagaaattggcagagcaaaagaatttatagtgaaacaactggaagttgagatggggcaatctatggagatgggaaccattcacgctggaaattttctgagacgtttctgctcaactcttgggatgaacaatcaagctgttagggcagcccaggatgcagttaagcactcggaggagcttgatataaggaggagccctatctcaattgcagccgctgtcatttatatgataacccaactctcagaggacaagaagccacttaaagatatatccttggctactggtgtagcagaaggcaccatcagaaattcgtacaaggatctgtatccttatgcctcaaggctcatcccgaatacctacgccaaggaagaagacctgaagaatctctgcacaccttaggaggcttacttttttccccctttctgttactacataattcggaattagatttgtcaaagaggagtgagtgaagttgttcctcgttgtgactgtaccgggcaaggtgtcgtccccgccgtgcttaactttatgatggaatttcttttcagagcacctaccacctgaagatttgtgggatacgtatactcacttcggaaagaatgtagatagcaagcagttggacaagcacaagattttaatttaaaacatgattttgttctccatcttctgaagaaaccatcacttgtccatctttattctaagtgcccttggattccaagagaattgttagttggctaaaaattgggtaaaattatgatatgtttg

SEQ ID NO: 66489 - DNA, 1753 bp, Zea Mays
agccatatagacatctatacccccacccacccaaccttcggcagtccccatcctctcctgtgggcgctccctctccccggcccccaaatcaccgcgcctccctcgccacgcctcacagggccggttgcgtaggagaaaggagaaaggaaggaggggaggcggtcgtcgggcgagatgagcgactccttctgccccgactgcaagaagcatacggaggtggcgttcgaccactcggcgggggacatggtgtgcaccgagtgcggcctcgtcctcgaggcgcactccgtcgacgagacctccgagtggcgcaccttcgcgaacgagtccaacgacaacgaccccgtccgtgtcggtggccccaccaacccgctcctcaccgatggcggcctctccaccgtcatcgccaagcccaacggtgcgcagggcgacttcctatcctcctccctcggcaggtggcagaaccgcggctccaaccccgaccgatccctcatcctcgccttccgcaccatcgccaacatggctgaccggtccgcctccccccttctccgctgctcccttttctcacgctataggtccgatccgattcgatcaaattatgtggcttgctagtagtttgcgctgatttgtaggatatggcgtgtgcttgttacgttcatgcgtgcggcgcgctgcctgattttacgcctggggctatggaatgtgaccagggttggttatgactgcgggtctagatttggaacatctgattgatatattgcgtctagtatttttgcatgttcttgcagggtttggtgctggatgatttgtcccttggatctactgaaatcccgttctttataatatgggaacccatctaatatccttaatttcttcgggaactgtcaaaggttaggtcttgtggctactattaaggaccgagcaaatgaaatctacaagaaagttgaagatctcaaatctatcaggggaagaaatcaagatgccatattagctgcatgcctatatattgcttgtagacaagaagatcggcctagaactgtgaaagaaatatgttcagttgctaatggggccacaaagaaagaaattggcagagcaaaagaatttatagtgaaacaactggaagttgagatggggcaatctatggagatgggaaccattcacgctggaaattttctgagacgtttctgctcaactcttgggatgaacaatcaagctgttagggcagcccaggatgcagttaagcactcggaggagcttgatataaggaggagccctatctcaattgcagccgctgtcatttatatgataacccaactctcagaggacaagaagccacttaaagatatatccttggctactggtgtagcagaaggcaccatcagaaattcgtacaaggatctgtatccttatgcctcaaggctcatcccgaatacctacgccaaggaagaagacctgaagaatctctgcacaccttaggaggcttacttttttccccctttctgttactacataattcggaattagatttgtcaaagaggaagcacctaccacctgaagatttgtgggatacgtatactcacttcggaaagaatgtagatagcaagcagttggacaagcacaagattttaatttaaaacatgattttgttctccatcttctgaagaaaccatcacttgtccatctttattctaagtgcccttggattccaagagaattgttagttggctaaaaattgggtaaaattatgatatgtttg

SEQ ID NO: 66490 - DNA, 1363 bp, Zea Mays
gttggtttctcatgttatttagactgatttaataatatataaatttcaatcaaacaataagtcaataatactccactttgtgtattatgatacctgtgttccaaacacctgcttcttcagctttcctgtctttttctattcctctattttgcacgctcattcctttcctattcgtacattttctacagttctgcgttccacattcctaggttccaaacataccctaatggtgtgtttggtttgtggagtcaccatatgcttcatgagaccagagaaaaagtcattcaaaatagattttgaccatcaatttctcttgtaatgtaaagtcgacggtctaaaaataaataccatcttataggcacttttaacacaaatctattgatgcagattatatgctctaaactttaatggaatttgattagttggtcaaaatttatgaagtttgactttttctctggccaaatatgattaccacttctgaacggagggagtaattatttgtttttgtctttactcttcaaggaccgagcaaatgaaatctacaagaaagttgaagatctcaaatctatcaggggaagaaatcaagatgccatattagctgcatgcctatatattgcttgtagacaagaagatcggcctagaactgtgaaagaaatatgttcagttgctaatggggccacaaagaaagaaattggcagagcaaaagaatttatagtgaaacaactggaagttgagatggggcaatctatggagatgggaaccattcacgctggaaattttctgagacgtttctgctcaactcttgggatgaacaatcaagctgttagggcagcccaggatgcagttaagcactcggaggagcttgatataaggaggagccctatctcaattgcagccgctgtcatttatatgataacccaactctcagaggacaagaagccacttaaagatatatccttggctactggtgtagcagaaggcaccatcagaaattcgtacaaggatctgtatccttatgcctcaaggctcatcccgaatacctacgccaaggaagaagacctgaagaatctctgcacaccttaggaggcttacttttttccccctttctgttactacataattcggaattagatttgtcaaagaggaagcacctaccacctgaagatttgtgggatacgtatactcacttcggaaagaatgtagatagcaagcagttggacaagcacaagattttaatttaaaacatgattttgttctccatcttctgaagaaaccatcacttgtccatctttattctaagtgcccttggattccaagagaattgttagttggctaaaaattgggtaaaattatgatatgtttg

SEQ ID NO: 66491 - DNA, 2971 bp, Zea Mays
ctaacacctaaccgagtcagttccgaggccctgcgtcattagtttaaccagagctccggtttaaaccgaaaccacactgctaatcggccatcagtttacacaaaacgcaagatcgattatccggtcgcctcccgggccgggggcctttaactcgagtcgctaatccgtttccttgtatcgccccgtctccgacctcgctcgccgccatggatggttcgaaggggagcgtaggtggcggggacgggaccgggcccgaaaagccaagcgccgattcgaaccctagccttgacccgccccaacctaccgcggcggctgtcgaagccacagatgacggtgcggccgcggctgcggccgaggcggccaggcggcccttcacggccctcagccaagaggaagctgacctcgccctcgcccgcgtcctgcaggagcaggagcgggcgtacatgttgcttcggatgaacgggggcggtggcgagggcagcgactacgggagctctgatgaagggagctacgaatatgacgaagagggagaggaggactacgaagaggaactggagcaccgcctccgcgtccaccaccacgagcacccctcgggcgatggtgagggagagggcgggggcgagggcgagggcgccgaggggagcgactacgacgaagagttcgaggaggacgaagaaggggagccggaggtagatcccgcggagtttgaggacgatgaggcttatgcgcgtgcgctgcaggatgctgaggagcgtgaggtcgccgcacggcttatggctctcgctggtctcagcgattggcgaacagtggaggtggagcatgaggaggatcatgcgaatgatccacaggaggcatggcaagaggtcgatccagatgaatactcttatgaggagctagtcgcattgggtgaagtagttggcacagaaaacagaggtctctctgctgatacacttggttctttaccttcagtaacatacaagctgcaacatgttcaggatggcaacacagagcaatgcgtaatttgccgtgtggaattggaggagggtgaatctttgattgcactcccctgcaagcacttataccatcctgaatgcataaaccagtggctgcaaataaataaggtatgatggaccttcttaagcttcattgaatggctagaaacttcatttcattaactacttggtccttaaatactattctgattctgtgaagtatcccagactgtcacacatgcatgtacctgatgggagaatgttttcatcacaactagtctgtttatactatgtttagtaacttctagtcaaaataaaaagcttaagatttttctgtgggctgctaggcaggcatggtttgtcaactgatgttcttattctagttatgcagttgtatttagttcatcatttttctcttaaaaaaactagttgcatataaaacatcgaatgctaatggtattgaggtccgcaataacagggcatcagtctctacattttaagtaagaagattctgttatttgcttgacatagtccctagatttgtaatcgcggtcaagatatcttaggctgttacgttctatcagactgacattgaaccttatagttgtaatggtgcctacgattttctgtcatggtctagtgatgttttggttagcttatgttctgtcatgttgacatgcggaatcatgtaattttcttgtcgcggtaataaaatttgggcacaccatgtggtgggagaaaaggaagattgaaagagcaaatcaataaaccttggaagcaggtatgctgtattcaccaatggacacttggggatatattatctaggttttgcatgatctttatacataaaatacctctaatttttgtacatccacattaatcttgggtagatttggaagttagttaactatatccgtactctctttgaatataagagtcgttcagcaaccttttgttcttaaatcagtccagtatattaaagctttaatgtctattagcgttgtagtattagtagcatcattattgcatgcgactgttttctctttatttaatcagtattgtgatactcttaagttgaccaagaaaacttagtgccttcaaaagtttatcaatggaggctggcaaaaccgctgtaattgctgacacaactgtagtcaggtcaaatgaagtctgatgatggtctgcttgactcctgttatcttaggcagtgtttggttccggagacggctgggatagaatggctccatgccagagagcgtccgtccgggaaattttggggagctggatcattcagcatttgagcataattttccttttttagagccactctgtcctatatggaaccgatccaaacaacaacttactttctgccacagtgactactggctagctataggctatagttgtattcagtattcatattgtcagtccgtttcagcatttctatcatggcagattatgctatatggatccttatcttgcaaagtaataggttttatctgtattattcttagtatatatttcagcatttctgctggcggatcatgccatgtcaacccctaccttgaaaagtatgccctatgtgcagcgcagaagtatcaacctcgggtaacaaggagccatgactgctcctccgatggctatcttgggaacttggtgggaataactagcggcatcactgcagcatctgtattgtcgaaacaaaagcagaaaaaacggtctacatacatgcaaggagatcaggatataatcctcttgtcagtctaaagttctgcccttggttccctgctaactggattgattggccttgccgcttattatctcagttccctatgaacgccttatggctgttgtatgatccataaattatgctaattatattatattgttagtcattctttttactgatcgcatgatcatcttatatatttgcttgtcaactgattttagtttttttcttcttaattctaatcccttcg

SEQ ID NO: 66492 - DNA, 2166 bp, Zea Mays
gtcagttccgaggccctgcgtcattagtttaaccagagctccggtttaaaccgaaaccacactgctaatcggccatcagtttacacaaaacgcaagatcgattatccggtcgcctcccgggccgggggcctttaactcgagtcgctaatccgtttccttgtatcgccccgtctccgacctcgctcgccgccatggatggttcgaaggggagcgtaggtggcggggacgggaccgggcccgaaaagccaagcgccgattcgaaccctagccttgacccgccccaacctaccgcggcggctgtcgaagccacagatgacggtgcggccgcggctgcggccgaggcggccaggcggcccttcacggccctcagccaagaggaagctgacctcgccctcgcccgcgtcctgcaggagcaggagcgggcgtacatgttgcttcggatgaacgggggcggtggcgagggcagcgactacgggagctctgatgaagggagctacgaatatgacgaagagggagaggaggactacgaagaggaactggagcaccgcctccgcgtccaccaccacgagcacccctcgggcgatggtgagggagagggcgggggcgagggcgagggcgccgaggggagcgactacgacgaagagttcgaggaggacgaagaaggggagccggaggtagatcccgcggagtttgaggacgatgaggcttatgcgcgtgcgctgcaggatgctgaggagcgtgaggtcgccgcacggcttatggctctcgctggtctcagcgattggcgaacagtggaggtggagcatgaggaggatcatgcgaatgatccacaggaggcatggcaagaggtcgatccagatgaatactcttatgaggagctagtcgcattgggtgaagtagttggcacagaaaacagaggtctctctgctgatacacttggttctttaccttcagtaacatacaagctgcaacatgttcaggatggcaacacagagcaatgcgtaatttgccgtgtggaattggaggagggtgaatctttgattgcactcccctgcaagcacttataccatcctgaatgcataaaccagtggctgcaaataaataaggtatgatggaccttcttaagcttcattgaatggctagaaacttcatttcattaactacttggtccttaaatactattctgattctgtgaagtatcccagactgtcacacatgcatgtacctgatgggagaatgttttcatcacaactagtctgtttatactatgtttagtaacttctagtcaaaataaaaagcttaagatttttctgtgggctgctaggcaggcatggtttgtcaactgatgttcttattctagttatgcagttgtatttagttcatcatttttctcttaaaaaaactagttgcatataaaacatcgaatgctaatggtattgaggtccgcaataacagggcatcagtctctacattttaagtaagaagattctgttatttgcttgacatagtccctagatttgtaatcgcggtcaagatatcttaggctgttacgttctatcagactgacattgaaccttatagttgtaatggtgcctacgattttctgtcatggtctagtgatgttttggttagcttatgttctgtcatgttgacatgcggaatcatgtaattttcttgtcgcggtaataaaatttgggcacaccatgtggtgggagaaaaggaagattgaaagagcaaatcaataaaccttggaagcaggtatgccctatgtgcagcgcagaagtatcaacctcgggtaacaaggagccatgactgctcctccgatggctatcttgggaacttggtgggaataactagcggcatcactgcagcatctgtattgtcgaaacaaaagcagaaaaaacggtctacatacatgcaaggagatcaggatataatcctcttgtcagtctaaagttctgcccttggttccctgctaactggattgattggccttgccgcttattatctcagttccctatgaacgccttatggctgttgtatgatccataaattatgctaattatattatattgttagtcattctttttactgatcgcatgatcatcttatatatttgcttgtcaactgattttagtttttttcttcttaattctaatcccttcg

SEQ ID NO: 66493 - DNA, 1939 bp, Zea Mays
atcagtttacacaaaacgcaagatcgattatccggtcgcctcccgggccgggggcctttaactcgagtcgctaatccgtttccttgtatcgccccgtctccgacctcgctcgccgccatggatggttcgaaggggagcgtaggtggcggggacgggaccgggcccgaaaagccaagcgccgattcgaaccctagccttgacccgccccaacctaccgcggcggctgtcgaagccacagatgacggtgcggccgcggctgcggccgaggcggccaggcggcccttcacggccctcagccaagaggaagctgacctcgccctcgcccgcgtcctgcaggagcaggagcgggcgtacatgttgcttcggatgaacgggggcggtggcgagggcagcgactacgggagctctgatgaagggagctacgaatatgacgaagagggagaggaggactacgaagaggaactggagcaccgcctccgcgtccaccaccacgagcacccctcgggcgatggtgagggagagggcgggggcgagggcgagggcgccgaggggagcgactacgacgaagagttcgaggaggacgaagaaggggagccggaggtagatcccgcggagtttgaggacgatgaggcttatgcgcgtgcgctgcaggatgctgaggagcgtgaggtcgccgcacggcttatggctctcgctggtctcagcgattggcgaacagtggaggtggagcatgaggaggatcatgcgaatgatccacaggaggcatggcaagaggtcgatccagatgaatactcttatgaggagctagtcgcattgggtgaagtagttggcacagaaaacagaggtctctctgctgatacacttggttctttaccttcagtaacatacaagctgcaacatgttcaggatggcaacacagagcaatgcgtaatttgccgtgtggaattggaggagggtgaatctttgattgcactcccctgcaagcacttataccatcctgaatgcataaaccagtggctgcaaataaataaggcagtgtttggttccggagacggctgggatagaatggctccatgccagagagcgtccgtccgggaaattttggggagctggatcattcagcatttgagcataattttccttttttagagccactctgtcctatatggaaccgatccaaacaacaacttactttctgccacagtgactactggctagctataggctatagttgtattcagtattcatattgtcagtccgtttcagcatttctatcatggcagattatgctatatggatccttatcttgcaaagtaataggttttatctgtattattcttagtatatatttcagcatttctgctggcggatcatgccatgtcaacccctaccttgaaaagtaacttctattatgcacactacctggcttgagttaatttcaacatgttttccgatcaacatgacgtggatacatctagacaacagctctcattgctccaaaatttgacaaaatatcccctgattcttgcaggtatgccctatgtgcagcgcagaagtatcaacctcgggtaacaaggagccatgactgctcctccgatggctatcttgggaacttggtgggaataactagcggcatcactgcagcatctgtattgtcgaaacaaaagcagaaaaaacggtctacatacatgcaaggagatcaggatataatcctcttgtcagtctaaagttctgcccttggttccctgctaactggattgattggccttgccgcttattatctcagttccctatgaacgccttatggctgttgtatgatccataaattatgctaattatattatattgttagtcattctttttactgatcgcatgatcatcttatatatttgcttgtcaactgattttagtttttttcttcttaattctaatcccttcg

SEQ ID NO: 66494 - DNA, 990 bp, Zea Mays
tggccgttgttggaacttgctctcagccgcaaggggatccaacggggggagtggtgacgtaaacatggttctcgcgcaagatggcaatagctctgttaacctagtctctcacgggcactgtgcgggggtatttataggtgtctgagcacccagcgtctcgtgttaaggacgcatgtgccctcagacacttaggttatccccagaatattctcataaagcagggttacagactgtaattacagggatgcctttacagattaggcccgtaatacgcagcggccacgcagagcccgttacaatgggccggatcacacgtgggcctccgagttggacaaggccgcatggtggaatgacctcgtcgcaggccttcgtctgatgtcatgtggggcgaagggtgtccctgtccgttttatctccgttggaccaacgactgcagcgaaggcctcgagcgaagggtggcgtctttgccttcgccccaacagtcgtcactattcgtttgctttgatcataaattttgtcttccatcatgcatacaggaaaggatagtcttcacacacacaaaacagcaaaggtcaacctgcttccaatcatttgacttccacgtgttcaaaacacaacctgtgcagatgtgctccgcgttcaactgctcctaacgaagtaacgagatgcacacatagcttcatcaaccatacaaattcactcaaaacagtggttgacataagctacgggcagacgatgttaattcttgcctaatatatgctctttctcgttgttttgaaaaaggaaagaaacaaaaacttacacgactggcactttatttctggggagatatgggcaataatactataatgtccatattagttttcatataaaacattactacaggactgtaagatttctccactgatggccacttgtgacttgtctattaagaatttgaatacgctaaaccaggcggaaaaataaataacttctgagaagatccctgag

SEQ ID NO: 66495 - DNA, 738 bp, Zea Mays
tgttgacccaacaggcaattgctactgagatgcaaagtgaatccaagtggaagcaattaggggagttagctatgtcaaatggatccatggattttaaggcatacttggtgttgaagagtagtggaagcaattaggggagttagctatgtcaaatgaatccaagtggaagcaattaggggagttagctatgccttaaaatccaagtggaagtacattttcgaaactgatcactactcttcaacaccaagtatgtcttcttattctgttcactagcatgccagttgttacttgcattaccatatcataatttttaaagactatggatagcaggtccatctatattgctgacatacctatgaggtgcaaggttatttctgattggttagcttcttacccctttttcatcacatacagaatcggctatcttaaggtcagtgtcccttcataattgttagcacattttatataacaatatgtactgtggttgagagcacacagtcggatgctttttatatttccaaggaattttgtgttctctataagttgtagcatctaactatgtaacttgatgttatagattcaatcacaaaaaatatttaagcatatgaatactgaaataattgattggttgtaggctgggcaaaaggttcgtgaagaaagtgaaaggctgcgagtctgcgacagcaggaacgtgagcaaattgcaatgaaacgtaagcgtgaaatgatgctttgccct

SEQ ID NO: 66496 - DNA, 352 bp, Zea Mays
cacggaggcccttgagtttgttcagaaaaaatgaagtcaggtggtggtgcatagaagctcttgattaggagatattttcatgggctcatgacccacgatgaagctattgctacccagaagactagaaatacagcatccccttctaagggcttctagcttggtgtttcttgtttggtgatacctgtacaagcaaatttggtgacctgctgcttaaaagtcgtttgtgcaaagtggtcatcttgactgatcacaacgatgaagttctggagtgttgttgtcatgacgaagacagacccaagtattgaaagggatgatctgattttgttccaggagattgccatgtacatgctcc

SEQ ID NO: 66497 - DNA, 384 bp, Zea Mays
tacaaagactgtctgaaatcttctagaaacgacatcgaaaggaacttcaagctcaacaagcgaaagcatctatacaaagactgtctgaaatcttctagaaaaacctaaaccctatcgggaatggagacgctctcggcgaagcaggagggcaaggtggacgtgaagctgaagccgacttctaaccaatccaactcgtaggcgagcggggaagcggatgtgccaactaaaagagtggtctctctcagcgcttgcttgacaaacgtgtgttattaaccgttgtatataatgttattaattaatgtcctttattccctgatgcttctgctgtggctcacgttctcaactttgtatctgatgatgaaagaccagatgttttcttgcagt

SEQ ID NO: 66498 - DNA, 2000 bp, Zea Mays
ggcgagcagcttcccgtctccccgtctcatcccatgtcatgactcagcaccacctcccccatcctcctctgtcctcgtataaagcgccgcagtccacgacggcgacgccgcccatgggagctggagcaccagcacacgccgctgccccggctctgcgccgcgaaccctagccgaccgcctcatggccgccgagtcctgcggcagccgcggcgcctcgcccccgccgcctccctccgctggcggcgcggccgggaggcgccgcaaggcggaggcctacgccgaggtgctccgccgcatccgcgctggcgccggcggctacggtgctgcccgccccgggttggaggacgagctctgggcccacttccaaggcctacccgccagatatgctttggatgtcaatgtagaacgggttgaagatgtcttactgcacaagaaattgctggagcaagcccataaacccatgaatggtctggtctttgatgttcgtcctgcacagggttttactctggaggaaagcactggatttgagtccacaacttcctttaagcaagaagaacaagatccccagtcctcagtattcacatcaagagatcaaaggcctttgcatgaagttatatttgcatgtgacgataagccaaagcttcttagtcagttaacctctctcctcggggagcttggtcttaatatccaagaagcacatgcatattcgacgagtgatggctattccttggacatctttgttgttgatggctgggagtatgaggctgacattctccaaagtgcattgagggaaggcgttgataaaataaagtacagagcatggccgttggtaccgtcgatgtctgctaggatggatcaccaaccattggaggtttctccttcatctgactttgtccagataccagctgatgcagttgatgtttgggaagtcgatctcaggcttctcaaatttgaacaaaaattagcgtctggatcatttggtgatctataccatgggacgtactgtagtcaagatgtagctatcaaagtactcaagcctgagcgggttagcgttgatatgctacgtgagtttgcacaggaagtttatataatgaaaaaggttcgtcacaaaaatgttgtgcaatttattggtgcatgcacgagacctcctgttttgtgtattattacagaattcatgcatggaggcagtatttttgacttcctttacaatagacgaggaaattttcaactcccggatgtgattagaattgcatctgatgtgtccaagggaatgaattacttgcatcagattaatattgttcatagggatttgaagactgcaaatcttcttatggatgatcaggtcattgagcatttgccgtatgatcatagagcagatgttttcagttttgggatagttctttgggagctgctgaccggaaagcttccatatgaagacatgacacctcttcaggcagcagttgctgttgttcaaaaggatctgaggcctactattgctgttgatactcatcctatgctcgctgagctactccagagatgctggcagaaagatcctgctctaagaccaacatttgcagagattgtggatatattgaactctataaaggaggcggttcggagttctgtgcatcacaaaaggcattcatgtcgatctcactccgggagaagacgaggctgttgatgtgccagttttatgtggtgccgcacgcccttttcattttatttttgtagtcgagcgataacttcagaatacggccagaagagcttactgtgttcattccgagaggttttggtaactttattttttttaatttggacttatgcttcaaggattttcatcgttaaaaagcttagaggtgcatatccacgtttacatttggcatgtatctgtatctcgtactcgttttcttaagtttggcaggcaaccaagattttaatgaaaatctttaaccattactcactccgtccgaatttataattcgtttgactttttctttgcg

SEQ ID NO: 66499 - DNA, 2625 bp, Zea Mays
ggcgagcagcttcccgtctccccgtctcatcccatgtcatgactcagcaccacctcccccatcctcctctgtcctcgtataaagcgccgcagtccacgacggcgacgccgcccatgggagctggagcaccagcacacgccgctgccccggctctgcgccgcgaaccctagccgaccgcctcatggccgccgagtcctgcggcagccgcggcgcctcgcccccgccgcctccctccgctggcggcgcggccgggaggcgccgcaaggcggaggcctacgccgaggtgctccgccgcatccgcgctggcgccggcggctacggtgctgcccgccccgggttggaggacgagctctgggcccacttccaaggcctacccgccagatatgctttggatgtcaatgtagaacgggttgaagatgtcttactgcacaagaaattgctggagcaagcccataaacccatgaatggtctggtctttgatgttcgtcctgcacagggttttactctggaggaaagcactggatttgagtccacaacttcctttaagcaagaagaacaagatccccagtcctcagtattcacatcaagagatcaaaggcctttgcatgaagttatatttgcatgtgacgataagccaaagcttcttagtcagttaacctctctcctcggggagcttggtcttaatatccaagaagcacatgcatattcgacgagtgatggctattccttggacatctttgttgttgatggctgggagtatgaggctgacattctccaaagtgcattgagggaaggcgttgataaaataaagtacagagcatggccgttggtaccgtcgatgtctgctaggatggatcaccaaccattggaggtttctccttcatctgactttgtccagataccagctgatgcagttgatgtttgggaagtcgatctcaggcttctcaaatttgaacaaaaattagcgtctggatcatttggtgatctgtatgttcaagaagcaacttgaagtagtaactcttatttatatgtaactgacttatttgatgtgccatcagataccatgggacgtactgtagtcaagatgtagctatcaaagtactcaagcctgagcgggttagcgttgatatgctacgtgagtttgcacaggaagtttatataatgaagtgagtgatgaactttacttatgcttggactgagaaaatggtgtaacagtcacttcacaatacaacattttaggatgatgttccatcatttatttatgactgcccaggcaaactgaatttgctgtaatgacttctcctatgggaagtaacatgatgctagtttaagatttcttgtttcatatttctgcaatttgagtttactgaccatgggtttaaggaatgatttatcgtttgacattgtgttcgattacaacttaataacatagtttatcaaaaacccagaatagcattagcctgttatttttagtcttgatgatcagacacttactgaacttgggacaatcattacgctccagctctctttccaaatttgatttggcatgcatatttgacatgctgctactcttattgatatatccagtcactttctccaaccatgtttaatcctaattttacagaaaggttcgtcacaaaaatgttgtgcaatttattggtgcatgcacgagacctcctgttttgtgtattattacagaattcatgcatggaggcagtatttttgacttcctttacaatagacgaggaaattttcaactcccggatgtgattagaattgcatctgatgtgtccaagggaatgaattacttgcatcagattaatattgttcatagggatttgaagactgcaaatcttcttatggatgatcaggttgtcaaggttgcagactttggggttgcaagggttaaagaccagtcaggagttatgactgcagaaacaggaacctacagatggatggcccctgaggtcattgagcatttgccgtatgatcatagagcagatgttttcagttttgggatagttctttgggagctgctgaccggaaagcttccatatgaagacatgacacctcttcaggcagcagttgctgttgttcaaaaggatctgaggcctactattgctgttgatactcatcctatgctcgctgagctactccagagatgctggcagaaagatcctgctctaagaccaacatttgcagagattgtggatatattgaactctataaaggaggcggttcggagttctgtgcatcacaaaaggcattcatgtcgatctcactccgggagaagacgaggctgttgatgtgccagttttatgtggtgccgcacgcccttttcattttatttttgtagtcgagcgataacttcagaatacggccagaagagcttactgtgttcattccgagaggttttggtaactttattttttttaatttggacttatgcttcaaggattttcatcgttaaaaagcttagaggtgcatatccacgtttacatttggcatgtatctgtatctcgtactcgttttcttaagtttggcaggcaaccaagattttaatgaaaatctttaaccattactcactccgtccgaatttataattcgtttgactttttctttgcg

SEQ ID NO: 66500 - DNA, 2168 bp, Zea Mays
ggcgagcagcttcccgtctccccgtctcatcccatgtcatgactcagcaccacctcccccatcctcctctgtcctcgtataaagcgccgcagtccacgacggcgacgccgcccatgggagctggagcaccagcacacgccgctgccccggctctgcgccgcgaaccctagccgaccgcctcatggccgccgagtcctgcggcagccgcggcgcctcgcccccgccgcctccctccgctggcggcgcggccgggaggcgccgcaaggcggaggcctacgccgaggtgctccgccgcatccgcgctggcgccggcggctacggtgctgcccgccccgggttggaggacgagctctgggcccacttccaaggcctacccgccagatatgctttggatgtcaatgtagaacgggttgaagatgtcttactgcacaagaaattgctggagcaagcccataaacccatgaatggtctggtctttgatgttcgtcctgcacagttttagggttttactctggaggaaagcactggatttgagtccacaacttcctttaagcaagaagaacaagatccccagtcctcagtattcacatcaagagatcaaaggcctttgcatgaagttatatttgcatgtgacgataagccaaagcttcttagtcagttaacctctctcctcggggagcttggtcttaatatccaagaagcacatgcatattcgacgagtgatggctattccttggacatctttgttgttgatggctgggagtatgaggctgacattctccaaagtgcattgagggaaggcgttgataaaataaagagcatggccgttggtaccgtcgatgtctgctaggatggatcaccaaccattggaggtttctccttcatctgactttgtccagataccagctgatgcagttgatgtttgggaagtcgatctcaggcttctcaaatttgaacaaaaattagcgtctggatcatttggtgatctgtatgttcaagaagcaacttgaagtagtaactcttatttatatgtaactgacttatttgatgtgccatcagataccatgggacgtactgtagtcaagatgtagctatcaaagtactcaagcctgagcgggttagcgttgatatgctacgtgagtttgcacaggaagtttatataatgaaaaaggttcgtcacaaaaatgttgtgcaatttattggtgcatgcacgagacctcctgttttgtgtattattacagaattcatgcatggaggcagtatttttgacttcctttacaatagacgaggaaattttcaactcccggatgtgattagaattgcatctgatgtgtccaagggaatgaattacttgcatcagattaatattgttcatagggatttgaagactgcaaatcttcttatggatgatcaggttgtcaaggttgcagactttggggttgcaagggttaaagaccagtcaggagttatgactgcagaaacaggaacctacagatggatggcccctgaggtcattgagcatttgccgtatgatcatagagcagatgttttcagttttgggatagttctttgggagctgctgaccggaaagcttccatatgaagacatgacacctcttcaggcagcagttgctgttgttcaaaaggatctgaggcctactattgctgttgatactcatcctatgctcgctgagctactccagagatgctggcagaaagatcctgctctaagaccaacatttgcagagattgtggatatattgaactctataaaggaggcggttcggagttctgtgcatcacaaaaggcattcatgtcgatctcactccgggagaagacgaggctgttgatgtgccagttttatgtggtgccgcacgcccttttcattttatttttgtagtcgagcgataacttcagaatacggccagaagagcttactgtgttcattccgagaggttttggtaactttattttttttaatttggacttatgcttcaaggattttcatcgttaaaaagcttagaggtgcatatccacgtttacatttggcatgtatctgtatctcgtactcgttttcttaagtttggcaggcaaccaagattttaatgaaaatctttaaccattactcactccgtccgaatttataattcgtttgactttttctttgcg

SEQ ID NO: 66501 - DNA, 2158 bp, Zea Mays
ggcgagcagcttcccgtctccccgtctcatcccatgtcatgactcagcaccacctcccccatcctcctctgtcctcgtataaagcgccgcagtccacgacggcgacgccgcccatgggagctggagcaccagcacacgccgctgccccggctctgcgccgcgaaccctagccgaccgcctcatggccgccgagtcctgcggcagccgcggcgcctcgcccccgccgcctccctccgctggcggcgcggccgggaggcgccgcaaggcggaggcctacgccgaggtgctccgccgcatccgcgctggcgccggcggctacggtgctgcccgccccgggttggaggacgagctctgggcccacttccaaggcctacccgccagatatgctttggatgtcaatgtagaacgggttgaagatgtcttactgcacaagaaattgctggagcaagcccataaacccatgaatggtctggtctttgatgttcgtcctgcacagggttttactctggaggaaagcactggatttgagtccacaacttcctttaagcaagaagaacaagatccccagtcctcagtattcacatcaagagatcaaaggcctttgcatgaagttatatttgcatgtgacgataagccaaagcttcttagtcagttaacctctctcctcggggagcttggtcttaatatccaagaagcacatgcatattcgacgagtgatggctattccttggacatctttgttgttgatggctgggagtatgaggctgacattctccaaagtgcattgagggaaggcgttgataaaataaagtacagagcatggccgttggtaccgtcgatgtctgctaggatggatcaccaaccattggaggtttctccttcatctgactttgtccagataccagctgatgcagttgatgtttgggaagtcgatctcaggcttctcaaatttgaacaaaaattagcgtctggatcatttggtgatctgtatgttcaagaagcaacttgaagtagtaactcttatttatatgtaactgacttatttgatgtgccatcagataccatgggacgtactgtagtcaagatgtagctatcaaagtactcaagcctgagcgggttagcgttgatatgctacgtgagtttgcacaggaagtttatataatgaaaaaggttcgtcacaaaaatgttgtgcaatttattggtgcatgcacgagacctcctgttttgtgtattattacagaattcatgcatggaggcagtatttttgacttcctttacaatagacgaggaaattttcaactcccggatgtgattagaattgcatctgatgtgtccaagggaatgaattacttgcatcagattaatattgttcatagggatttgaagactgcaaatcttcttatggatgatcaggttgcagactttggggttgcaagggttaaagaccagtcaggagttatgactgcagaaacaggaacctacagatggatggcccctgaggtcattgagcatttgccgtatgatcatagagcagatgttttcagttttgggatagttctttgggagctgctgaccggaaagcttccatatgaagacatgacacctcttcaggcagcagttgctgttgttcaaaaggatctgaggcctactattgctgttgatactcatcctatgctcgctgagctactccagagatgctggcagaaagatcctgctctaagaccaacatttgcagagattgtggatatattgaactctataaaggaggcggttcggagttctgtgcatcacaaaaggcattcatgtcgatctcactccgggagaagacgaggctgttgatgtgccagttttatgtggtgccgcacgcccttttcattttatttttgtagtcgagcgataacttcagaatacggccagaagagcttactgtgttcattccgagaggttttggtaactttattttttttaatttggacttatgcttcaaggattttcatcgttaaaaagcttagaggtgcatatccacgtttacatttggcatgtatctgtatctcgtactcgttttcttaagtttggcaggcaaccaagattttaatgaaaatctttaaccattactcactccgtccgaatttataattcgtttgactttttctttgcg

SEQ ID NO: 66502 - DNA, 2156 bp, Zea Mays
ggcgagcagcttcccgtctccccgtctcatcccatgtcatgactcagcaccacctcccccatcctcctctgtcctcgtataaagcgccgcagtccacgacggcgacgccgcccatgggagctggagcaccagcacacgccgctgccccggctctgcgccgcgaaccctagccgaccgcctcatggccgccgagtcctgcggcagccgcggcgcctcgcccccgccgcctccctccgctggcggcgcggccgggaggcgccgcaaggcggaggcctacgccgaggtgctccgccgcatccgcgctggcgccggcggctacggtgctgcccgccccgggttggaggacgagctctgggcccacttccaaggcctacccgccagatatgctttggatgtcaatgtagaacgggttgaagatgtcttactgcacaagaaattgctggagcaagcccataaacccatgaatggtctggtctttgatgttcgtcctgcacagttttagggttttactctggaggaaagcactggatttgagtccacaacttcctttaagcaagaagaacaagatccccagtcctcagtattcacatcaagagatcaaaggcctttgcatgaagttatatttgcatgtgacgataagccaaagcttcttagtcagttaacctctctcctcggggagcttggtcttaatatccaagaagcacatgcatattcgacgagtgatggctattccttggacatctttgttgttgatggctgggagtatgaggctgacattctccaaagtgcattgagggaaggcgttgataaaataaagtacagagcatggccgttggtaccgtcgatgtctgctaggatggatcaccaaccattggaggtttctccttcatctgactttgtccagataccagctgatgcagttgatgtttgggaagtcgatctcaggcttctcaaatttgaacaaaaattagcgtctggatcatttggtgatctataccatgggacgtactgtagtcaagatgtagctatcaaagtactcaagcctgagcgggttagcgttgatatgctacgtgagtttgcacaggaagtttatataatgaaaaaggttcgtcacaaaaatgttgtgcaatttattggtgcatgcacgagacctcctgttttgtgtattattacagaattcatgcatggaggcagtatttttgacttcctttacaatagacgaggaaattttcaactcccggatgtgattagaattgcatctgatgtgtccaagggaatgaattacttgcatcagattaatattgttcatagggatttgaagactgcaaatcttcttatggatgatcaggttgtcaaggttgcagactttggggttgcaagggttaaagaccagtcaggagttatgactgcagaaacaggaacctacagatggatggcccctgagtcaaaactagcttttgtttatgcatcacctcgttctactaaaaaaactgtgcaggtcattgagcatttgccgtatgatcatagagcagatgttttcagttttgggatagttctttgggagctgctgaccggaaagcttccatatgaagacatgacacctcttcaggcagcagttgctgttgttcaaaaggatctgaggcctactattgctgttgatactcatcctatgctcgctgagctactccagagatgctggcagaaagatcctgctctaagaccaacatttgcagagattgtggatatattgaactctataaaggaggcggttcggagttctgtgcatcacaaaaggcattcatgtcgatctcactccgggagaagacgaggctgttgatgtgccagttttatgtggtgccgcacgcccttttcattttatttttgtagtcgagcgataacttcagaatacggccagaagagcttactgtgttcattccgagaggttttggtaactttattttttttaatttggacttatgcttcaaggattttcatcgttaaaaagcttagaggtgcatatccacgtttacatttggcatgtatctgtatctcgtactcgttttcttaagtttggcaggcaaccaagattttaatgaaaatctttaaccattactcactccgtccgaatttataattcgtttgactttttctttgcg

SEQ ID NO: 66503 - DNA, 1955 bp, Zea Mays
ggcgagcagcttcccgtctccccgtctcatcccatgtcatgactcagcaccacctcccccatcctcctctgtcctcgtataaagcgccgcagtccacgacggcgacgccgcccatgggagctggagcaccagcacacgccgctgccccggctctgcgccgcgaaccctagccgaccgcctcatggccgccgagtcctgcggcagccgcggcgcctcgcccccgccgcctccctccgctggcggcgcggccgggaggcgccgcaaggcggaggcctacgccgaggtgctccgccgcatccgcgctggcgccggcggctacggtgctgcccgccccgggttggaggacgagctctgggcccacttccaaggcctacccgccagatatgctttggatgtcaatgtagaacgggttgaagatgtcttactgcacaagaaattgctggagcaagcccataaacccatgaatggtctggtctttgatgttcgtcctgcacagttttagggttttactctggaggaaagcactggatttgagtccacaacttcctttaagcaagaagaacaagatccccagtcctcagtattcacatcaagagatcaaaggcctttgcatgaagttatatttgcatgtgacgataagccaaagcttcttagtcagttaacctctctcctcggggagcttggtcttaatatccaagaagcacatgcatattcgacgagtgatggctattccttggacatctttgttgttgatggctgggagtatgaggctgacattctccaaagtgcattgagggaaggcgttgataaaataaagtacagagcatggccgttggtaccgtcgatgtctgctaggatggatcaccaaccattggagataccatgggacgtactgtagtcaagatgtagctatcaaagtactcaagcctgagcgggttagcgttgatatgctacaaaggttcgtcacaaaaatgttgtgcaatttattggtgcatgcacgagacctcctgttttgtgtattattacagaattcatgcatggaggcagtatttttgacttcctttacaatagacgaggaaattttcaactcccggatgtgattagaattgcatctgatgtgtccaagggaatgaattacttgcatcagattaatattgttcatagggatttgaagactgcaaatcttcttatggatgatcaggttgtcaaggttgcagactttggggttgcaagggttaaagaccagtcaggagttatgactgcagaaacaggaacctacagatggatggcccctgaggtcattgagcatttgccgtatgatcatagagcagatgttttcagttttgggatagttctttgggagctgctgaccggaaagcttccatatgaagacatgacacctcttcaggcagcagttgctgttgttcaaaaggatctgaggcctactattgctgttgatactcatcctatgctcgctgagctactccagagatgctggcagaaagatcctgctctaagaccaacatttgcagagattgtggatatattgaactctataaaggaggcggttcggagttctgtgcatcacaaaaggcattcatgtcgatctcactccgggagaagacgaggctgttgatgtgccagttttatgtggtgccgcacgcccttttcattttatttttgtagtcgagcgataacttcagaatacggccagaagagcttactgtgttcattccgagaggttttggtaactttattttttttaatttggacttatgcttcaaggattttcatcgttaaaaagcttagaggtgcatatccacgtttacatttggcatgtatctgtatctcgtactcgttttcttaagtttggcaggcaaccaagattttaatgaaaatctttaaccattactcactccgtccgaatttataattcgtttgactttttctttgcg

SEQ ID NO: 66504 - DNA, 2690 bp, Zea Mays
ggcgagcagcttcccgtctccccgtctcatcccatgtcatgactcagcaccacctcccccatcctcctctgtcctcgtataaagcgccgcagtccacgacggcgacgccgcccatgggagctggagcaccagcacacgccgctgccccggctctgcgccgcgaaccctagccgaccgcctcatggccgccgagtcctgcggcagccgcggcgcctcgcccccgccgcctccctccgctggcggcgcggccgggaggcgccgcaaggcggaggcctacgccgaggtgctccgccgcatccgcgctggcgccggcggctacggtgctgcccgccccgggttggaggacgagctctgggcccacttccaaggcctacccgccagatatgctttggatgtcaatgtagaacgggttgaagatgtcttactgcacaagaaattgctggagcaagcccataaacccatgaatggtctggtctttgatgttcgtcctgcacagttttagggttttactctggaggaaagcactggatttgagtccacaacttcctttaagcaagaagaacaagatccccagtcctcagtattcacatcaagagatcaaaggcctttgcatgaagttatatttgcatgtgacgataagccaaagcttcttagtcagttaacctctctcctcggggagcttggtcttaatatccaagaagcacatgcatattcgacgagtgatggctattccttggacatctttgttgttgatggctgggagtatgaggctgacattctccaaagtgcattgagggaaggcgttgataaaataaagtacagagcatggccgttggtaccgtcgatgtctgctaggatggatcaccaaccattggaggtttctccttcatctgactttgtccagataccagctgatgcagttgatgtttgggaagtcgatctcaggcttctcaaatttgaacaaaaattagcgtctggatcatttggtgatctataccatgggacgtactgtagtcaagatgtagctatcaaagtactcaagcctgagcgggttagcgttgatatgctacgtgagtttgcacaggaagtttatataatgaaaaaggttcgtcacaaaaatgttgtgcaatttattggtgcatgcacgagacctcctgttttgtgtattattacagaattcatgcatggaggcagtatttttgacttcctttacaatagacgaggaaattttcaactcccggatgtgattagaattgcatctgatgtgtccaagggaatgaattacttgcatcagattaatattgttcatagggatttgaagactgcaaatcttcttatggatgatcaggtacttaactgcacagtgtagtattaaccttggttacaatatctatctcaggaaatagaactctactaccatactcacttctcaggatagtggaatcttagctttggatacaaaggttactttggtcctgaactcctgacatcctgatatcttgaagataattctgcactagcttagaccgctgtgaaattgaatagaaatatggtcaacctctatggccgtaattgcatatggtaacacaaatcaacagcttcactagaatcatgcctataataaattgttctgaagccacctgctccaccctccagacgtccttttttttgtgcacatctgtctgtctacttatattgcaattgcttcaaaatacgatcaatacataggtgtgcatgcatcatcagtcactcagtcttttgtcaaaccaatcaatggacccgttgtattgtatctgtgaactatgatgacatttgtttttgggaatgaatcatgatctggttatgtttgcttgcccttgggtactatatacgtttcaaataaataagcacatgtttactcagattactgtgccatttgaatgatataatatcgtaggttgtcaaggttgcagactttggggttgcaagggttaaagaccagtcaggagttatgactgcagaaacaggaacctacagatggatggcccctgaggtcattgagcatttgccgtatgatcatagagcagatgttttcagttttgggatagttctttgggagctgctgaccggaaagcttccatatgaagacatgacacctcttcaggcagcagttgctgttgttcaaaaggatctgaggcctactattgctgttgatactcatcctatgctcgctgagctactccagagatgctggcagaaagatcctgctctaagaccaacatttgcagagattgtggatatattgaactctataaaggaggcggttcggagttctgtgcatcacaaaaggcattcatgtcgatctcactccgggagaagacgaggctgttgatgtgccagttttatgtggtgccgcacgcccttttcattttatttttgtagtcgagcgataacttcagaatacggccagaagagcttactgtgttcattccgagaggttttggtaactttattttttttaatttggacttatgcttcaaggattttcatcgttaaaaagcttagaggtgcatatccacgtttacatttggcatgtatctgtatctcgtactcgttttcttaagtttggcaggcaaccaagattttaatgaaaatctttaaccattactcactccgtccgaatttataattcgtttgactttttctttgcg

SEQ ID NO: 66505 - DNA, 1652 bp, Zea Mays
agcacctctgcgaaattttgatgcgtaggctcctctactgttggatcatatgctttggatgtcaatgtagaacgggttgaagatgtcttactgcacaagaaattgctggagcaagcccataaacccatgaatggtctggtctttgatgttcgtcctgcacagttttagggttttactctggaggaaagcactggatttgagtccacaacttcctttaagcaagaagaacaagatccccagtcctcagtattcacatcaagagatcaaaggcctttgcatgaagttatatttgcatgtgacgataagccaaagcttcttagtcagttaacctctctcctcggggagcttggtcttaatatccaagaagcacatgcatattcgacgagtgatggctattccttggacatctttgttgttgatggctgggagtatgaggctgacattctccaaagtgcattgagggaaggcgttgataaaataaagtacagagcatggccgttggtaccgtcgatgtctgctaggatggatcaccaaccattggagataccatgggacgtactgtagtcaagatgtagctatcaaagtactcaagcctgagcgggttagcgttgatatgctacgtgagtttgcacaggaagtttatataatgaaaaaggttcgtcacaaaaatgttgtgcaatttattggtgcatgcacgagacctcctgttttgtgtattattacagaattcatgcatggaggcagtatttttgacttcctttacaatagacgaggaaattttcaactcccggatgtgattagaattgcatctgatgtgtccaagggaatgaattacttgcatcagattaatattgttcatagggatttgaagactgcaaatcttcttatggatgatcaggttgtcaaggttgcagactttggggttgcaagggttaaagaccagtcaggagttatgactgcagaaacaggaacctacagatggatggcccctgaggtcattgagcatttgccgtatgatcatagagcagatgttttcagttttgggatagttctttgggagctgctgaccggaaagcttccatatgaagacatgacacctcttcaggcagcagttgctgttgttcaaaaggatctgaggcctactattgctgttgatactcatcctatgctcgctgagctactccagagatgctggcagaaagatcctgctctaagaccaacatttgcagagattgtggatatattgaactctataaaggaggcggttcggagttctgtgcatcacaaaaggcattcatgtcgatctcactccgggagaagacgaggctgttgatgtgccagttttatgtggtgccgcacgcccttttcattttatttttgtagtcgagcgataacttcagaatacggccagaagagcttactgtgttcattccgagaggttttggtaactttattttttttaatttggacttatgcttcaaggattttcatcgttaaaaagcttagaggtgcatatccacgtttacatttggcatgtatctgtatctcgtactcgttttcttaagtttggcaggcaaccaagattttaatgaaaatctttaaccattactcactccgtccgaatttataattcgtttgactttttctttgcg

SEQ ID NO: 66506 - DNA, 769 bp, Zea Mays
aaaaatcatttttatctgaaagtactttggaaaaaaataatccaagaaccttttgtgggatcaaatcgctatctcagctttagagtaaattagtgagctgtcaaactgaaggtcattgagcatttgccgtatgatcatagagcagatgttttcagttttgggatagttctttgggagctgctgaccggaaagcttccatatgaagacatgacacctcttcaggcagcagttgctgttgttcaaaaggatctgaggcctactattgctgttgatactcatcctatgctcgctgagctactccagagatgctggcagaaagatcctgctctaagaccaacatttgcagagattgtggatatattgaactctataaaggaggcggttcggagttctgtgcatcacaaaaggcattcatgtcgatctcactccgggagaagacgaggctgttgatgtgccagttttatgtggtgccgcacgcccttttcattttatttttgtagtcgagcgataacttcagaatacggccagaagagcttactgtgttcattccgagaggttttggtaactttattttttttaatttggacttatgcttcaaggattttcatcgttaaaaagcttagaggtgcatatccacgtttacatttggcatgtatctgtatctcgtactcgttttcttaagtttggcaggcaaccaagattttaatgaaaatctttaaccattactcactccgtccgaatttataattcgtttgactttttctttgcg

SEQ ID NO: 66507 - DNA, 2062 bp, Zea Mays
cttgagctgacaagctctcttgctgtcttgcataagcttgtagcacctttttgtttggggagatgtgaaggattaaagctcatgtgaaagattctaagactacaattggtatcaagcggttgctttcttatttctcatacgctcaaccatgctcctgcatgctaaggattcagttaggaagatgcattcagttgctaagaactactttgtgtctgatcttactcatcctccaagatccttgaacagagcttccagacatgttgttccattcaagacccgtttctttactcattgctcacttgagagccgttcagttgaccaagagattgtgattgctatgggaagcaatgtaggcgatagagtcagtacattcaacagggcattgcagctgatgaaaagctcagacgtgaacatcactaggcatgcctgtctctatgagaccgcccctgcttatttgactgatcagccgcggtttcttaactctgccattcggggcacaactaggctcaggccacatgagcttcttaaactgctaaaggaaattgagaaggatattggccgcactggcggaataaggtacggcccaagacctatcgatctagacatacttctttatggtaactcccagatccatagtgagactctaattgtgccacatgagcgcatccatgagaggtcatttgttttagcacctcttgttgaccttctaggtgcatctagtgacaacggtatcgaaacaagttggcactctctctcaaagtgtagtggaggtttctttgagttatggaataaccttgggggtgaatctataattggaacagaaagcattaaaagggtattacctgttggggatcgtttgttggattggtgtgagaggactcttgtcatgggggtccttaatttgacaccagacagctttagtgatggaggtaagtttctagaagtgggagctgccatttctcaggctaagtcattaatctcagaaggtgcagatatcattgatattggtgctcaatctaccaggccctttgcaaaaagattatctccaaatgaggagcttgagaggttggttcctgttctggatgagattacaaaaatccctgagatggagggcaagttactctcagtggatacattctatgcagaagttgccagtgaagctgtgaaaagaggagctcacatgatcaacgatgtatccagtggacagcttgatccaagaattcttaaagtggcagctgaactgggagttccatatgttgcaatgcacatgaggggagatccgtcaactatgcaaagcgaacaaaatgtacactatgataatgtctgcaaggaagttgctttggagctatacacacaggtgagagaagcagagttatctgggattccattgtggaggctggttcttgatcctggcattggcttctccaagaaatctggacataaccttgaagtaattatgggattggaatccattaggagggagatgggtaaaatgagtataggtgcttcacatgtgccaatattactgggaccttcaaggaaaagctttttgggtgaaatatgcaatcgtgccaatccagttgagagagatgttgctactgttgcagccgtgacagctgggattttgaatggtgctaacattgtaagaatccataatgctggatatggtgtagacgctgcaaaggtttgtgatgcattgcgtaagcgtaagggaagttgcagaaactgaactatctgatcaaactgataccacgctccagttttatacaagaaaaaggtgatgtcgaaaaatgtgatttgtgaagtatcgttgttgtaatgaaccagagataatgctttttcttgtgtcaccaaggaataaagtcaagaagctgcgactcaagttgcattggtcctattcagatgattttgctgaacttattttttgcctatttagtgggtgtttggtttctagggactaatttttagtccctttattttatttaattttagttcctaaattgtcaaatctgtattttgcaatttagggacaaagtgaataaaatgaagggcctaaattgtc

SEQ ID NO: 66508 - DNA, 3242 bp, Zea Mays
aagaaatggcaagaaaatcatagagcaaatgcaaaatgcattaaaactctccttttttttccgtaaaagagagagaagtcccaaagaacaggttgattggcgatgagcagtgggatggatacggtgggggtcgggatggaagctggcgtcgtgggtgaccgtgcaatacatccaaaataggaggagtgacgtgggaaagctccccgcgtcctcctcttcctttcctcctctcgtcgtccagggaaggatgcaggatgctctccgtccctcccccaccacctgaggaggaaagcaagaaatttttaaccaaccaaacgcaccaccgcgtgcctccgtgattcccagcccaattaacccggaacagaagagaagagctcgccacgccaccggtgggatcgccggacacctacgcgggcctggccttgggatccccggaacgcggggcgtgggaaaccgaggaggagcatgtcgcgggtggcgtcgctgtcgccgtccttgtcgggcgacgaggtggaggtggaggaggaagaggaggacgagggcgtcgacggctaccgcaagggcggctaccacgccgtccgccccggggaccagttcgccgccggccgctacgtcgcccagcggaagctcggctggggcaacttctccaccgtctggctcgccttcgacgtccagtcacagagatacgtggccctgaagatccaaaagagtgcgcctgagtttgcgcaagctgctcttcatgaaatcgagttcctgtcagagatcaccaagaaggacccattgaactgcaaatgcattattcagctgatagatcacttcaagcacacggggcctaacggacagcatatctgcctcgtctttgagttactgggagatagcttgcttaagctggtacagtacaaccggtacaaaggcatcgggcttgatagggtgaggcaaatatgcaagtcgatcttggtaggtcttgactacttgcacaatgagcttggcatcatccactcagatttgaagctcgagaaccttctccttctctcgaccattgatccctccaaggaccccattcgctctggcctcaaaccttgccttgagaggcctgagggaaaccctaacggtgaagctgggattaatgcgattgagaataagctaaagatgagagcaaggagggtgcttgcaaagcttgctgagaaaagaaaatcagctgtggaatcttcacgctcagaaaggagcttgggtggaattgatcttacatgcaagattgtagactttgggaatgcttgctgggccgacaaacaatttacagattttattcagacaaggcagtaccgggcaccagaggtcattctaggtgcaggatactcgttttctgttgacatgtggtcatttgcgtgtatcgcttttgagctcgcaaccggagaaatgctatttacacccaaggaaggccatggatacagtgaagatgaggatcacttggctttaatgatggaactacttggcaaggtgccgaagaagattgcaaccacgggaacacgatcaaaggaatattttgaccgccatggagatctgaagcggataagaaggctgaaattatcatccattgaacgtgtccttgttgacaaatacaaaatttctgaatctgatgcccgggaatttgccaattttctttgcccattacttgactttgcaccagagaagaggccaacagctttaggttgcctaaagcatccatggcttcattataacgaggataaaacttgtcagtctcttaacaataatgatgccaagaacattgacctggcccaaagcccagggagcatcaccagcggatattgtacaaatattgatttgacgagcaaaaaaggcggacccactggaacttgtgataagactgctgatgcaaaatataacaccagaagcattaccagcaatgctaccatgaacactgatgtacagcccaatattggaagcattgctaacggacttgccaaaaatgttgatgtaaatccgaacattggatccatcactaatagagatgccaagagttctgatatgaagccccacattggaagcatcaccatcagtaacgccaaaagctctaatgtaaagctggatacaggtaacatcactgatagaaatgccaaaactgtcgatataaagcccaactctgacatctctagcagagatgacaagagcagtaatgtggacaccaccacttccagtgttatcaacaaagatgcgaagcgcagcattagaagtgtcgttaattcttatatcaagaatttcgatgcaaagtgcaacactggaagcactgctaacagtgatgctagggacccatcagatacgaaatccagcactaaaattgttagtagtgctgataatgctaagtgtgtggacataaaaccgatcagtggaagtgataagagcaatgacaccagtgataagagcaatgacaccgtcgatgctaatgtgaaatccaactctggaattgttgcaaacagtgatgctagcaacaccgatgtacagactaacactggaagtgtcgacagcagcgatgattacagcattgactcaaaaccaaacattggccgggttgctgcaagcatacagaggttggagagcagtatggggaaatacagggccgacctttctcaagattgaggatctggcaggtaccagctggcgttattgtatatctctattcctgctgactgtacaaagttttgtatttgcctacagaacttacacggagtagtaacagaagattgctgttcctagtatggtggatgcactggaaggggaagaattatactctgaccagtcacacgtcatctctcttgattatgttcatattctgccctcagtgaaaaaaaagagatttctttatgtcatttaacaaggatcaccatttatctgagcaagggtgacatttttgtttggtttatggtgtgaggtttgcttgtaaaaagcgggacatgtgttgtataaaactattctttgttcattttgtagtgaaacaatcatatagatgaaatgtttttttttcactttaggctggttcagttaggagtggatcggaggggattaagggctactttggtgactagtgaaataaaggggatccctaggggaggaatcccttgctattccctaggatccctttcatttctttaatcaccaaagcagccttgaaaaaaattaaatcccttcctattcaaaattgaataggaatagttttaattctgttc

SEQ ID NO: 66509 - DNA, 4501 bp, Zea Mays
tgaccgtgcaatacatccaaaataggaggagtgacgtgggaaagctccccgcgtcctcctcttcctttcctcctctcgtcgtccagggaaggatgcaggatgctctccgtccctcccccaccacctgaggaggaaagcaagaaatttttaaccaaccaaacgcaccaccgcgtgcctccgtgattcccagcccaattaacccggaacagaagagaagagctcgccacgccaccggtgggatcgccggacacctacgcgggcctggccttgggatccccggaacgcggggcgtgggaaaccgaggaggagcatgtcgcgggtggcgtcgctgtcgccgtccttgtcgggcgacgaggtggaggtggaggaggaagaggaggacgagggcgtcgacggctaccgcaagggcggctaccacgccgtccgccccggggaccagttcgccgccggccgctacgtcgcccagcggaagctcggctggggcaacttctccaccgtctggctcgccttcgacgtccagtcacagagatacgtggccctgaagatccaaaagagtgcgcctgagtttgcgcaagctgctcttcatgaaatcgagttcctgtcagagatcaccaagaaggacccattgaactgcaaatgcattattcagctgatagatcacttcaagcacacggggcctaacggacagcatatctgcctcgtctttgagttactgggagatagcttgcttaagctggtacagtacaaccggtacaaaggcatcgggcttgatagggtgaggcaaatatgcaagtcgatcttggtaggtcttgactacttgcacaatgagcttggcatcatccactcagatttgaagctcgagaaccttctccttctctcgaccattgatccctccaaggaccccattcgctctggcctcaaaccttgccttgagaggcctgagggaaaccctaacggtgaagctgggattaatgcgattgagaataagctaaagatgagagcaaggagggtgcttgcaaagcttgctgagaaaagaaaatcagctgtggaatcttcacgctcagaaaggagcttgggtggaattgatcttacatgcaagattgtagactttgggaatgcttgctgggccgacaaacaatttacagattttattcagacaaggcagtaccgggcaccagaggtcattctaggtgcaggatactcgttttctgttgacatgtggtcatttgcgtgtatcgcttttgagctcgcaaccggagaaatgctatttacacccaaggaaggccatggatacagtgaagatgaggatcacttggctttaatgatggaactacttggcaaggtgccgaagaagattgcaaccacgggaacacgatcaaaggaatattttgaccgccatggagatctgaagcggataagaaggctgaaattatcatccattgaacgtgtccttgttgacaaatacaaaatttctgaatctgatgcccgggaatttgccaattttctttgcccattacttgactttgcaccagagaagaggccaacagctttaggttgcctaaagcatccatggcttcattataacgaggataaaacttgtcagtctcttaacaataatgatgccaagaacattgacctggcccaaagcccagggagcatcaccagcggatattgtacaaatattgatttgacgagcaaaaaaggcggacccactggaacttgtgataagactgctgatgcaaaatataacaccagaagcattaccagcaatgctaccatgaacactgatgtacagcccaatattggaagcattgctaacggacttgccaaaaatgttgatgtaaatccgaacattggatccatcactaatagagatgccaagagttctgatatgaagccccacattggaagcatcaccatcagtaacgccaaaagctctaatgtaaagctggatacaggtaacatcactgatagaaatgccaaaactgtcgatataaagcccaactctgacatctctagcagagatgacaagagcagtaatgtggacaccaccacttccagtgttatcaacaaagatgcgaagcgcagcattagaagtgtcgttaattcttatatcaagaatttcgatgcaaagtgcaacactggaagcactgctaacagtgatgctagggacccatcagatacgaaatccagcactaaaattgttagtagtgctgataatgctaagtgtgtggacataaaaccgatcagtggaagtgataagagcaatgacaccagtgataagagcaatgacaccgtcgatgctaatgtgaaatccaactctggaattgttgcaaacagtgatgctagcaacaccgatgtacagactaacactggaagtgtcgacagcagcgatgattacagcattgactcaaaaccaaacattggccgggttgctgcaagcatacagaggttggagagcagtatggggaaatacagggccgacctttctcaagattgaggatctggcaggtaccagctggcgttattgtatatctctattcctgctgactgtacaaagttttgtatttgcctacagaacttacacggaggtgctatgtgagaggaagatggtacacaaagcagaagatgtgattgaagggattctcaaagctggcagttttgttcatgaacagtcccttcctgttgtcatgaagatgtatgttgatctaggattgcttgatgaggcgattgcattctttgagaaacattgccgaggtaaaggggtctcatccaagaacttcagtgcgatcatggatgtttttgcagggagaggtctgtgggaagaagctgaacatatcttctgctctgaaagaggagatgggaatgagaaggacattgtggaatataatgtgatgataaaggcttatggtcaggcaaagcagtatgacagagtctcttctttgtttgagagcatggaggaatctggtgttccatcagatgagtgcacatataattcgttgattcaaatgttttcttttggtggatttccacacagagctaagaagctgttaggtaaaatgaaagatgcaggatttgaaccgaaatgtgagacatactctgccatcattagaagttattctcgccattgcttggtaccggaggccatagatctgttcaatgaaatgaaggcatcaggtgttgagccgaatgtcattgtttatggaattttgattgacatgtttgcagagacagggaatgttaaggaagcacttcattatagtaacttgttggaacaatctggaatctctccaaaccatattgttctaacttctcttataaaagcctacagcaaatttaattcctggaaggaagcacaggatttgtattcaaggatgaatgacatggatggtggccctgacatcattgcctccaatgccatgctaaacctttatgcaaaacttgagatggtcactgaggcaaaagagatctttgacagcttaagaagaaataaccatgctgatgctgtttcatacactaccatggcatacctctacaagagcattggtttgcttagtgagtccattaggatcacacataaattacaaaaatcaggtttgctatctgattgtgcttcatgcaatgctgttatggcgtgttatggggctaagggcaacctaagagattgtgcagagttagtgcatcaaatggtggtggctaacattccaccagacgcgtcaacatttgaaatgatattttctctactgaaaaatggtcatgtttcaacaaaagaaattttacagctagaatcagcatatgatgatggcaagaagtctgccaagcaagctatcattgcattcttgttctccgtagctggcatgcatgatgctgcattagagatttgcgggaagatgttaatgccacagtcgacattggatgcatgtgcatataatgtttgcttcaaggtctatgcttcctctaggaaggtggaaaaagctttcagtttgttcatgtggatgcgtgatctcgggcttaaaccggacacatctacttgcaaccatttggccacttgttatgggagacttggagcattggaaggcgtgcatacaaatggttttactgaatacagaactagtgagcttagtatgccttcacataagaccatgcccagcagttcactcatatgatcatccaaaacattgttttgcactatagactgcactgtttgcaaactagagtttaaatatgggtataaatataggtaagctgttgaagatagcttaacacactggttgcttgtatagagtctggaaaaataatgttgcagttcagttagttaagaaatgatatgtaccaaacatataggatctttttatactttatacttcacaagaaaggttgacttagttgtaccttccgaaacttgaagcaaacatgtctggtgatcacaagtggactagattcgcttcaatatacagaaagccagataaattggaaaaagattagtatctttacttagtaa

SEQ ID NO: 66510 - DNA, 3037 bp, Zea Mays
gcaggatgctctccgtccctcccccaccacctgaggaggaaagcaagaaatttttaaccaaccaaacgcaccaccgcgtgcctccgtgattcccagcccaattaacccggaacagaagagaagagctcgccacgccaccggtgggatcgccggacacctacgcgggcctggccttgggatccccggaacgcggggcgtgggaaaccgaggaggagcatgtcgcgggtggcgtcgctgtcgccgtccttgtcgggcgacgaggtggaggtggaggaggaagaggaggacgagggcgtcgacggctaccgcaagggcggctaccacgccgtccgccccggggaccagttcgccgccggccgctacgtcgcccagcggaagctcggctggggcaacttctccaccgtctggctcgccttcgacgtccagtcacagagatacgtggccctgaagatccaaaagagtgcgcctgagtttgcgcaagctgctcttcatgaaatcgagttcctgtcagagatcaccaagaaggacccattgaactgcaaatgcattattcagctgatagatcacttcaagcacacggggcctaacggacagcatatctgcctcgtctttgagttactgggagatagcttgcttaagctggtacagtacaaccggtacaaaggcatcgggcttgatagggtgaggcaaatatgcaagtcgatcttggtaggtcttgactacttgcacaatgagcttggcatcatccactcagatttgaagctcgagaaccttctccttctctcgaccattgatccctccaaggaccccattcgctctggcctcaaaccttgccttgagaggcctgagggaaaccctaacggtgaagctgggattaatgcgattgagaataagctaaagatgagagcaaggagggtgcttgcaaagcttgctgagaaaagaaaatcagctgtggaatcttcacgctcagaaaggagcttgggtggaattgatcttacatgcaagattgtagactttgggaatgcttgctgggccgacaaacaatttacagattttattcagacaaggcagtaccgggcaccagaggtcattctaggtgcaggatactcgttttctgttgacatgtggtcatttgcgtgtatcgcttttgagctcgcaaccggagaaatgctatttacacccaaggaaggccatggatacagtgaagatgaggatcacttggctttaatgatggaactacttggcaaggtgccgaagaagattgcaaccacgggaacacgatcaaaggaatattttgaccgccatggagatctgaagcggataagaaggctgaaattatcatccattgaacgtgtccttgttgacaaatacaaaatttctgaatctgatgcccgggaatttgccaattttctttgcccattacttgactttgcaccagagaagaggccaacagctttaggttgcctaaagcatccatggcttcattataacgaggataaaacttgtcagtctcttaacaataatgatgccaagaacattgacctggcccaaagcccagggagcatcaccagcggatattgtacaaatattgatttgacgagcaaaaaaggcggacccactggaacttgtgataagactgctgatgcaaaatataacaccagaagcattaccagcaatgctaccatgaacactgatgtacagcccaatattggaagcattgctaacggacttgccaaaaatgttgatgtaaatccgaacattggatccatcactaatagagatgccaagagttctgatatgaagccccacattggaagcatcaccatcagtaacgccaaaagctctaatgtaaagctggatacaggtaacatcactgatagaaatgccaaaactgtcgatataaagcccaactctgacatctctagcagagatgacaagagcagtaatgtggacaccaccacttccagtgttatcaacaaagatgcgaagcgcagcattagaagtgtcgttaattcttatatcaagaatttcgatgcaaagtgcaacactggaagcactgctaacagtgatgctagggacccatcagatacgaaatccagcactaaaattgttagtagtgctgataatgctaagtgtgtggacataaaaccgatcagtggaagtgataagagcaatgacaccagtgataagagcaatgacaccgtcgatgctaatgtgaaatccaactctggaattgttgcaaacagtgatgctagcaacaccgatgtacagactaacactggaagtgtcgacagcagcgatgattacagcattgactcaaaaccaaacattggccgggttgctgcaagcatacagaggttggagagcagtatggggaaatacagggccgacctttctcaagattgaggatctggcaggtaccagctggcgttattgtatatctctattcctgctgactgtacaaagttttgtatttgcctacagaacttacacggagtgggtaaacgtggaatctctttgggaatatacttgtacatgcagtagtaacagaagattgctgttcctagtatggtggatgcactggaaggggaagaattatactctgaccagtcacacgtcatctctcttgattatgttcatattctgccctcagtgaaaaaaaagagatttctttatgtcatttaacaaggatcaccatttatctgagcaagggtgacatttttgtttggtttatggtgtgaggtttgcttgtaaaaagcgggacatgtgttgtataaaactattctttgttcattttgtagtgaaacaatcatatagatgaaatgtttttttttcactttaggctggttcagttaggagtggatcggaggggattaagggctactttggtgactagtgaaataaaggggatccctaggggaggaatcccttgctattccctaggatccctttcatttctttaatcaccaaagcagccttgaaaaaaattaaatcccttcctattcaaaattgaataggaatagttttaattctgttc

SEQ ID NO: 66511 - DNA, 2570 bp, Zea Mays
gattcgcctatgatgatttcctctgttctctgccctccggccgccggcgccgccgccggcgccgccggagcgggcgcgccaccgatcatagggtctcggtccagttccctccatcctcctcccccctccgcctcccgtatccacctcccccgcctaccgccgccaccttctccctattcctccagcacacccaccagccccttccccagccacgcttcctccgcactccaacccttcgacgaggttctctcctccatgtccccacgggaacagacctccctcctctcgcggcagcgctgctggcgccgcgccagggacctcttcaaccgcctgcgcgcgctccccggatacgcccccaaccccgtccatgacgccgtcctcctgcgccacctcgcccgcgcgcgccggtgggccgagctccaccgcgcctggatcgggatgcccttcccaccctccaacccggcctacgcagccctcgccgacgcactcgccaaggccgggttggcgcggggagccctcctcctgctccgccacatgcggacccggggtgtcgcgcctgatgaggtgtccatgaacaccttcgtccgcatcctcaaggacgagggccgccacgacgacgcgctcgctctcttccacagttggtgcgacggcaggttcgaggtgctatgtgagaggaagatggtacacaaagcagaagatgtgattgaagggattctcaaagctggcagttttgttcatgaacagtcccttcctgttgtcatgaagatgtatgttgatctaggattgcttgatgaggcgattgcattctttgagaaacattgccgaggtaaaggggtctcatccaagaacttcagtgcgatcatggatgtttttgcagggagaggtctgtgggaagaagctgaacatatcttctgctctgaaagaggagatgggaatgagaaggacattgtggaatataatgtgatgataaaggcttatggtcaggcaaagcagtatgacagagtctcttctttgtttgagagcatggaggaatctggtgttccatcagatgagtgcacatataattcgttgattcaaatgttttcttttggtggatttccacacagagctaagaagctgttaggtaaaatgaaagatgcaggatttgaaccgaaatgtgagacatactctgccatcattagaagttattctcgccattgcttggtaccggaggccatagatctgttcaatgaaatgaaggcatcaggtgttgagccgaatgtcattgtttatggaattttgattgacatgtttgcagagacagggaatgttaaggaagcacttcattatagtaacttgttggaacaatctggaatctctccaaaccatattgttctaacttctcttataaaagcctacagcaaatttaattcctggaaggaagcacaggatttgtattcaaggatgaatgacatggatggtggccctgacatcattgcctccaatgccatgctaaacctttatgcaaaacttgagatggtcactgaggcaaaagagatctttgacagcttaagaagaaataaccatgctgatgctgtttcatacactaccatggcatacctctacaagagcattggtttgcttagtgagtccattaggatcacacataaattacaaaaatcaggtttgctatctgattgtgcttcatgcaatgctgttatggcgtgttatggggctaagggcaacctaagagattgtgcagagttagtgcatcaaatggtggtggctaacattccaccagacgcgtcaacatttgaaatgatattttctctactgaaaaatggtcatgtttcaacaaaagaaattttacagctagaatcagcatatgatgatggcaagaagtctgccaagcaagctatcattgcattcttgttctccgtagctggcatgcatgatgctgcattagagatttgcgggaagatgttaatgccacagtcgacattggatgcatgtgcatataatgtttgcttcaaggtctatgcttcctctaggaaggtggaaaaagctttcagtttgttcatgtggatgcgtgatctcgggcttaaaccggacacatctacttgcaaccatttggccacttgttatgggagacttggagcattggaaggcgtgcatacaaatggttttactgaatacagaactagtgagcttagtatgccttcacataagaccatgcccagcagttcactcatatgatcatccaaaacattgttttgcactatagactgcactgtttgcaaactagagtttaaatatgggtataaatataggtaagctgttgaagatagcttaacacactggttgcttgtatagagtctggaaaaataatgttgcagttcagttagttaagaaatgatatgtaccaaacatataggatctttttatactttatacttcacaagaaaggttgacttagttgtaccttccgaaacttgaagcaaacatgtctggtgatcacaagtggactagattcgcttcaatatacagaaagccagataaattggaaaaagattagtatctttacttagtaa

SEQ ID NO: 66512 - DNA, 490 bp, Zea Mays
catgcacctccgaaatgccggaaagtgtcgtgcgtatgctatgcatgaaaccattgattttattgttattaattattaggactagttaattagcagtgacctatcattgagcaatccaccaaagtacttactagtagcagagggcaaaactttcctcgaaatgatgaggtgcataagtatgcatgtgtgagaaatgagaatggaaccaggcaaaaagactttgggaaatggattaataattaagtagtggtgacaagggggggcatggatgctgcttgatatggttccacttttttggtgatcagtggctaactagctagctaagtagtagtttggttttgacattgttatacatcttgctagctactagctataggttctgtctctacccaaccctaggtagcaacaataacatgtttttttaatttcatctcaagcaagcaatctcactagtacttctcacagctacatgttattatatgctgacaca

SEQ ID NO: 66513 - DNA, 1210 bp, Zea Mays
cacgctctagactgtctagcgggcctggcccgtctagccagccactcactcaaacggtgattccttctccgcggagggccacgggcacggcgacgcatccggcttccggccctcctgtccccggaggtcaccgccgccgtcttcgtgggcggccataccggccacgatgaatagcatcaagtcggctatcttctccggccatcggtcgcacccccacgtgggggcggcggcggtcccgcagcagcagctggggagcaccgcttcgttccactcgacacccattctgcagcggaagcacaagacccagtggcacaacagttggcgtgatgaagatgagaaaaatgctgcatctgctgggccttcatggtttagaggacatcgttgggtcagaaattcaagcaacaatggtttccgtacacacgatttttattacgggaatttcaaaagcaaaggaggatttgagttttgcacaagtgatgaggatgaaccagagaatctgtttcgtaatgtttttcgagaccagcacacatattattggtctttttcatctgataattttcagaggaactccaaacgtgctcgctcacaaaaatccagaaactggagttttgaaacagacgaggaggatgaagtatcagctccatcagaggtatctttggcacgacaagctcttgggttgagcacttctggtccgcttaaacttgaagatgttaaaagcgcataccgagcatgtgcacttagatggcatccagatcgccacaatggatcatctaagtctacagcggaggagaaattcaagcattgcagtgcagcatacaagaccttatgtgatagtttggccgctgcatagataattttgaatgaagatggactctggatgagccccttccaaactttctagctgcaaattctgaagagctgccacatgcttgtggtagctccgaccatcccaatcccaagaggcgggagtcgcatttcttggttattgaggcgattgagtcaattcaaaattgaccggataatatatgtactgtaccgtgtaaaattttttctcacagctcattgttgtattatttttatagatacgaagatattgttcacaccactcaataaattttcttggctgagttgtatcacaatttaggtttggatgttttccgtgggttgcatttgtcagtgttcaatgaaggtcatacatttagatattgcc

SEQ ID NO: 66514 - DNA, 1158 bp, Zea Mays
agccagccactcactcaaacggtgattccttctccgcggagggccacgggcacggcgacgcatccggcttccggccctcctgtccccggaggtcaccgccgccgtcttcgtgggcggccataccggccacgatgaatagcatcaagtcggctatcttctccggccatcggtcgcacccccacgtgggggcggcggcggtcccgcagcagcagctggggagcaccgcttcgttccactcgacacccattctgcagcggaagcacaagacccagtggcacaacagattcaactattatacgagacgtaggaggaacagagaaactaaaaggtcaatgctacggaacatgtcagaatatgcagagtctctctttcagagttggcgtgatgaagatgagaaaaatgctgcatctgctgggccttcatggtttagaggacatcgttgggtcagaaattcaagcaacaatggtttccgtacacacgatttttattacgggaatttcaaaagcaaagaggaactccaaacgtgctcgctcacaaaaatccagaaactggagttttgaaacagacgaggaggatgaagtatcagctccatcagaggtatctttggcacgacaagctcttgggttgagcacttctggtccgcttaaacttgaagatgttaaaagcgcataccgagcatgtgcacttagatggcatccagatcgccacaatggatcatctaagtctacagcggaggagaaattcaagcattgcagtgcagcatacaagaccttatgtgatagtttggccgctgcatagataattttgaatgaagatggactctggatgagccccttccaaactttctagctgcaaattctgaagagctgccacatgcttgtggtagctccgaccatcccaatcccaagaggcgggagtcgcatttcttggttattgaggcgattgagtcaattcaaaattgaccggataatatatgtactgtaccgtgtaaaattttttctcacagctcattgttgtattatttttatagatacgaagatattgttcacaccactcaataaattttcttggctgagttgtatcacaatttaggtttggatgttttccgtgggttgcatttgtcagtgttcaatgaaggtcatacatttagatattgcc

SEQ ID NO: 66515 - DNA, 1100 bp, Zea Mays
cagccactcactcaaacggtgattccttctccgcggagggccacgggcacggcgacgcatccggcttccggccctcctgtccccggaggtcaccgccgccgtcttcgtgggcggccataccggccacgatgaatagcatcaagtcggctatcttctccggccatcggtcgcacccccacgtgggggcggcggcggtcccgcagcagcagctggggagcaccgcttcgttccactcgacacccattctgcagcggaagcacaagacccagtggcacaacagattcaactattatacgagacgtaggaggaacagagaaactaaaaggtcaatgctacggaacatgtcagaatatgcagagtctctctttcagagttggcgtgatgaagatgagaaaaatgctgcatctgctgggccttcatggtttagaggacatcgttgggtcagaaattcaagcaacaatggtttccgtacacacgatttttattacgggaatttcaaaagcaaagaggaactccaaacgtgctcgctcacaaaaatccagaaactggagttttgaaacagacgaggaggatgaagtatcagctccatcagaggtatctttggcacgacaagctcttgggttgagcacttctggtccgcttaaacttgaagatgttaaaagcgctctacagcggaggagaaattcaagcattgcagtgcagcatacaagaccttatgtgatagtttggccgctgcatagataattttgaatgaagatggactctggatgagccccttccaaactttctagctgcaaattctgaagagctgccacatgcttgtggtagctccgaccatcccaatcccaagaggcgggagtcgcatttcttggttattgaggcgattgagtcaattcaaaattgaccggataatatatgtactgtaccgtgtaaaattttttctcacagctcattgttgtattatttttatagatacgaagatattgttcacaccactcaataaattttcttggctgagttgtatcacaatttaggtttggatgttttccgtgggttgcatttgtcagtgttcaatgaaggtcatacatttagatattgcc

SEQ ID NO: 66516 - DNA, 1277 bp, Zea Mays
ctcaaacggtgattccttctccgcggagggccacgggcacggcgacgcatccggcttccggccctcctgtccccggaggtcaccgccgccgtcttcgtgggcggccataccggccacgatgaatagcatcaagtcggctatcttctccggccatcggtcgcacccccacgtgggggcggcggcggtcccgcagcagcagctggggagcaccgcttcgttccactcgacacccattctgcagcggaagcacaagacccagtggcacaacagattcaactattatacgagacgtaggaggaacagagaaactaaaaggtcaatgctacggaacatgtcagaatatgcagagtctctctttcagagttggcgtgatgaagatgagaaaaatgctgcatctgctgggccttcatggtttagaggacatcgttgggtcagaaattcaagcaacaatggtttccgtacacacgatttttattacgggaatttcaaaagcaaaggaggatttgagttttgcacaagtgatgaggatgaaccagagaatctgtttcgtaatgtttttcgagaccagcacacatattattggtctttttcatctgataattttcagaggaactccaaacgtgctcgctcacaaaaatccagaaactggagttttgaaacagacgaggaggatgaagtatcagctccatcagaggtatctttggcacgacaagctcttgggttgagcacttctggtccgcttaaacttgaagatgttaaaagcgcataccgagcatgtgcacttagatggcatccagatcgccacaatggatcatctaaggtcctcactcagcatgcacaagtctacagcggaggagaaattcaagcattgcagtgcagcatacaagaccttatgtgatagtttggccgctgcatagataattttgaatgaagatggactctggatgagccccttccaaactttctagctgcaaattctgaagagctgccacatgcttgtggtagctccgaccatcccaatcccaagaggcgggagtcgcatttcttggttattgaggcgattgagtcaattcaaaattgaccggataatatatgtactgtaccgtgtaaaattttttctcacagctcattgttgtattatttttatagatacgaagatattgttcacaccactcaataaattttcttggctgagttgtatcacaatttaggtttggatgttttccgtgggttgcatttgtcagtgttcaatgaaggtcatacatttagatattgcc

SEQ ID NO: 66517 - DNA, 1192 bp, Zea Mays
gtgattccttctccgcggagggccacgggcacggcgacgcatccggcttccggccctcctgtccccggaggtcaccgccgccgtcttcgtgggcggccataccggccacgatgaatagcatcaagtcggctatcttctccggccatcggtcgcacccccacgtgggggcggcggcggtcccgcagcagcagctggggagcaccgcttcgttccactcgacacccattctgcagcggaagcacaagacccagtggcacaacagattcaactattatacgagacgtaggaggaacagagaaactaaaaggtcaatgctacggaacatgtcagaatatgcagagtctctctttcagagttggcgtgatgaagatgagaaaaatgctgcatctgctgggccttcatggtttagaggacatcgttgggtcagaaattcaagcaacaatggtttccgtacacacgatttttattacgggaatttcaaaagcaaaggaggatttgagttttgcacaagtgatgaggatgaaccagagaatctgtttcgtaatgtttttcgagaccagcacacatattattggtctttttcatctgataattttcagaggaactccaaacgtgctcgctcacaaaaatccagaaactggagttttgaaacagacgaggaggatgaagtatcagctccatcagaggtatctttggcacgacaagctcttgggttgagcacttctggtccgcttaaacttgaagatgttaaaagcgctctacagcggaggagaaattcaagcattgcagtgcagcatacaagaccttatgtgatagtttggccgctgcatagataattttgaatgaagatggactctggatgagccccttccaaactttctagctgcaaattctgaagagctgccacatgcttgtggtagctccgaccatcccaatcccaagaggcgggagtcgcatttcttggttattgaggcgattgagtcaattcaaaattgaccggataatatatgtactgtaccgtgtaaaattttttctcacagctcattgttgtattatttttatagatacgaagatattgttcacaccactcaataaattttcttggctgagttgtatcacaatttaggtttggatgttttccgtgggttgcatttgtcagtgttcaatgaaggtcatacatttagatattgcc

SEQ ID NO: 66518 - DNA, 1632 bp, Zea Mays
aaaacaccagtggccctacgcccaggccctttttccccgctctgctctgcacgcccctctcctccctagtccctccccctacccccgcccgtcaaagcgagagcgccgtatcacctgtctctccgtccaccgccgtctcgatccgcgcccaaagatacctttcccccaccccttcctcgcgccgccgttttggtgcgaccatgacggcggagggggaggccaagaacccgtcggccggtggcggaggggataacccccagcaccagcaggctgcgccggcgccggcgccggcacagggggaagtggcgcaggaggctgcagtgcaggggacgggacaagagcaggagcgggacaaggcggatcgagaggtgcagggcggcgcgggggagaaggacgacggcgcgtgcagagatctggtcctggtcgaggatccggaggtcctcgccgtcgaggatccggaggaagctgcagcaaccgcagcactccaggaagaaatgaaagcgcttgtggcatcgatccctgatggtgctggagcagcattcacagccatgcagcttcaggagctagagcagcagtcccgggtgtaccagtacatggctgcccgagtacctgtgcctactcacctcgtcttcccggtatggaagagtgtgaccggtgcatcctctgaaggcgcccagaagtaccctacttgtatgcttcaaacctgtgtcgtcatatcttgatgggcttagcaacgctctgcttggactttgggaagaacccggaaccagaaccagggaggtgtcggcgaacagatggtaagaaatggcgatgttggagaaacactatcccaaacgagaaatactgcgaacgtcacatgcatcgtggccgcaagcgtcctgtacaggttttcctggaggacgacgagcccgattctgcttcagggtcaaaacccgccgctcctggcaaggctaccgaaggtgccaagaaggccgatgacaagagcccaagcagcaagaagcttgcagtggcagcgcctgccgctgtgcagtctacatagtcaattgcagctttagtagcccgcagaaagagcataacagcgctggcaactggcgccttcttattgcatgtaatccccagaagactctagcgtggtcgtggtcgtaggtataacctcgttcccagcgtctgtgggaggaagccgcaacaacttccccttagctgtcaactgaaaatttcactctttaggtgtatagtttgatttagctttgtcgcggtaggcgatgcggcatgatattataaatcctgcctgaactgacaagacaaaatcgaattgtgacccaagaagccggcggaagaacttgtgaaattgcattgacgtgctttttggtgtccgcctttattgggctgtgcgcaattgtgtgattcatcagttgtataacgaagtgtaagatccataattttatgccttgtggaggttaccacctgatgtgcagtgattatgtcattatgatgatagtagggcaaatgtaattggctgattgaatgacaaagcctgtttattgagacggattggcagtgagattctgttgtggcacaactcattttcgtgtcggcaacaggttacacgtgcctaaatacggggaatcgtac

SEQ ID NO: 66519 - DNA, 1289 bp, Zea Mays
aaaacaccagtggccctacgcccaggccctttttccccgctctgctctgcacgcccctctcctccctagtccctccccctacccccgcccgtcaaagcgagagcgccgtatcacctgtctctccgtccaccgccgtctcgatccgcgcccaaagatacctttcccccaccccttcctcgcgccgccgttttggtgcgaccatgacggcggagggggaggccaagaacccgtcggccggtggcggaggggataacccccagcaccagcaggctgcgccggcgccggcgccggcacagggggaagtggcgcaggaggctgcagtgcaggggacgggacaagagcaggagcgggacaaggcggatcgagaggtgcagggcggcgcgggggagaaggacgacggcgcgtgcagagatctggtcctggtcgaggatccggaggtcctcgccgtcgaggatccggaggaagtgatgggcttagcaacgctctgcttggactttgggaagaacccggaaccagaaccagggaggtgtcggcgaacagatggttttcctggaggacgacgagcccgattctgcttcagggtcaaaacccgccgctcctggcaaggctaccgaaggtgccaagaaggccgatgacaagagcccaagcagcaagaagcttgcagtggcagcgcctgccgctgtgcagtctacatagtcaattgcagctttagtagcccgcagaaagagcataacagcgctggcaactggcgccttcttattgcatgtaatccccagaagactctagcgtggtcgtggtcgtaggtataacctcgttcccagcgtctgtgggaggaagccgcaacaacttccccttagctgtcaactgaaaatttcactctttaggtgtatagtttgatttagctttgtcgcggtaggcgatgcggcatgatattataaatcctgcctgaactgacaagacaaaatcgaattgtgacccaagaagccggcggaagaacttgtgaaattgcattgacgtgctttttggtgtccgcctttattgggctgtgcgcaattgtgtgattcatcagttgtataacgaagtgtaagatccataattttatgccttgtggaggttaccacctgatgtgcagtgattatgtcattatgatgatagtagggcaaatgtaattggctgattgaatgacaaagcctgtttattgagacggattggcagtgagattctgttgtggcacaactcattttcgtgtcggcaacaggttacacgtgcctaaatacggggaatcgtac

SEQ ID NO: 66520 - DNA, 1431 bp, Zea Mays
aaaacaccagtggccctacgcccaggccctttttccccgctctgctctgcacgcccctctcctccctagtccctccccctacccccgcccgtcaaagcgagagcgccgtatcacctgtctctccgtccaccgccgtctcgatccgcgcccaaagatacctttcccccaccccttcctcgcgccgccgctgcgccggcgccggcgccggcacagggggaagtggcgcaggaggctgcagtgcaggggacgggacaagagcaggagcgggacaaggcggatcgagaggtgcagggcggcgcgggggagaaggacgacggcgcgtgcagagatctggtcctggtcgaggatccggaggtcctcgccgtcgaggatccggaggaagctgcagcaaccgcagcactccaggaagaaatgaaagcgcttgtggcatcgatccctgatggtgctggagcagcattcacagccatgcagcttcaggagctagagcagcagtcccgggtgtaccagtacatggctgcccgagtacctgtgcctactcacctcgtcttcccggtatggaagagtgtgaccggtgcatcctctgaaggcgcccagaagtaccctactttgatgggcttagcaacgctctgcttggactttgggaagaacccggaaccagaaccagggaggtgtcggcgaacagatggttttcctggaggacgacgagcccgattctgcttcagggtcaaaacccgccgctcctggcaaggctaccgaaggtgccaagaaggccgatgacaagagcccaagcagcaagaagcttgcagtggcagcgcctgccgctgtgcagtctacatagtcaattgcagctttagtagcccgcagaaagagcataacagcgctggcaactggcgccttcttattgcatgtaatccccagaagactctagcgtggtcgtggtcgtaggtataacctcgttcccagcgtctgtgggaggaagccgcaacaacttccccttagctgtcaactgaaaatttcactctttaggtgtatagtttgatttagctttgtcgcggtaggcgatgcggcatgatattataaatcctgcctgaactgacaagacaaaatcgaattgtgacccaagaagccggcggaagaacttgtgaaattgcattgacgtgctttttggtgtccgcctttattgggctgtgcgcaattgtgtgattcatcagttgtataacgaagtgtaagatccataattttatgccttgtggaggttaccacctgatgtgcagtgattatgtcattatgatgatagtagggcaaatgtaattggctgattgaatgacaaagcctgtttattgagacggattggcagtgagattctgttgtggcacaactcattttcgtgtcggcaacaggttacacgtgcctaaatacggggaatcgtac

SEQ ID NO: 66521 - DNA, 2180 bp, Zea Mays
ccgctcacgagcactgaaaaactgccaaaaccgagcgaaccacacaccccttgtcaacgctgtggcggcacggcaggcgatccaaggaaagcgatgacggcgtacgaccccaaagacgacgtcgaccgcctcttcgcctgcttcaaatgcggcgtctcccctcccaagtcggccttcagggagaggccgctcccgcaggccaagaagtcgcggggctcgcccgtgtcggagactgccggtagcggtggccggagctcctccgatgtttccaccacgccggatgccgcagcggacaagcgcgcggcgccgtcgtcggccaaatctacaggccgcaagcacatgtccccattcgtgttctacggctccccgcggggcgtccaagtcaaaaggccgcagagcttcctgaggctgctgcacgtgatccgcattgatctcaagaagcaaaccgacttcaaccccagggatgttgtctgggctacatttcctaggcaagacgaggcgatcaggttctctaaggcatacgcacataccaatgtcttttgctatcaagagcatatgtccggtacgcgaaggttccttgtgtctacatacgacgagttctggaaaaggtacaacgatatggattccaaaattcgccatcattatgaggttatccaggaggcttcgccttgccacatttactttgatcttgagtttgatacaagattgaacaagaagagagacacagatgaaatggtggatatattgattgctgttgtattcagtgctttgcgtgataaatattctattgaaggacatgaagagtggatcacagagctagactcatccactgaagttttcacgccatctaatcattcgtatacccaagattgcatttaaagacaactcccatgttggtgcgtttgtctgtgaggtctgttcacaaattgcagctcagcgtacaaccaatcatgaccttgataaactttatattacaaaagaaatcagctcaggtcctgttgatcggctctttatggatactgcagtttactctcgtaatcgttgtttccgtttagttttctcatcaaagtctgggaagaaatcatttcttgtgccgaccaaacgtttcaaatgccaggaactgaatgataaagatgtctttatggagtcacttatttgtagactggatgataactgtgaaaaactgttgatatgcaaactagacttggaatgcaagaaaacattgcattttgactctgaaatcagcatgtctcaaattcaaggaaggagctacaggcaccgcattgctacatatcaaaatgatttttctcatgcatatacttgtggaaaatctccttttccacctttggatggttttatagaatccatcgcttcttttggaaatgtttcagggaaaattcgatcttggttctggttttcacaggagagtttgataatctacaacatgttacgaagcagatactgtgagaatattggaagagagcataagggcaatcatgtgttttacattgttgatttccagagagcagcatactaccaaaagtgtcatgaccctgattgtcgaggttaccgttctcccctgcgtcctgtaccttgggatgtgattcctgagctagtggagtcagaccagatagaataccagggccatgccatggaaaccaacattgaaaacagcagcatgagcggtaaatcaatcacgggggctggtgctgaggatcctgaatggtgggaacaagtggtggaatttgcggacagcatcgagaacatggatcattctttggctaccttggaagtgaaatctgacgccagcatcgagaacatggatcatgctcccagcttgtgtgcctcggaagaaaacggttgttttgaagctgaccctgagtgggtgatgcacgcggaaagagccatggagcagtacgaggaacaaagcggaggatcgcagtcacacgcaacttcccaagtctttgatctcgaggatgtttaacagtagatgctgttctaaacaatttgaacagtgacttgtaaatatacgttttatgatatattttaatctaaaaatatgtagataaataataaaaatggatattatgaatgaagcagtgagaacataatctgtatacgtgttcatgttttaacatcgtgttaacataaacaatataaaacaagaagttttaggaagt

SEQ ID NO: 66522 - DNA, 2162 bp, Zea Mays
ccgctcacgagcactgaaaaactgccaaaaccgagcgaaccacacaccccttgtcaacgctgtggcggcacggcaggcgatccaaggaaagcgatgacggcgtacgaccccaaagacgacgtcgaccgcctcttcgcctgcttcaaatgcggcgtctcccctcccaagtcggccttcagggagaggccgctcccgcaggccaagaagtcgcggggctcgcccgtgtcggagactgccggtagcggtggccggagctcctccgatgtttccaccacgccggatgccgcagcggacaagcgcgcggcgccgtcgtcggccaaatctacaggccgcaagcacatgtccccattcgtgttctacggctccccgcggggcgtccaagtcaaaaggccgcagagcttcctgaggctgctgcacgtgatccgcattgatctcaagaagcaaaccgacttcaaccccagggatgttgtctgggctacatttcctaggcaagacgaggcgatcaggttctctaaggcatacgcacataccaatgtcttttgctatcaagagcatatgtccggtacgcgaaggttccttgtgtctacatacgacgagttctggaaaaggtacaacgatatggattccaaaattcgccatcattatgaggttatccaggaggcttcgccttgccacatttactttgatcttgagtttgatacaagattgaacaagaagagagacacagatgaaatggtggatatattgattgctgttgtattcagtgctttgcgtgataaatattctattgaaggacatgaagagtggatcacagagctagactcatccactgaagaaaagttttcacgccatctaatcattcgtatacccaagattgcatttaaagacaactcccatgttggtgcgtttgtctgtgaggtctgttcacaaattgcagctcagcgtacaaccaatcatgaccttgataaactttatattacaaaagaaatcagctcaggtcctgttgatcggctctttatggatactgcagtttactctcgtaatcgttgtttccgtttagttttctcatcaaagtctgggaagaaatcatttcttgtgccgaccaaacgtttcaaatgccaggaactgaatgataaagatgtctttatggagtcacttatttgtagactggatgataactgtgaaaaactgttgatatgcaaactagacttggaatgcaagaaaacattgcattttgactctgaaatcagcatgtctcaaattcaaggaaggagctacaggcaccgcattgctacatatcaaaatgatttttctcatgcatatacttgtggaaaatctccttttccacctttggatggttttatagaatccatcgcttcttttggaaatgtttcagggaaaattcgatcttggttctggttttcacaggagagtttgataatctacaacatgttacgaagcagatactgtgagaatattggaagagagcataagggcaatcatgagagcagcatactaccaaaagtgtcatgaccctgattgtcgaggttaccgttctcccctgcgtcctgtaccttgggatgtgattcctgagctagtggagtcagaccagatagaataccagggccatgccatggaaaccaacattgaaaacagcagcatgagcggtaaatcaatcacgggggctggtgctgaggatcctgaatggtgggaacaagtggtggaatttgcggacagcatcgagaacatggatcattctttggctaccttggaagtgaaatctgacgccagcatcgagaacatggatcatgctcccagcttgtgtgcctcggaagaaaacggttgttttgaagctgaccctgagtgggtgatgcacgcggaaagagccatggagcagtacgaggaacaaagcggaggatcgcagtcacacgcaacttcccaagtctttgatctcgaggatgtttaacagtagatgctgttctaaacaatttgaacagtgacttgtaaatatacgttttatgatatattttaatctaaaaatatgtagataaataataaaaatggatattatgaatgaagcagtgagaacataatctgtatacgtgttcatgttttaacatcgtgttaacataaacaatataaaacaagaagttttaggaagt

SEQ ID NO: 66523 - DNA, 2139 bp, Zea Mays
ccgctcacgagcactgaaaaactgccaaaaccgagcgaaccacacaccccttgtcaacgctgtggcggcacggcaggcgatccaaggaaagcgatgacggcgtacgaccccaaagacgacgtcgaccgcctcttcgcctgcttcaaatgcggcgtctcccctcccaagtcggccttcagggagaggccgctcccgcaggccaagaagtcgcggggctcgcccgtgtcggagactgccggtagcggtggccggagctcctccgatgtttccaccacgccggatgccgcagcggacaagcgcgcggcgccgtcgtcggccaaatctacaggccgcaagcacatgtccccattcgtgttctacggctccccgcggggcgtccaagtcaaaaggccgcagagcttcctgaggctgctgcacgtgatccgcattgatctcaagaagcaaaccgacttcaaccccagggatgttgtctgggctacatttcctaggcaagacgaggcgatcaggttctctaaggcatacgcacataccaatgtcttttgctatcaagagcatatgtccggtacaacgatatggattccaaaattcgccatcattatgaggttatccaggaggcttcgccttgccacatttactttgatcttgagtttgatacaagattgaacaagaagagagacacagatgaaatggtggatatattgattgctgttgtattcagtgctttgcgtgataaatattctattgaaggacatgaagagtggatcacagagctagactcatccactgaagaaaagttttcacgccatctaatcattcgtatacccaagattgcatttaaagacaactcccatgttggtgcgtttgtctgtgaggtctgttcacaaattgcagctcagcgtacaaccaatcatgaccttgataaactttatattacaaaagaaatcagctcaggtcctgttgatcggctctttatggatactgcagtttactctcgtaatcgttgtttccgtttagttttctcatcaaagtctgggaagaaatcatttcttgtgccgaccaaacgtttcaaatgccaggaactgaatgataaagatgtctttatggagtcacttatttgtagactggatgataactgtgaaaaactgttgatatgcaaactagacttggaatgcaagaaaacattgcattttgactctgaaatcagcatgtctcaaattcaaggaaggagctacaggcaccgcattgctacatatcaaaatgatttttctcatgcatatacttgtggaaaatctccttttccacctttggatggttttatagaatccatcgcttcttttggaaatgtttcagggaaaattcgatcttggttctggttttcacaggagagtttgataatctacaacatgttacgaagcagatactgtgagaatattggaagagagcataagggcaatcatgtgttttacattgttgatttccagagagcagcatactaccaaaagtgtcatgaccctgattgtcgaggttaccgttctcccctgcgtcctgtaccttgggatgtgattcctgagctagtggagtcagaccagatagaataccagggccatgccatggaaaccaacattgaaaacagcagcatgagcggtaaatcaatcacgggggctggtgctgaggatcctgaatggtgggaacaagtggtggaatttgcggacagcatcgagaacatggatcattctttggctaccttggaagtgaaatctgacgccagcatcgagaacatggatcatgctcccagcttgtgtgcctcggaagaaaacggttgttttgaagctgaccctgagtgggtgatgcacgcggaaagagccatggagcagtacgaggaacaaagcggaggatcgcagtcacacgcaacttcccaagtctttgatctcgaggatgtttaacagtagatgctgttctaaacaatttgaacagtgacttgtaaatatacgttttatgatatattttaatctaaaaatatgtagataaataataaaaatggatattatgaatgaagcagtgagaacataatctgtatacgtgttcatgttttaacatcgtgttaacataaacaatataaaacaagaagttttaggaagt

SEQ ID NO: 66524 - DNA, 1791 bp, Zea Mays
ccgctcacgagcactgaaaaactgccaaaaccgagcgaaccacacaccccttgtcaacgctgtggcggcacggcaggcgatccaaggaaagcgatgacggcgtacgaccccaaagacgacgtcgaccgcctcttcgcctgcttcaaatgcggcgtctcccctcccaagtcggccttcagggagaggccgctcccgcaggccaagaagtcgcggggctcgcccgtgtcggagactgccggtagcggtggccggagctcctccgatgtttccaccacgccggatgccgcagcggacaaggtacaacgatatggattccaaaattcgccatcattatgaggttatccaggaggcttcgccttgccacatttactttgatcttgagtttgatacaagattgaacaagaagagagacacagatgaaatggtggatatattgattgctgttgtattcagtgctttgcgtgataaatattctattgaaggacatgaagagtggatcacagagctagactcatccactgaaggtctgttcacaaattgcagctcagcgtacaaccaatcatgaccttgataaactttatattacaaaagaaatcagctcaggtcctgttgatcggctctttatggatactgcagtttactctcgtaatcgttgtttccgtttagttttctcatcaaagtctgggaagaaatcatttcttgtgccgaccaaacgtttcaaatgccaggaactgaatgataaagatgtctttatggagtcacttatttgtagactggatgataactgtgaaaaactgttgatatgcaaactagacttggaatgcaagaaaacattgcattttgactctgaaatcagcatgtctcaaattcaaggaaggagctacaggcaccgcattgctacatatcaaaatgatttttctcatgcatatacttgtggaaaatctccttttccacctttggatggttttatagaatccatcgcttcttttggaaatgtttcagggaaaattcgatcttggttctggttttcacaggagagtttgataatctacaacatgttacgaagcagatactgtgagaatattggaagagagcataagggcaatcatgtgttttacattgttgatttccagagagcagcatactaccaaaagtgtcatgaccctgattgtcgaggttaccgttctcccctgcgtcctgtaccttgggatgtgattcctgagctagtggagtcagaccagatagaataccagggccatgccatggaaaccaacattgaaaacagcagcatgagcggtaaatcaatcacgggggctggtgctgaggatcctgaatggtgggaacaagtggtggaatttgcggacagcatcgagaacatggatcattctttggctaccttggaagtgaaatctgacgccagcatcgagaacatggatcatgctcccagcttgtgtgcctcggaagaaaacggttgttttgaagctgaccctgagtgggtgatgcacgcggaaagagccatggagcagtacgaggaacaaagcggaggatcgcagtcacacgcaacttcccaagtctttgatctcgaggatgtttaacagtagatgctgttctaaacaatttgaacagtgacttgtaaatatacgttttatgatatattttaatctaaaaatatgtagataaataataaaaatggatattatgaatgaagcagtgagaacataatctgtatacgtgttcatgttttaacatcgtgttaacataaacaatataaaacaagaagttttaggaagt

SEQ ID NO: 66525 - DNA, 1442 bp, Zea Mays
caaaaacctaaatgatgagctggcgagataacctgtgcaggcgtctagattatgtcataccgttcaatgaaaatcaggaatctattcgtactgatgagctggtctgttcacaaattgcagctcagcgtacaaccaatcatgaccttgataaactttatattacaaaagaaatcagctcaggtcctgttgatcggctctttatggatactgcagtttactctcgtaatcgttgtttccgtttagttttctcatcaaagtctgggaagaaatcatttcttgtgccgaccaaacgtttcaaatgccaggaactgaatgataaagatgtctttatggagtcacttatttgtagactggatgataactgtgaaaaactgttgatatgcaaactagacttggaatgcaagaaaacattgcattttgactctgaaatcagcatgtctcaaattcaaggaaggagctacaggcaccgcattgctacatatcaaaatgatttttctcatgcatatacttgtggaaaatctccttttccacctttggatggttttatagaatccatcgcttcttttggaaatgtttcagggaaaattcgatcttggttctggttttcacaggagagtttgataatctacaacatgttacgaagcagatactgtgagaatattggaagagagcataagggcaatcatgtgttttacattgttgatttccagagagcagcatactaccaaaagtgtcatgaccctgattgtcgaggttaccgttctcccctgcgtcctgtaccttgggatgtgattcctgagctagtggagtcagaccagatagaataccagggccatgccatggaaaccaacattgaaaacagcagcatgagcggtaaatcaatcacgggggctggtgctgaggatcctgaatggtgggaacaagtggtggaatttgcggacagcatcgagaacatggatcattctttggctaccttggtttgtagtccttgttgcttctgccgctcttaaactgttgaattgtgctagcatactgatccatttatgcacaggaagtgaaatctgacgccagcatcgagaacatggatcatgctcccagcttgtgtgcctcggaagaaaacggttgttttgaagctgaccctgagtgggtgatgcacgcggaaagagccatggagcagtacgaggaacaaagcggaggatcgcagtcacacgcaacttcccaagtctttgatctcgaggatgtttaacagtagatgctgttctaaacaatttgaacagtgacttgtaaatatacgttttatgatatattttaatctaaaaatatgtagataaataataaaaatggatattatgaatgaagcagtgagaacataatctgtatacgtgttcatgttttaacatcgtgttaacataaacaatataaaacaagaagttttaggaagt

SEQ ID NO: 66526 - DNA, 1088 bp, Zea Mays
tatctcctatctccagcagctcctccagacctccacctctctatggcgcgcctgctcctcttcccatcccaagcgtgcgtcgatcctggccgccacctcctcctccacccgccggtctccaggccccgtgctgtccggtctgggcctcctcccgccgcgccacgccgcaccggggtcgtctctcttcccggccgttgcccaccgcccctttgctggaaccaccatccatttcttccttgcagatcatcaaagagaggatgggtcgtttttgcttcagaaaacgtacaaggatgaaaggagaagtgggaatttgcttctgcgattcagtgcactcccatattgcactatggcttggttgagcactgctcaattagcacaatctagtgttggggaaaagctaaatatggtttatgaggtcggggagctgtttgagctgggaattcagctgtcttatctgctcatacttattggactgcttggagctggtacattttttgttatccgtcaggttcttgttcgtagggagcttgatctttctgccaaagagttgcaagaacaagtgagaagcggtgatgcaagtgctactgagtattttgagcttggagcagtcatgctacggagaaaattttatccagctgctatcaaatatctgcagcaagcaattgacaaatgggacagagacgagcaagatcttgcgcaggtctacaatgccctgggggtcagctacaagcgagagaacaaacttgacaaggcgattcagcagtttcagaaggccgtggagctccagccaggctatgtgacagcttggaacaacctgggtgacgcatatgagcagcagaaggacctgaaatcggctctcaaggccttcgaggaggtcctcctctttgatcccaacaacaaggttgcaaggccacgcgtcgatgacctcaggccgcgcgtgagcatgtacaagggtgtgcctgtaaaatccgaaaagcgatagctattcttttttggtggtaaatcatgcatctgtctagtccccagaatagcggttgtttatttttgaacggtagcatttgtaaacatgatgagatgtgtagtagcat

SEQ ID NO: 66527 - DNA, 1084 bp, Zea Mays
tatctcctatctccagcagctcctccagacctccacctctctatggcgcgcctgctcctcttcccatcccaagcgtgcgtcgatcctggccgccacctcctcctccacccgccggtctccaggccccgtgctgtccggtctgggcctcctcccgccgcgccacgccgcaccggggtcgtctctcttcccggccgttgcccaccgcccctttgctggaaccaccatccatttcttccttatcatcaaagagaggatgggtcgtttttgcttcagaaaacgtacaaggatgaaaggagaagtgggaatttgcttctgcgattcagtgcactcccatattgcactatggcttggttgagcactgctcaattagcacaatctagtgttggggaaaagctaaatatggtttatgaggtcggggagctgtttgagctgggaattcagctgtcttatctgctcatacttattggactgcttggagctggtacattttttgttatccgtcaggttcttgttcgtagggagcttgatctttctgccaaagagttgcaagaacaagtgagaagcggtgatgcaagtgctactgagtattttgagcttggagcagtcatgctacggagaaaattttatccagctgctatcaaatatctgcagcaagcaattgacaaatgggacagagacgagcaagatcttgcgcaggtctacaatgccctgggggtcagctacaagcgagagaacaaacttgacaaggcgattcagcagtttcagaaggccgtggagctccagccaggctatgtgacagcttggaacaacctgggtgacgcatatgagcagcagaaggacctgaaatcggctctcaaggccttcgaggaggtcctcctctttgatcccaacaacaaggttgcaaggccacgcgtcgatgacctcaggccgcgcgtgagcatgtacaagggtgtgcctgtaaaatccgaaaagcgatagctattcttttttggtggtaaatcatgcatctgtctagtccccagaatagcggttgtttatttttgaacggtagcatttgtaaacatgatgagatgtgtagtagcat

SEQ ID NO: 66528 - DNA, 1118 bp, Zea Mays
tatctcctatctccagcagctcctccagacctccacctctctatggcgcgcctgctcctcttcccatcccaagcgtgcgtcgatcctggccgccacctcctcctccacccgccggtctccaggccccgtgctgtccggtctgggcctcctcccgccgcgccacgccgcaccggggtcgtctctcttcccggccgttgcccaccgcccctttgctggaaccaccatccatttcttccttgaaggcagatcatcaaagagaggatgggtcgtttttgcttcagaaaacgtacaagaaatttcttctcaccttcctcgcaaggatgaaaggagaagtgggaatttgcttctgcgattcagtgcactcccatattgcactatggcttggttgagcactgctcaattagcacaatctagtgttggggaaaagctaaatatggtttatgaggtcggggagctgtttgagctgggaattcagctgtcttatctgctcatacttattggactgcttggagctggtacattttttgttatccgtcaggttcttgttcgtagggagcttgatctttctgccaaagagttgcaagaacaagtgagaagcggtgatgcaagtgctactgagtattttgagcttggagcagtcatgctacggagaaaattttatccagctgctatcaaatatctgcagcaagcaattgacaaatgggacagagacgagcaagatcttgcgcaggtctacaatgccctgggggtcagctacaagcgagagaacaaacttgacaaggcgattcagcagtttcagaaggccgtggagctccagccaggctatgtgacagcttggaacaacctgggtgacgcatatgagcagcagaaggacctgaaatcggctctcaaggccttcgaggaggtcctcctctttgatcccaacaacaaggttgcaaggccacgcgtcgatgacctcaggccgcgcgtgagcatgtacaagggtgtgcctgtaaaatccgaaaagcgatagctattcttttttggtggtaaatcatgcatctgtctagtccccagaatagcggttgtttatttttgaacggtagcatttgtaaacatgatgagatgtgtagtagcat

SEQ ID NO: 66529 - DNA, 847 bp, Zea Mays
atcgcagctccccttcgatgtcgcacgcccgcgcctccccgctgtggcgctgtcccctccctggcacccaccctcacaaagcatcagcctctccaatcagacgcgagccacccaccgcgcgacctcagggtgcctgtgcctgctcccgctgttccttcctcatggccaccgcctgccacctcgccgcgccgctcggcctcgccccgttgccccgcggctgcgcctctgctggcgtcgtggccgtcgtccggtgcggctccaagatcccgagaggcgttgctgtcagggcgacgtccggcggcgagggcgccacggaggaggtgccggagattgtgaaggctgcgcaggacgcgtgggacaaagttgaggacaagtacgccgtggccaccatcggtgtcgctgccatcgtcgcgctctggacggtagtaggtgccatcaaggccatcgacaagcttcctcttctgcctggtgtccttgagattgttggaattgggtatacagggggaggctctgatcggcaaaatcaagagcacttacaaagaaatcaccgggagcagcaactgatcgaacatcatttacaagatgggttcttaagcatatggtagaattgcatccgtaagcactgaagctgccatgcaagtgaaagtgcttctggtcccgacctcagtcagagaaaaaaaactctgcagttgagcaagccgttttactttgtttcagtgtaatatttatgacgtattcccagttctttttccggactactgtttactacgaaaatcccgatctgtgtaaaaatgtgctgcaacaaattcaaaagaaaacacaaatagtacaacctcatgatgttcgt

SEQ ID NO: 66530 - DNA, 901 bp, Zea Mays
atcgcagctccccttcgatgtcgcacgcccgcgcctccccgctgtggcgctgtcccctccctggcacccaccctcacaaagcatcagcctctccaatcagacgcgagccacccaccgcgcgacctcagggtgcctgtgcctgctcccgctgttccttcctcatggccaccgcctgccacctcgccgcgccgctcggcctcgccccgttgccccgcggctgcgcctctgctggcgtcgtggccgtcgtccggtgcgctcggtcgtcaggctccaagatcccgagaggcgttgctgtcagggcgacgtccggcggcgagggcgccacggaggaggtgccggagattgtgaaggctgcgcaggacgcggcagtgggacaaagttgaggacaagtacgccgtggccaccatcggtgtcgctgccatcgtcgcgctctggacggtagtaggtgccatcaaggccatcgacaagcttcctcttctgcctggtgtccttgagattgttggaattgggtatacagggtggttcacataccgtaacctcgtcttccagccagacagggaggctctgatcggcaaaatcaagagcacttacaaagaaatcaccgggagcagcaactgatcgaacatcatttacaagatgggttcttaagcatatggtagaattgcatccgtaagcactgaagctgccatgcaagtgaaagtgcttctggtcccgacctcagtcagagaaaaaaaactctgcagttgagcaagccgttttactttgtttcagtgtaatatttatgacgtattcccagttctttttccggactactgtttactacgaaaatcccgatctgtgtaaaaatgtgctgcaacaaattcaaaagaaaacacaaatagtacaacctcatgatgttcgt

SEQ ID NO: 66531 - DNA, 3355 bp, Zea Mays
ctgctccgctcacgacgttcctctctatgacaagtggggcttcattctccacgtgacccacatgtcagcgcgagaacggcgtgggtgatacgcctcggaggcagagaggcccaggaggactgaaggagttgggaagactcaagtggtacttgttctcggagttggcgctctccttctcggcgtgggagagagagagagagtgagagacacagaaagggagaaaaaagtgtagaaagagagaggaagtgaagggagcccagacaattcaaatccctactagccgagggccgaggcttccgtttgaagactgggcgtgcggtcctcctccgggcggggctctcgcgcggagagatctccgagcatccttgctactcccgttatcaggtaaagggatgggtgggcaaggtacaggaaacactgtctctgttcccctgctagggaaggcactgtccctctccttgtaagttttcctgtgagctctctgctgctgttcaaggagctttatccggtgatagtatcaaagcaccaagatgaagtccagcgcggttactacaaagggcaaggctatatttgagctcaagcacaagctggtacaagctgttaacaagattgcagacagagacacttaccagattggattggatgagatcgagaagatggcggataccctggcccctgacatgattggccccttcttgtcatgtgtcattgacactgatgctgagcagaagagtgcagtgcggaaggagtgcatcaaggtgattggcacactggcacgactacatggaaacctattggcacctcacatggcgaaaatggtgtccagtgtagttaagcgcctgaaggacaccgattcagttgttagagatgcatgtgttgacacttgtggtacccttgcaatgtgcgccagaagttatggggatggtggtgcagcgttggtgacattggtgcgccccttgtttgaatcactgggtgaacagaataggtatattcaggctggggcagcactgtgcctggccaaggttatagatgagagcaattacttccctgggcctgtgctcccgcagatgcttgttcgtgttgttaagctgctcaagaacccccacttcatggcgaagcccgctgcgattgacttgataagaagcattattcaggctgaaggtgcttccacagagcaggcattatcatcagctctaacaagtattatggatgcgctgaagagtactgactggaatacaaggaaggctgcctcactagctctttcaagtattgcggtcagttctgggtatttggttacctctttcagaacttcctgccttcgctcccttgagcgtagtaaatttgacaaggtaaaaccggtacgtgacaccattatacatgcaattcagctgtggaaagctattccagggtctcatactcctgaaccatcagaagctgggtcatcaacaaaagagaactactttggagaccatcatgacgccagaagtatacatgatggaggatcaagagatacttcttttaggagaacagatcatgggccttctgtatctgttatcagtggtagttctctcagttcagcaaagcggaggtctcctttatctattaacaaagtagccataaacaatgctgcaaatttgcaacggatgaagactggtgattggcgtgttgaggtgtcagttccaaagcagagtatgataccgctggttaataatgacgagaagggatccagtaaagcctgcagcctaaaagatacaaagagaaatgcatatgaaagtgttgatgtagacagtaagtttgactatgacattgtagatgataaacaagaatgctcctctgtgtcagaagtagccagcaggagttttgagacaaagcatgtcactactgctcaggaatgcactgaagattgtgattcagcagaagttacagaacaatgtcccaggggtcgagaaagtaagagcataggctcaacaattacagatgttactactcatgacacacatagttgttgtctgaatactatgaatgaattggcccttgttaggaagcaacttcaagagatggagaggaagcaagcaaatttttttgatttgttgcaggaatttatggccagctcagcagagaacatgtcagtgctaaatttgaaggtgcacaacttggagaatgctgcagacaaaactgtatatacaattactcagagcgaaagccggtatcatcttcctggctccaagcattttaagaaccaaagcgtctcttctttgcctaggctttcgacttctacacctagatcatctatggatgttaactacaagccaccaccaatctcagagttgaaacatgagaagtggatgcgtgatctaccatctcggggctcaaacatgtgttgtaaagagggagctgattttcgaaaggatcatgttcgcagtaaagttaggaagcttgggcctgtgagcttagagggtaacttgggaagatgtgatccaagctcagcaagaagtcgaacatcaggggttaaagggacttatccagtttcatttaccagttcctgtgaacaatctggactgcgaaatgcattgtgcacctcaaatcaacctggtgagtttcaagatactgatggcatggaacctgcatacatggaagccctgaactgtggtgattatgatgatctgattgacctaatggatagaactggaccagttctcgaaaagttgtcgtgtgagacgacaaatgagcttttgagggttatagctgaacaatttcttaataagaagttctttgacttggcactgccttggcttcaacagttagcagatttaagcacgatttataagccaactcaactttttgcatctgtgagagcacaaaaggagttcctttctgcattggaggaagctgcaacgggtggatctatggaaccagccttgaggattgcaattgcacagctcggatttaaactatccaaagcttttgaggttggcccatgcaggaaaatctcagccagaatgtgcagagaaaatgaaactatcatgaccaatgcaatgtgagatgtttcttgtctagtatatgctcaggccacgaaaacagtgctttagggagcttaagttaatttcttgtagcagcacaacctttgtaacttgtcgtatgatctgtttaattagcgtgtgaaaggctagaagatttcaatagaggttgatagtttggtagtttaaaacatgcgtgctttggttctctactgtaggactggaaacttttgctgtgtagcaatgtggcatgacttatgtttggtgctttcagacggggccgtacagatttttgcttgaattatctcactctgaaacactatcgtacctaacacaat

SEQ ID NO: 66532 - DNA, 3069 bp, Zea Mays
aaagtgtagaaagagagaggaagtgaagggagcccagacaattcaaatccctactagccgagggccgaggcttccgtttgaagactgggcgtgcggtcctcctccgggcggggctctcgcgcggagagatctccgagcatccttgctactcccgttatcaggtaaagggatgggtgggcaaggtacaggaaacactgtctctgttcccctgctagggaaggcactgtccctctccttgtaagttttcctgtgagctctctgctgctgttcaaggagctttatccggtgatagtatcaaagcaccaagatgaagtccagcgcggttactacaaagggcaaggctatatttgagctcaagcacaagctggtacaagctgttaacaagattgcagacagagacacttaccagattggattggatgagatcgagaagatggcggataccctggcccctgacatgattggccccttcttgtcatgtgtcattgacactgatgctgagcagaagagtgcagtgcggaaggagtgcatcaaggtgattggcacactggcacgactacatggaaacctattggcacctcacatggcgaaaatggtgtccagtgtagttaagcgcctgaaggacaccgattcagttgttagagatgcatgtgttgacacttgtggtacccttgcaatgtgcgccagaagttatggggatggtggtgcagcgttggtgacattggtgcgccccttgtttgaatcactgggtgaacagaataggtatattcaggctggggcagcactgtgcctggccaaggttatagatgagagcaattacttccctgggcctgtgctcccgcagatgcttgttcgtgttgttaagctgctcaagaacccccacttcatggcgaagcccgctgcgattgacttgataagaagcattattcaggctgaaggtgcttccacagagcaggcattatcatcagctctaacaagtattatggatgcgctgaagagtactgactggaatacaaggaaggctgcctcactagctctttcaagtattgcggtcagttctgggtatttggttacctctttcagaacttcctgccttcgctcccttgagcgtagtaaatttgacaaggtaaaaccggtacgtgacaccattatacatgcaattcagctgtggaaagctattccagggtctcatactcctgaaccatcagaagctgggtcatcaacaaaagagaactactttggagaccatcatgacgccagaagtatacatgatggaggatcaagagatacttcttttaggagaacagatcatgggccttctgtatctgttatcagtggtagttctctcagttcagcaaagcggaggtctcctttatctattaacaaagtagccataaacaatgctgcaaatttgcaacggatgaagactggtgattggcgtgttgaggtgtcagttccaaagcagagtatgataccgctggttaataatgacgagaagggatccagtaaagcctgcagcctaaaagatacaaagagaaatgcatatgaaagtgttgatgtagacagtaagtttgactatgacattgtagatgataaacaagaatgctcctctgtgtcagaagtagccagcaggagttttgagacaaagcatgtcactactgctcaggaatgcactgaagattgtgattcagcagaagttacagaacaatgtcccaggggtcgagaaagtaagagcataggctcaacaattacagatgttactactcatgacacacatagttgttgtctgaatactatgaatgaattggcccttgttaggaagcaacttcaagagatggagaggaagcaagcaaatttttttgatttgttgcaggaatttatggccagctcagcagagaacatgtcagtgctaaatttgaaggtgcacaacttggagaatgctgcagacaaaactgtatatacaattactcagagcgaaagccggtatcatcttcctggctccaagcattttaagaaccaaagcgtctcttctttgcctaggctttcgacttctacacctagatcatctatggatgttaactacaagccaccaccaatctcagagttgaaacatgagaagtggatgcgtgatctaccatctcggggctcaaacatgtgttgtaaagagggagctgattttcgaaaggatcatgttcgcagtaaagttaggaagcttgggcctgtgagcttagagggtaacttgggaagatgtgatccaagctcagcaagaagtcgaacatcaggggttaaagggacttatccagtttcatttaccagttcctgtgaacaatctggactgcgaaatgcattgtgcacctcaaatcaacctggtgagtttcaagatactgatggcatggaacctgcatacatggaagccctgaactgtggtgattatgatgatctgattgacctaatggatagaactggaccagttctcgaaaagttgtcgtgtgagacgacaaatgagcttttgagggttatagctgaacaatttcttaataagaagttctttgacttggcactgccttggcttcaacaggagttcctttctgcattggaggaagctgcaacgggtggatctatggaaccagccttgaggattgcaattgcacagctcggatttaaactatccaaagcttttgaggttggcccatgcaggaaaatctcagccagaatgtgcagagaaaatgaaactatcatgaccaatgcaatgtgagatgtttcttgtctagtatatgctcaggccacgaaaacagtgctttagggagcttaagttaatttcttgtagcagcacaacctttgtaacttgtcgtatgatctgtttaattagcgtgtgaaaggctagaagatttcaatagaggttgatagtttggtagtttaaaacatgcgtgctttggttctctactgtaggactggaaacttttgctgtgtagcaatgtggcatgacttatgtttggtgctttcagacggggccgtacagatttttgcttgaattatctcactctgaaacactatcgtacctaacacaat

SEQ ID NO: 66533 - DNA, 3024 bp, Zea Mays
agggagcccagacaattcaaatccctactagccgagggccgaggcttccgtttgaagactgggcgtgcggtcctcctccgggcggggctctcgcgcggagagatctccgagcatccttgctactcccgttgtaaagggatgggtgggcaaggtacaggaaacactgtctctgttcccctgctagggaaggcactgtccctctccttgtaagttttcctgtgagctctctgctgctgttcaaggagctttatccggtgatagtatcaaagcaccaagatgaagtccagcgcggttactacaaagggcaaggctatatttgagctcaagcacaagctggtacaagctgttaacaagattgcagacagagacacttaccagattggattggatgagatcgagaagatggcggataccctggcccctgacatgattggccccttcttgtcatgtgtcattgacactgatgctgagcagaagagtgcagtgcggaaggagtgcatcaaggtgattggcacactggcacgactacatggaaacctattggcacctcacatggcgaaaatggtgtccagtgtagttaagcgcctgaaggacaccgattcagttgttagagatgcatgtgttgacacttgtggtacccttgcaatgtgcgccagaagttatggggatggtggtgcagcgttggtgacattggtgcgccccttgtttgaatcactgggtgaacagaataggtatattcaggctggggcagcactgtgcctggccaaggttatagatgagagcaattacttccctgggcctgtgctcccgcagatgcttgttcgtgttgttaagctgctcaagaacccccacttcatggcgaagcccgctgcgattgacttgataagaagcattattcaggctgaaggtgcttccacagagcaggcattatcatcagctctaacaagtattatggatgcgctgaagagtactgactggaatacaaggaaggctgcctcactagctctttcaagtattgcggtcagttctgggtatttggttacctctttcagaacttcctgccttcgctcccttgagcgtagtaaatttgacaaggtaaaaccggtacgtgacaccattatacatgcaattcagctgtggaaagctattccagggtctcatactcctgaaccatcagaagctgggtcatcaacaaaagagaactactttggagaccatcatgacgccagaagtatacatgatggaggatcaagagatacttcttttaggagaacagatcatgggccttctgtatctgttatcagtggtagttctctcagttcagcaaagcggaggtctcctttatctattaacaaagtagccataaacaatgctgcaaatttgcaacggatgaagactggtgattggcgtgttgaggtgtcagttccaaagcagagtatgataccgctggttaataatgacgagaagggatccagtaaagcctgcagcctaaaagatacaaagagaaatgcatatgaaagtgttgatgtagacagtaagtttgactatgacattgtagatgataaacaagaatgctcctctgtgtcagaagtagccagcaggagttttgagacaaagcatgtcactactgctcaggaatgcactgaagattgtgattcagcagaagttacagaacaatgtcccaggggtcgagaaagtaagagcataggctcaacaattacagatgttactactcatgacacacatagttgttgtctgaatactatgaatgaattggcccttgttaggaagcaacttcaagagatggagaggaagcaagcaaatttttttgatttgttgcaggaatttatggccagctcagcagagaacatgtcagtgctaaatttgaaggtgcacaacttggagaatgctgcagacaaaactgtatatacaattactcagagcgaaagccggtatcatcttcctggctccaagcattttaagaaccaaagcgtctcttctttgcctaggctttcgacttctacacctagatcatctatggatgttaactacaagccaccaccaatctcagagttgaaacatgagaagtggatgcgtgatctaccatctcggggctcaaacatgtgttgtaaagagggagctgattttcgaaaggatcatgttcgcagtaaagttaggaagcttgggcctgtgagcttagagggtaacttgggaagatgtgatccaagctcagcaagaagtcgaacatcaggggttaaagggacttatccagtttcatttaccagttcctgtgaacaatctggactgcgaaatgcattgtgcacctcaaatcaacctggtgagtttcaagatactgatggcatggaacctgcatacatggaagccctgaactgtggtgattatgatgatctgattgacctaatggatagaactggaccagttctcgaaaagttgtcgtgtgagacgacaaatgagcttttgagggttatagctgaacaatttcttaataagaagttctttgacttggcactgccttggcttcaacaggagttcctttctgcattggaggaagctgcaacgggtggatctatggaaccagccttgaggattgcaattgcacagctcggatttaaactatccaaagcttttgaggaaaatctcagccagaatgtgcagagaaaatgaaactatcatgaccaatgcaatgtgagatgtttcttgtctagtatatgctcaggccacgaaaacagtgctttagggagcttaagttaatttcttgtagcagcacaacctttgtaacttgtcgtatgatctgtttaattagcgtgtgaaaggctagaagatttcaatagaggttgatagtttggtagtttaaaacatgcgtgctttggttctctactgtaggactggaaacttttgctgtgtagcaatgtggcatgacttatgtttggtgctttcagacggggccgtacagatttttgcttgaattatctcactctgaaacactatcgtacctaacacaat

SEQ ID NO: 66534 - DNA, 3027 bp, Zea Mays
cctggtgctgcttatctgaagttcactaacgcttggttttattctgtttcgatcaggtaaagggatgggtgggcaaggtacaggaaacactgtctctgttcccctgctagggaaggcactgtccctctccttgtaagttttcctgtgagctctctgctgctgttcaaggagctttatccggtgatagtatcaaagcaccaagatgaagtccagcgcggttactacaaagggcaaggctatatttgagctcaagcacaagctggtacaagctgttaacaagattgcagacagagacacttaccagattggattggatgagatcgagaagatggcggataccctggcccctgacatgattggccccttcttgtcatgtgtcattgacactgatgctgagcagaagagtgcagtgcggaaggagtgcatcaaggtgattggcacactggcacgactacatggaaacctattggcacctcacatggcgaaaatggtgtccagtgtagttaagcgcctgaaggacaccgattcagttgttagagatgcatgtgttgacacttgtggtacccttgcaatgtgcgccagaagttatggggatggtggtgcagcgttggtgacattggtgcgccccttgtttgaatcactgggtgaacagaataggtatattcaggctggggcagcactgtgcctggccaaggttatagatgagagcaattacttccctgggcctgtgctcccgcagatgcttgttcgtgttgttaagctgctcaagaacccccacttcatggcgaagcccgctgcgattgacttgataagaagcattattcaggctgaaggtgcttccacagagcaggcattatcatcagctctaacaagtattatggatgcgctgaagagtactgactggaatacaaggaaggctgcctcactagctctttcaagtattgcggtcagttctgggtatttggttacctctttcagaacttcctgccttcgctcccttgagcgtagtaaatttgacaaggtaaaaccggtacgtgacaccattatacatgcaattcagctgtggaaagctattccagggtctcatactcctgaaccatcagaagctgggtcatcaacaaaagagaactactttggagaccatcatgacgccagaagtatacatgatggaggatcaagagatacttcttttaggagaacagatcatgggccttctgtatctgttatcagtggtagttctctcagttcagcaaagcggaggtctcctttatctattaacaaagtagccataaacaatgctgcaaatttgcaacggatgaagactggtgattggcgtgttgaggtgtcagttccaaagcagagtatgataccgctggttaataatgacgagaagggatccagtaaagcctgcagcctaaaagatacaaagagaaatgcatatgaaagtgttgatgtagacagtaagtttgactatgacattgtagatgataaacaagaatgctcctctgtgtcagaagtagccagcaggagttttgagacaaagcatgtcactactgctcaggaatgcactgaagattgtgattcagcagaagttacagaacaatgtcccaggggtcgagaaagtaagagcataggctcaacaattacagatgttactactcatgacacacatagttgttgtctgaatactatgaatgaattggcccttgttaggaagcaacttcaagagatggagaggaagcaagcaaatttttttgatttgttgcaggaatttatggccagctcagcagagaacatgtcagtgctaaatttgaaggtgcacaacttggagaatgctgcagacaaaactgtatatacaattactcagagcgaaagccggtatcatcttcctggctccaagcattttaagaaccaaagcgtctcttctttgcctaggctttcgacttctacacctagatcatctatggatgttaactacaagccaccaccaatctcagagttgaaacatgagaagtggatgcgtgatctaccatctcggggctcaaacatgtgttgtaaagagggagctgattttcgaaaggatcatgttcgcagtaaagttaggaagcttgggcctgtgagcttagagggtaacttgggaagatgtgatccaagctcagcaagaagtcgaacatcaggggttaaagggacttatccagtttcatttaccagttcctgtgaacaatctggactgcgaaatgcattgtgcacctcaaatcaacctggtgagtttcaagatactgatggcatggaacctgcatacatggaagccctgaactgtggtgattatgatgatctgattgacctaatggatagaactggaccagttctcgaaaagttgtcgtgtgagacgacaaatgagcttttgagggttatagctgaacaatttcttaataagaagttctttgacttggcactgccttggcttcaacagttagcagatttaagcacgatttataagccaactcaactttttgcatctgtgagagcacaaaaggagttcctttctgcattggaggaagctgcaacgggtggatctatggaaccagccttgaggattgcaattgcacagctcggatttaaactatccaaagcttttgaggttggcccatgcaggaaaatctcagccagaatgtgcagagaaaatgaaactatcatgaccaatgcaatgtgagatgtttcttgtctagtatatgctcaggccacgaaaacagtgctttagggagcttaagttaatttcttgtagcagcacaacctttgtaacttgtcgtatgatctgtttaattagcgtgtgaaaggctagaagatttcaatagaggttgatagtttggtagtttaaaacatgcgtgctttggttctctactgtaggactggaaacttttgctgtgtagcaatgtggcatgacttatgtttggtgctttcagacggggccgtacagatttttgcttgaattatctcactctgaaacactatcgtacctaacacaat

SEQ ID NO: 66535 - DNA, 2858 bp, Zea Mays
ccgaaggccaactggccaaggcacccgcgccgcggtcgctactcgctgctcgccatacccggctccgtccgttccaagttctcggcgtttgatcggctgggtaacccgccgcctcctcagcctgcgccctgcagccaccgccgccgcgccgcacgcccgcgcctcacaaaacttcccgtgcctccccgccggtgccgcaacccctctcgcggccacgagcacgggcattatctccgcgccacgatcccatcggaaccagacacgcccggccgcgagccgcaccctgcccaccaagctccgatggactcggcggcgtcggcggctctgaagccctcggcgctggacctgctagcggcactgctgacggggcgggaccccgaaggcggggcgcactgggcgtccgcgctcgccgagaatcgacacctcttcctgctgctcaccacctctctcgccgtgctagtcggctgcggcgttgccctgctcgtccgccgctcctccgcgcctcgggcggccgcggccgcggcacaggcgccgccgcgcccgctcgccgtgaagcccaaggacgagccggaccccgacgacggcaggcagagggtcattgtcttcttcggcacgcagaccggcaccgctgagggctttgccaaggcgctcgccgaagaggccaaggcgaggtacgacaaggctgtcttcaaggtggtcgatctggaagattacgccgctgaggatgaggaatacgaggagaagcttaagaaggagagcatcgcattgttcttcctggcaacttatggcgatggagagccaactgacaatgcagcgaggttttataaatggttctcagagggtaatgagagaggcgagtggttgaataatcttcggtttggggtgtttggcctcggaaatagacagtatgagcactttaacaaggttggaaaggtggttgatcaactcctcgcagaacaaggtgccaaacgtatcgttcctgttggtcttggagatgatgatcaatgcattgaggatgactttaacgcatggaacttctatggccagaattggataaattgctccgccaggaagatgattcttcaactgcaccaactccttacacagctgctatcccagaatatagagttgtgtttgtcaaaccagaggatgacatgtacattaacaagtcttttgctctcagtaatggccatactgtttatgacattcaacatccttgcagagcaaatgtggctgttcggcgagagcttcatacaccagcttctgaccgatcctgcattcatttagagtttgatattgctggaactggcctaaaatatgaaactggagatcatgttggtgtctatgctgaaaattgcatcgaaactgttgaagaggcagaaaaactgctaggttattcaccagatactttattctctatttatgctgaccaagaggatggtaccccgctctgtgggggttctttgccacctcctttcccgtccccttgcacagtgaggactgcgcttacgagatatgcagatcttttgaattcgcctaagaagagtgctttactggcgctggctgctcatgcatctgattctaaagaggctgagcggcttagacatctcgcgtctcctgctggaaagaaggagtattcacaatggatagtcacaagccaaagaagtctcttggaagttatgtcagagttcccatcagcaaagcctccacttggtgttttctttgcagctatttgtcctcgcctgcagccaagatactactcaatatcttcctcaccgagaatagcaccaacaaggattcatgtgacatgtgcactagtatatgggccaacccctaccggaagaattcacaaaggagtctgttctacttggatgaagcattcgactcccttggaagatagcaaagactgcagctgggctccaatttttgttaggcaatcaaacttcaaactgcctgctgatcctactgtgcccattataatgattggccctgggactggtctggcacctttcaggggcttcttacaggaacgactagctttaaaacaggcagaggtggaactgggccatgctgtcctcttctttgggtgcagaaatcggaagatggacttcatatacgaggatgagctcaataattttgttgatgccggtgccctctctgagttgatcgtagccttttctcgtgagggtcctacaaaagagtatgttcagcacaaaatggcgcaaaaggctgccgagctttggagcatcatttctcagggcggctacatttatgtttgcggtgacgcaaaaggcatggctagagatgtccatcgcacgctacataccatcgtccaggagcaggggtctatggacaacaactccaaggcagaaagctacgtgaagagcctgcagatggaagggagatacttgagagatgtttggtgacgtatgccaaagaaacgtggaccctgtccgtcgtagttgccggcgaatacaaacctaaatcaacgtcgtggaggaaaattagatgcaccggctggggtatgattagtaggaatttttacatgatctgttcgatgggaaacatatatactagtgatatggttctatttttttaaaaaaataaagaagaaaagaaacagaggtttccccgctttatatagttatatttatttaaaagtgacatagccagtcacctagtgatggtagagtatcaggcgccagcaggcagcagcggtgcaggtgcttatgtatgttcgttctggaaatcatcgttgtgatttctggcgctaaggctatagtgaataaaacagccattggctcatcacttgcacttgctttgctggacacttttgtagctgcttgtttcgagttccc

SEQ ID NO: 66536 - DNA, 1931 bp, Zea Mays
ctggccacatcaatgattcttgttactacagtgccaaacgtatcgttcctgttggtcttggagatgatgatcaatgcattgaggatgactttaacgcatggaaggaacttctatggccagaattggataaattgctccgccaggaagatgattcttcaactgcaccaactccttacacagctgctatcccagaatatagagttgtgtttgtcaaaccagaggatgacatgtacattaacaagtcttttgctctcagtaatggccatactgtttatgacattcaacatccttgcagagcaaatgtggctgttcggcgagagcttcatacaccagcttctgaccgatcctgcattcatttagagtttgatattgctggaactggcctaaaatatgaaactggagatcatgttggtgtctatgctgaaaattgcatcgaaactgttgaagaggcagaaaaactgctaggttattcaccagatactttattctctatttatgctgaccaagaggatggtaccccgctctgtgggggttctttgccacctcctttcccgtccccttgcacagtgaggactgcgcttacgagatatgcagatcttttgaattcgcctaagaagagtgctttactggcgctggctgctcatgcatctgattctaaagaggctgagcggcttagacatctcgcgtctcctgctggaaagaaggagtattcacaatggatagtcacaagccaaagaagtctcttggaagttatgtcagagttcccatcagcaaagcctccacttggtgttttctttgcagctatttgtcctcgcctgcagccaagatactactcaatatcttcctcaccgagaatagcaccaacaaggattcatgtgacatgtgcactagtatatgggccaacccctaccggaagaattcacaaaggagtctgttctacttggatgaagcattcgactcccttggaagatagcaaagactgcagctgggctccaatttttgttaggcaatcaaacttcaaactgcctgctgatcctactgtgcccattataatgattggccctgggactggtctggcacctttcaggggcttcttacaggaacgactagctttaaaacaggcagaggtggaactgggccatgctgtcctcttctttgggtgcagaaatcggaagatggacttcatatacgaggatgagctcaataattttgttgatgccggtgccctctctgagttgatcgtagccttttctcgtgagggtcctacaaaagagtatgttcagcacaaaatggcgcaaaaggctgccgagctttggagcatcatttctcagggcggctacatttatgtttgcggtgacgcaaaaggcatggctagagatgtccatcgcacgctacataccatcgtccaggagcaggggtctatggacaacaactccaaggcagaaagctacgtgaagagcctgcagatggaagggagatacttgagagatgtttggtgacgtatgccaaagaaacgtggaccctgtccgtcgtagttgccggcgaatacaaacctaaatcaacgtcgtggaggaaaattagatgcaccggctggggtatgattagtaggaatttttacatgatctgttcgatgggaaacatatatactagtgatatggttctatttttttaaaaaaataaagaagaaaagaaacagaggtttccccgctttatatagttatatttatttaaaagtgacatagccagtcacctagtgatggtagagtatcaggcgccagcaggcagcagcggtgcaggtgcttatgtatgttcgttctggaaatcatcgttgtgatttctggcgctaaggctatagtgaataaaacagccattggctcatcacttgcacttgctttgctggacacttttgtagctgcttgtttcgagttccc

SEQ ID NO: 66537 - DNA, 1735 bp, Zea Mays
agcgatattaagaatcaagaagagaatcagatgtgatattttttttcagaataaatacactacggctgaatcaaccagcatatatcatcagtgtaccagattatccggacaagtgagcaaagcatatacgcggatacgctcaagtgggcaggtaagggtgcaggtccttgcaatccgaaggtgtcattaaacaaagcttccagttccagagcagcatccgctgcaaacagtctacacaggtgctcgcgatctatccgaatcgctgggctgcatgcacatgtgcacgagcaatcagcaccgggaaacagaatcattctgataacatatttggctggctgcacgctgggctatcatcatcgacatgaagacgtgccgcctccagatcacgggatgaggcgcaagatctggcggcacccgaatccactgcccatatcaccggagctgcagaggaagtggagggggctgcgaacggagaccggttaattgctctcaggattaattgctctcagggttcaggaatacaggtacatcccattctcttgtagcaccactgttacggattgaatagctggaccacaataaagagtaaagagctcacaagtcgggtaataagaaacatgaaagcttacgccaaaaaaatagggtcacttggataaattagaacagacgattgtatatatcactgctccatcccactgagtttcgtgattcagattagccaaattagctgtttggtttactcactcttccattccatcaggcaaaaaaaaaaagaatgtggcggcgaaatgaatgctgctgacttgtccctagaacagagtatcattgctcatcaatgtaataataataataataggcttatgagctctagtcctcgatacagtcttttgcgggaaaccaaacacaaaagcccaacccaacaacagacggccaacgcacgacgaaagaagcaaaacaggtactcctacagcttatgcgacacaagattcggtgggagttaagggcctgtttgtttaccctaatggattatataatctggattatttttggaggattatataatctggattatataatttgaattatataatctgagtagtgctgtttgtttacccagattatctggcgtgtttctgttgggcggcgggcttctccgatccgataggcgcaaaaacgattcggtagattataatggcaatggtgagtaatttctaggaaacttgaaagggtagtggggaagtgggaaaaaaataatctgaaataagcacatcctcacttgcttatggattatcataatccaaggggttagattatataatctgggcaaataagctagactgtttgtttgtcttttaggattatttaatccagattatataatctatggggtaaacaaacaggccctaagttaatcgtttgatactcctatgcgttggaattcctatcgagcaccgtccgaatagcttgaaaaatcgaatgattcgcctaccgaaacctagcgcgacgctataggcagaggcaggcacgcgcggtgcgaacgagggagtccgggccaagaggcgtgtgcacagaggaacggatcatgggatgatcgggtgcctgggaagaggtgcttactctgctctctgcagcagccgaatcggaggaagacgccgagcggcgggaggatgatgtgcagcagcggtcggggtcggggacaaatgggtggtggtctggtggaggcgtggaactctgg

SEQ ID NO: 66538 - DNA, 1513 bp, Zea Mays
agaaaaactagatacgcaatcttcctcgtatcccccctcccctccccaattcggacctcgttccgcctctgcggctctgcccctctctctcacctccccgcgggcggccgcccccaccgcagcccgaaccgcatctcccccaccactggcatccccctaccgcttacaaatacgcgacacatcccacctcgacggtctctttctcgcatcgctgcgccgctccatccgctcggctcccacccgtccgtcgtcgcctcgccgtcgagccaccgccctccttgtcaacctctgttgctgctcgggccgggcgggaggagaaaagatgggggtgtacctcagcacgcccaagacggacaagctctcagctgatggagagaacagccgcgtccggttcggcctctcctccatgcaggggtggcggaccaccatggaggacgcgcatgctgccttgccagaccttgatgaatgcacatccttttttggtgtttatgatggccatggtggaaaagctgtatcaaaattttgtgcgaggcatttgcataaacaagtgcttataaatgatgcaaattcatctggtgatttgccaacctctctccataaagctttcttaagaatggatgagatgatgaaagggcagaggggttggagagaactaactgagctgggagataagggaaacaaaatctcaggtatgatagacgacataatatggcctcccaagggtggtgattcagataagataagggaagattgggataccgaggagggtccaaattcgaactttcctggaccaacatctggaagcacagcttgtgtggctgtcataagaaatgacaaattaattgttgcaaatgctggggattctcggtgtgttatctcacggaagggtcaggcttacaatttgtcaacagatcacaaaccagatcttgaggaagagagggagaggattttgggtgctggtggatttgttgttgccggacgggtcaatgcaagtctgaacttatctagggcaataggtgacatggaactgaagcaaaatgacctcctgccagtggagaggcagatcgtgacagctgaacctgaattgaaaacagtccagctctcggaggatgatgaattcattgttttagcttgtgatggaatttgggcagagggagtaactcacaaaccaggctttgcagtttctgatatgtaactaagtaaagcagaacacctgcaaattgtcatacaaatactgtatcaaatgagtaatcagcttgcgtatctaatctgtatttgtgatgccacacatattttggatttgagctaattccttagaagtagcacactagggtttgcagttgttgatatctaaactgtttatagatatatgtatgttgtatccatgttgtatacaattaatgaatttctaattgacaaacctagtaccagaggctcccacatgagtcgagtttggtgcagggataaactgaggcaagtctttcccctcaaatgcatagagactgcttcgaac

SEQ ID NO: 66539 - DNA, 1715 bp, Zea Mays
cccctccccaattcggacctcgttccgcctctgcggctctgcccctctctctcacctccccgcgggcggccgcccccaccgcagcccgaaccgcatctcccccaccactggcatccccctaccgcttacaaatacgcgacacatcccacctcgacggtctctttctcgcatcgctgcgccgctccatccgctcggctcccacccgtccgtcgtcgcctcgccgtcgagccaccgccctccttgtcaacctcgctgacgacgggcccgtgtgattctgctgcggtgcagtgttgctgctcgggccgggcgggaggagaaaagatgggggtgtacctcagcacgcccaagacggacaagctctcagctgatggagagaacagccgcgtccggttcggcctctcctccatgcaggggtggcggaccaccatggaggacgcgcatgctgccttgccagaccttgatgaatgcacatccttttttggtgtttatgatggccatggtggaaaagctgtatcaaaattttgtgcgaggcatttgcataaacaagtgcttataaatgatgcaaattcatctggtgatttgccaacctctctccataaagctttcttaagaatggatgagatgatgaaagggcagaggggttggagagaactaactgagctgggagataagggaaacaaaatctcaggtatgatagacgacataatatggcctcccaagggtggtgattcagataagataagggaagattgggataccgaggagggtccaaattcgaactttcctggaccaacatctggaagcacagcttgtgtggctgtcataagaaatgacaaattaattgttgcaaatgctggggattctcggtgtgttatctcacggaagggtcaggcttacaatttgtcaacagatcacaaaccagatcttgaggaagagagggagaggattttgggtgctggtggatttgttgttgccggacgggtcaatgcaagtctgaacttatctagggcaataggtgacatggaactgaagcaaaatgacctcctgccagtggagaggcagatcgtgacagctgaacctgaattgaaaacagtccagctctcggaggatgatgaattcattgttttagcttgtgatggaatttgggattgcatgtcaagtcaagaagtagttgattttgtacataaacagctaaagaccgaggataagatatctagtgtgtgtgagaagttgctcaaccgctgtgtggcacctacatctggtggcgaaggatgtgataacatgacggttattgtggttcaattcaagaaaccagctttagctgttgctacttctagcgctgagcagtctgctaccactgcagaagggatgcggcccaaaatttgagttgcctttgtgaacagcgaggtcgatggcccagattaccccccgaagtaggcgttgagtggcacaccgtgctgtggagctctaaccggtggataatagacaaaaaaggatagtgaggtggtgtatataagaaaagggattctattcgacaatctcttatagggtttgttgcttccttctttctagtgttcagagtcgtcgcaacctgtaatacatggcatgttggtgcttaaattggtttttttgtgaaatgcattgatgagttgtcggaagggtagtttagcttctcaagcagatttgcttgcagaaaagtgaaagatccgaatgag

SEQ ID NO: 66540 - DNA, 687 bp, Zea Mays
attcggacctcgttccgcctctgcggctctgcccctctctctcacctccccgcgggcggccgcccccaccgcagcccgaaccgcatctcccccaccactggcatccccctaccgcttacaaatacgcgacacatcccacctcgacggtctctttctcgcatcgctgcgccgctccatccgctcggctcccacccgtccgtcgtcgcctcgccgtcgagccaccgccctccttgtcaacctcgctgacgacgggcccgtgtgattctgctgcggtgcagtgttgctgctcgggccgggcgggaggagaaaagatgggggtgtacctcagcacgcccaagacggacaagctctcagctgatggagagaacagccgcgtccggttcggcctctcctccatgcaggggtggcggaccaccatggaggacgcggtgagttgcttccgcctccctcgtggcttccgattgggtgggaatgggattgctcccgactgttccgttccatgctcgcatgactggtttggggtgatttagggtgagatgtgcctgtgcctgttggagtttgcggctgtgcagtgtccaaggcgcgatcctgttattatgtgtagttttgcacgatgagaaccaagttacctgttgttgtttcccatggtcaacctataataaactatgtcgtgatttaatcgaccaa

SEQ ID NO: 66541 - DNA, 1032 bp, Zea Mays
ccatcttggttcattgagacatgaaaagctgtatcaaaattttgtgcgaggcatttgcataaacaagtgcttataaatgatgcaaattcatctggtgatttgccaacctctctccataaagctttcttaagaatggatgagatgatgaaagggcagaggggttggagagaactaactgagctgggagataagggaaacaaaatctcaggtatgatagacgacataatatggcctcccaagggtggtgattcagataagataagggaagattgggataccgaggagggtccaaattcgaactttcctggaccaacatctggaagcacagcttgtgtggctgtcataagaaatgacaaattaattgttgcaaatgctggggattctcggtgtgttatctcacggaagggtcaggcttacaatttgtcaacagatcacaaaccagatcttgaggaagagagggagaggattttgggtgctggtggatttgttgttgccggacgggtcaatgcaagtctgaacttatctagggcaataggtgacatggaactgaagcaaaatgacctcctgccagtggagaggcagatcgtgacagctgaacctgaattgaaaacagtccagctctcggaggatgatgaattcattgttttagcttgtgatggaatttgggcagagggagtaactcacaaaccaggctttgcagtttctgatatgtaactaagtaaagcagaacacctgcaaattgtcatacaaatactgtatcaaatgagtaatcagcttgcgtatctaatctgtatttgtgatgccacacatattttggatttgagctaattccttagaagtagcacactagggtttgcagttgttgatatctaaactgtttatagatatatgtatgttgtatccatgttgtatacaattaatgaatttctaattgacaaacctagtaccagaggctcccacatgagtcgagtttggtgcagggataaactgaggcaagtctttcccctcaaatgcatagagactgcttcgaac

SEQ ID NO: 66542 - DNA, 538 bp, Zea Mays
gcaggtactggtaacccaacgggtaaaactacccgcgcggggtatgggtatgggtacatagctaacgacggacgaagctggtcttcgaacgggaaattgacaacaaaaaaccaaagcggtgtaaagagaagtttcaactaaagcgtgcgaacgacgaaggtgtgaaccgaagctactagcttcggcacagatgatactttagacatgaagatgccaaagatatgaagttcaagacttatgcagcaagaaagaaagggaaaagtcatcaacatccctgcgtcatttgtaatacatgtgtgtaaacttcatggacatgtttgtaatttttcacgaagctgttcaccttctctataaataagtgaacagtaccctacataaattcacctttcgaaggccatagcttcgtgtcgcttagccttcgaagaaccttcatgccaccttgtatcaaggagccgaaggtatgtttgtcaatttgtttgatacaaagaaggatggaataaaaatgctaaggcatatgagatgggtttcatactctatt

SEQ ID NO: 66543 - DNA, 342 bp, Zea Mays
acaagcctgaccgcacatgacatatactcacaccagaatacgccaccactgattggacacgtctttccccgggcggctgttccttccttcagcattcttcggatggtcctcctttcccctggctgtcccttccatcttctccgaggtcacccggggcgatctggtcctaggcttcgtctgctccgcctggcacggcgaactcgcggtccgccacgtgcgctggattgttacagacctattgctactacagctatctagaagaagagagaaagatgcgaggtagaagaaagagagacggcggctgcacgtggaaaacgtcggcgaatgtcgaactcatcttcc

SEQ ID NO: 66544 - DNA, 539 bp, Zea Mays
acaagcctgaccgcacatgacatatactcacaccagaatacgccaccactgattggacacgtctttccccgggcggctgttccttccttcagcattcttcggatggtcctcctttcccctggctgtcccttccatcttctccgaggtcacccggggcgatctggtcctaggcttcgtctgctccgcctggcacggcgaactcgcggtccgccacgtgcgctggattgttacagacctattgctactacagctatctagaagaagagagaaagatgcgaggtagaagaaagagagacgggaaactgggggctgtggagagggaagcgctgaccaagttcttgacggacagggaggtggaagacgagctcgccggattcttgcactactacgtggcaaacaagcaaggagaagatggaactgctccggtggttgaagagtgaagatgaaaccatttcagtagaataagaagccacacagcagtgtcaaaagggcctgcaacggttggagtaagcggggcgagggttcagatttgagaagag

SEQ ID NO: 66545 - DNA, 313 bp, Zea Mays
ctttggtctgaatactgacatggcggtagcgccgggcagcagtggtgttgatcgtggcgggcgcgatttcgagaaactgggggctgtggagagggaagcgctgaccaagttcttgacggacagggaggtggaagacgagctcgccggattcttgcactactacgtggcaaacaagcaaggagaagatggaactgctccggtggttgaagagtgaagatgaaaccatttcagtagaataagaagccacacagcagtgtcaaaagggcctgcaacggttggagtaagcggggcgagggttcagatttgagaagag

SEQ ID NO: 66546 - DNA, 3731 bp, Zea Mays
gccggacaggcatgagggtgtgtgcttacgacctcactgccaagcggggcccacctgcagatccaaccctccccgcaacggctagttccggcccccgcagccgttgggacaaaaggcaaacaaaaccagagtccagagggagcggagctctcccaccaaaccaccgttctaaacgctcccctagtcccctgctcagcttctccagagatcgccaaagaagcagcatcggcagtaagctctgcggcgatggggtacacgtacactccgacatactactcgggcctgcaggacaccatcgcgtcgctctgcaagtccatcctgccctccttccgcgtgggccggcggctcaccgccgaccaggccgccgcgcggcgccacgccgagcagctcaagtggcagcaggagtccttccaccgcatcctccacctcgccgcgctccaccgcgagggcatcgctccggcctccgacgttgccgccttccgcggaaccatgctcgcggcgctcgtcgcgccgccgcagcacctcgagcagcccgctgtgctccgggacaagctcctcttcctccaggagctcctctacgccaagtgcgtctccgcggcggagtacaacgcgtccaaggcgcccctcgtgcagcggctcgccgcgttcggcgtcatcgtcgactgccccgacgcggaggtctcggccgaggagtggtcggagatcgacctccgtgacccgcctcctcccgccactgcggcggcctccgacaagccgaagcacaaggccttcgtcacgccatggaagagcagatccaagaaggaccaggacgtgaacagcagcgcatcaaggccgccgctggcccctgtggaccataacaacgccaccaacgcgccagtcttcatgaccgagagctcgccgtcggaaacggttccctccgggaaggccgagaaagggaagaggaggcatctggcagggatgttccacagcggcggcagtggcaccgagaacaaggagcctgcgggggaggaaggggtcgtcgagaaagagacggtgagaggtaagaagaagagctcgtgggggttcgatggcatcaagaagtggacgaaagccggtgcctgtaacagtggcgaggcggcagccaccggtgagcagccgcagcatgttcctccgcgctcatcttacagcgagtgccagctggaggcgagccccatggctgcttctggaccggatgccaagagggccaagacgaggctgcactcggacacggacaatgactctgcttccgagctgctgcgtgacaaggttctggtggagaacacaaagaaagagctctcaaggattcaggctgagctatcatctacaaatcggaacttgaacttctcgaatcagcagatggaggccatctcaacaaagcttccggtggacaagtctgacctcaagtcctacttcccaaaggcatggtgtgatcagcacggggatggcgtgatcaccgcggctaaggaagggttcaagcagcacgtcgaagagatggagaagcagagggacatcactggcagtgagggctgggctacctttgaggacatcgaccttgatgacaacttcaacccgagggccttctctcgccaccagccggactctgcgtttgctgatgtgctagagacaaatttatcttctatgcaatccgcgtcaacacgaggcaggcagcggtcatgcgacgtcactaagcaggtcccggtagctgacacgtgggccccggttccgtggcgctgtggcccacggcgacgccttgctcgcagttcgctccacgacatggcggcctcggtgctgcaggccgagcgccacctgctcctgctcggcagcggccgcaaccgtcccctcctccgcatgctcccgccacgcgtgctcttcccgcaccggcgccgcagctggccccgggccgtgagggtgtcacccggcgacggcgagggcgcgggagggttcgcgagcgccgtggagaagcgctcgataccggggatagttgaggaggaagggtatggagcgaggggagaggagttggaaggggacgtggccggggctttggagcagaggtggcctccgtgggatgggttggccgagcggtacaagctcatcggcgccacctccctcgccttcgtcatctgcaacatggacaaggttaacttgagtgtcgcaattattccaatgtcacatcaatatggttggaactcatcaactgctggcttagttcagtcctcattcttttggggttatgcattgagtcaactaccaggaggatggctggcaaaattgtttggcggaaggaaagtgcttgaggtcggtgttgtgacatggtctttggccactgctataattcctgttgtagcaggttttatgccagggcttgtactatcgaggattctggtaggtattggagaaggtgtttcaccatcagctgctacagatttaattgctaggtccattccttggcaagaacgatcaagagcagttgctgttgtttttggtgggttgagctttggcagtgtcttaggactcctgtttgcccctcccatcattcagaactttggctgggagtctgtcttttacatatttggccttcttgggattgtttggtgcttaggatttgaatctcttatagtgcaacggttcggtgacaaaaaaagcctattaagatgtgccttggggggcatttttcaaaagcaaggcggtctgggcaatgatatatgcacacttttgtggaagttgggggcattatacttgtttgtcttggctaccaacattctttagcgaggagctgaacctgaacttgacagaagcagcatgggtgtcagtccttcctcctttgggttcaatgatcattacatctattgcagcaccttttgcagacaacttgatatcaaatggagttgacaccacgaaggtgcgaaaaatttgccaaacaattgcctttgtgtcacctgcgactttcatgatgctttcctctgtggatcttggactgcctccctgggaaattgttgcttttcttacaagtggtgtagcactctccagcttcgcattgtcagggctttattgcacacatcaagacatctctagtgaatatgcaagcattctcctgggaatcacaaacactgtaggcgcggtgccaggaattgtaggcgttgcactcacaggctttcttcttgattcaactcattcttggagtatatcactctttgcgccttctatcttcttttacttaactggtactgttgtatggttggcatttgcaagcagtaagccccaggatttttccaagtcaggacctgagtctgagccgtgaatcgtgatgtatggtactcctctgcacataaggatcgtttcacaaggaaaattcgttttgagtttagacaaaagaatggagttctagggcagagaatagatgttatgttcctcttcagtcagtagcagacaagaggaagccactgataaggggacaatgcttgcgtgtatatagtataatgatgataggctttttttctggttagttttcacattttgatatggttttgatttttgaatgtgtgcagtcaggtccgcggtccgccagtttgtagtatcctgttggtttcgggtgtcttggttgttgagtgagatttagaatgtgctgatacttcgtttcagtgcttgtactttagattcgacctgttacgaaaaaaatgaagagtacccactgaattttaaattacaagtcattt

SEQ ID NO: 66547 - DNA, 3614 bp, Zea Mays
ctctcccaccaaaccaccgttctaaacgctcccctagtcccctgctcagcttctccagagatcgccaaagaagcagcatcggcagtaagctctgcggcgatggggtacacgtacactccgacatactactcgggcctgcaggacaccatcgcgtcgctctgcaagtccatcctgccctccttccgcgtgggccggcggctcaccgccgaccaggccgccgcgcggcgccacgccgagcagctcaagtggcagcaggagtccttccaccgcatcctccacctcgccgcgctccaccgcgagggcatcgctccggcctccgacgttgccgccttccgcggaaccatgctcgcggcgctcgtcgcgccgccgcagcacctcgagcagcccgctgtgctccgggacaagctcctcttcctccaggagctcctctacgccaagtgcgtctccgcggcggagtacaacgcgtccaaggcgcccctcgtgcagcggctcgccgcgttcggcgtcatcgtcgactgccccgacgcggaggtctcggccgaggagtggtcggagatcgacctccgtgacccgcctcctcccgccactgcggcggcctccgacaagccgaagcacaaggccttcgtcacgccatggaagagcagatccaagaaggaccaggacgtgaacagcagcgcatcaaggccgccgctggcccctgtggaccataacaacgccaccaacgcgccagtcttcatgaccgagagctcgccgtcggaaacggttccctccgggaaggccgagaaagggaagaggaggcatctggcagggatgttccacagcggcggcagtggcaccgagaacaaggagcctgcgggggaggaaggggtcgtcgagaaagagacggtgagaggtaagaagaagagctcgtgggggttcgatggcatcaagaagtggacgaaagccggtgcctgtaacagtggcgaggcggcagccaccggtgagcagccgcagcatgttcctccgcgctcatcttacagcgagtgccagctggaggcgagccccatggctgcttctggaccggatgccaagagggccaagacgaggctgcactcggacacggacaatgactctgcttccgagctgctgcgtgacaaggttctggtggagaacacaaagaaagagctctcaaggattcaggctgagctatcatctacaaatcggaacttgaacttctcgaatcagcagatggaggccatctcaacaaagcttccggtggacaagtctgacctcaagtcctacttcccaaaggcatggtgtgatcagcacggggatggcgtgatcaccgcggctaaggaagggttcaagcagcacgtcgaagagatggagaagcagagggacatcactggcagtgagggctgggctacctttgaggacatcgaccttgatgacaacttcaacccgagggccttctctcgccaccagccggactctgcgtttgctgatgtgctagagacaaatttatcttctatgcaatccgcgtcaacacgaggcaggcagcggtcatgcgacgtcactaagcaggtcccggtagctgacacgtgggccccggttccgtggcgctgtggcccacggcgacgccttgctcgcagttcgctccacgacatggcggcctcggtgctgcaggccgagcgccacctgctcctgctcggcagcggccgcaaccgtcccctcctccgcatgctcccgccacgcgtgctcttcccgcaccggcgccgcagctggccccgggccgtgagggtgtcacccggcgacggcgagggcgcgggagggttcgcgagcgccgtggagaagcgctcgataccggggatagttgaggaggaagggtatggagcgaggggagaggagttggaaggggacgtggccggggctttggagcagaggtggcctccgtgggatgggttggccgagcggtacaagctcatcggcgccacctccctcgccttcgtcatctgcaacatggacaaggttaacttgagtgtcgcaattattccaatgtcacatcaatatggttggaactcatcaactgctggcttagttcagtcctcattcttttggggttatgcattgagtcaactaccaggaggatggctggcaaaattgtttggcggaaggaaagtgcttgaggtcggtgttgtgacatggtctttggccactgctataattcctgttgtagcaggttttatgccagggcttgtactatcgaggattctggtaggtattggagaaggtgtttcaccatcagctgctacagatttaattgctaggtccattccttggcaagaacgatcaagagcagttgctgttgtttttggtgggttgagctttggcagtgtcttaggactcctgtttgcccctcccatcattcagaactttggctgggagtctgtcttttacatatttggccttcttgggattgtttggtgcttaggatttgaatctcttatagtgcaacggttcggtgacaaaaaaagcctattaaatcttggacaaagttctactggatctgatggtcttatctcatatgctatgtcttcggaatcatcacactcgtcattggaagatctgcaaaattcactaaaggatgtgccttggggggcatttttcaaaagcaaggcggtctgggcaatgatatatgcacacttttgtggaagttgggggcattatacttgtttgtcttggctaccaacattctttagcgaggagctgaacctgaacttgacagaagcagcatgggtgtcagtccttcctcctttgggttcaatgatcattacatctattgcagcaccttttgcagacaacttgatatcaaatggagttgacaccacgaaggtgcgaaaaatttgccaaacaattgcctttgtgtcacctgcgactttcatgatgctttcctctgtggatcttggactgcctccctgggaaattgttgcttttcttacaagtggtgtagcactctccagcttcgcattgtcagggctttattgcacacatcaagacatctctagtgaatatgcaagcattctcctgggaatcacaaacactgtaggcgcggtgccaggaattgtaggcgttgcactcacaggctttcttcttgattcaactcattcttggagttaagccccaggatttttccaagtcaggacctgagtctgagccgtgaatcgtgatgtatggtactcctctgcacataaggatcgtttcacaaggaaaattcgttttgagtttagacaaaagaatggagttctagggcagagaatagatgttatgttcctcttcagtcagtagcagacaagaggaagccactgataaggggacaatgcttgcgtgtatatagtataatgatgataggctttttttctggttagttttcacattttgatatggttttgatttttgaatgtgtgcagtcaggtccgcggtccgccagtttgtagtatcctgttggtttcgggtgtcttggttgttgagtgagatttagaatgtgctgatacttcgtttcagtgcttgtactttagattcgacctgttacgaaaaaaatgaagagtacccactgaattttaaattacaagtcattt

SEQ ID NO: 66548 - DNA, 4317 bp, Zea Mays
ctctcccaccaaaccaccgttctaaacgctcccctagtcccctgctcagcttctccagagatcgccaaagaagcagcatcggcagtaagctctgcggcgatggggtacacgtacactccgacatactactcgggcctgcaggacaccatcgcgtcgctctgcaagtccatcctgccctccttccgcgtgggccggcggctcaccgccgaccaggccgccgcgcggcgccacgccgagcagctcaagtggcagcaggagtccttccaccgcatcctccacctcgccgcgctccaccgcgagggcatcgctccggcctccgacgttgccgccttccgcggaaccatgctcgcggcgctcgtcgcgccgccgcagcacctcgagcagcccgctgtgctccgggacaagctcctcttcctccaggagctcctctacgccaagtgcgtctccgcggcggagtacaacgcgtccaaggcgcccctcgtgcagcggctcgccgcgttcggcgtcatcgtcgactgccccgacgcggaggtctcggccgaggagtggtcggagatcgacctccgtgacccgcctcctcccgccactgcggcggcctccgacaagccgaagcacaaggccttcgtcacgccatggaagagcagatccaagaaggaccaggacgtgaacagcagcgcatcaaggccgccgctggcccctgtggaccataacaacgccaccaacgcgccagtcttcatgaccgagagctcgccgtcggaaacggttccctccgggaaggccgagaaagggaagaggaggcatctggcagggatgttccacagcggcggcagtggcaccgagaacaaggagcctgcgggggaggaaggggtcgtcgagaaagagacggtgagaggtaagaagaagagctcgtgggggttcgatggcatcaagaagtggacgaaagccggtgcctgtaacagtggcgaggcggcagccaccggtgagcagccgcagcatgttcctccgcgctcatcttacagcgagtgccagctggaggcgagccccatggctgcttctggaccggatgccaagagggccaagacgaggctgcactcggacacggacaatgactctgcttccgagctgctgcgtgacaaggttctggtggagaacacaaagaaagagctctcaaggattcaggctgagctatcatctacaaatcggaacttgaacttctcgaatcagcagatggaggccatctcaacaaagcttccggtggacaagtctgacctcaagtcctacttcccaaaggcatggtgtgatcagcacggggatggcgtgatcaccgcggctaaggaagggttcaagcagcacgtcgaagagatggagaagcagagggacatcactggcagtgagggctgggctacctttgaggacatcgaccttgatgacaacttcaacccgagggccttctctcgccaccagccggactctgcgtttgctgatgtgctagagacaaatttatcttctatgcaatccgcgtcaacacgaggcaggcagcggtcatgcgacgtcactaagcaggtcccggtagctgacacgtgggccccggttccgtggcgctgtggcccacggcgacgccttgctcgcagttcgctccacgacatggcggcctcggtgctgcaggccgagcgccacctgctcctgctcggcagcggccgcaaccgtcccctcctccgcatgctcccgccacgcgtgctcttcccgcaccggcgccgcagctggccccgggccgtgagggtgtcacccggcgacggcgagggcgcgggagggttcgcgagcgccgtggagaagcgctcgataccggggatagttgaggaggaagggtatggagcgaggggagaggagttggaaggggacgtggccggggctttggagcagaggtggcctccgtgggatgggttggccgagcggtacaagctcatcggcgccacctccctcgccttcgtcatctgcaacatggacaaggttaacttgagtgtcgcaattattccaatgtcacatcaatatggttggaactcatcaactgctggcttagttcagtcctcattcttttggggttatgcattgagtcaactaccaggaggatggctggcaaaattgtttggcggaaggaaagtgcttgaggtcggtgttgtgacatggtctttggccactgctataattcctgttgtagcaggttttatgccagggcttgtactatcgaggattctggtattggagaaggtgtttcaccatcagctgctacagatttaattgctaggtccattccttggcaagaacgatcaagagcagttgctgttgtttttggtgggttgagctttggcagtgtcttagggtatgttgtattaagatatatggtcatttttatcgaaattaattaaatattccttaattgaaaaaatatacatggtccccactattttcatgatcctttgagcaacaatttacatacttccatgtatgtgctagcatgtaaaatgctgaattcaactaaattggattttcccccatctttgtatggctctaaacggtagcttacatactttctttagtaattgatggtaatgctgttttgtcctttaagtacaaagctttattcctgctcgaacttgttatgtatttggatgtaaacatagaagaatgcagtggaagttatttagaaggataaaatactaaatctattttttatgaactgcttgagactgttctgctggttttatttgtttcattcttcaaggcacatggatgaagagcaattttggcatccctagtatgatggaaaacttggttgttttctgcatcatcgcaaatcttgataactgcgcaagagtcaaggcctccttaacgatcagatgttaactttttttcttgttatcagaacaacattgctctacatttgtctgtatgactttgcagcttgaagtaatagcagaagctttgctacagttaatgttttatccgttttattacattgcagactcctgtttgcccctcccatcattcagaactttggctgggagtctgtcttttacatatttggccttcttgggattgtttggtgcttaggatttgaatctcttatagtgcaacggttcggtgacaaaaaaagcctattaaatcttggacaaagttctactggatctgatggtcttatctcatatgctatgtcttcggaatcatcacactcgtcattggaagatctgcaaaattcactaaaggatgtgccttggggggcatttttcaaaagcaaggcggtctgggcaatgatatatgcacacttttgtggaagttgggggcattatacttgtttgtcttggctaccaacattctttagcgaggagctgaacctgaacttgacagaagcagcatgggtgtcagtccttcctcctttgggttcaatgatcattacatctattgcagcaccttttgcagacaacttgatatcaaatggagttgacaccacgaaggtgcgaaaaatttgccaaacaattgcctttgtgtcacctgcgactttcatgatgctttcctctgtggatcttggactgcctccctgggaaattgttgcttttcttacaagtggtgtagcactctccagcttcgcattgtcagggctttattgcacacatcaagacatctctagtgaatatgcaagcattctcctgggaatcacaaacactgtaggcgcggtgccaggaattgtaggcgttgcactcacaggctttcttcttgattcaactcattcttggagtgtacgacatcaatccatcttcataatctatattgcattttatgaatcactctgatcaccataatgtaagccccaggatttttccaagtcaggacctgagtctgagccgtgaatcgtgatgtatggtactcctctgcacataaggatcgtttcacaaggaaaattcgttttgagtttagacaaaagaatggagttctagggcagagaatagatgttatgttcctcttcagtcagtagcagacaagaggaagccactgataaggggacaatgcttgcgtgtatatagtataatgatgataggctttttttctggttagttttcacattttgatatggttttgatttttgaatgtgtgcagtcaggtccgcggtccgccagtttgtagtatcctgttggtttcgggtgtcttggttgttgagtgagatttagaatgtgctgatacttcgtttcagtgcttgtactttagattcgacctgttacgaaaaaaatgaagagtacccactgaattttaaattacaagtcattt

SEQ ID NO: 66549 - DNA, 3681 bp, Zea Mays
ctctcccaccaaaccaccgttctaaacgctcccctagtcccctgctcagcttctccagagatcgccaaagaagcagcatcggcagtaagctctgcggcgatggggtacacgtacactccgacatactactcgggcctgcaggacaccatcgcgtcgctctgcaagtccatcctgccctccttccgcgtgggccggcggctcaccgccgaccaggccgccgcgcggcgccacgccgagcagctcaagtggcagcaggagtccttccaccgcatcctccacctcgccgcgctccaccgcgagggcatcgctccggcctccgacgttgccgccttccgcggaaccatgctcgcggcgctcgtcgcgccgccgcagcacctcgagcagcccgctgtgctccgggacaagctcctcttcctccaggagctcctctacgccaagtgcgtctccgcggcggagtacaacgcgtccaaggcgcccctcgtgcagcggctcgccgcgttcggcgtcatcgtcgactgccccgacgcggaggtctcggccgaggagtggtcggagatcgacctccgtgacccgcctcctcccgccactgcggcggcctccgacaagccgaagcacaaggccttcgtcacgccatggaagagcagatccaagaaggaccaggacgtgaacagcagcgcatcaaggccgccgctggcccctgtggaccataacaacgccaccaacgcgccagtcttcatgaccgagagctcgccgtcggaaacggttccctccgggaaggccgagaaagggaagaggaggcatctggcagggatgttccacagcggcggcagtggcaccgagaacaaggagcctgcgggggaggaaggggtcgtcgagaaagagacggtgagaggtaagaagaagagctcgtgggggttcgatggcatcaagaagtggacgaaagccggtgcctgtaacagtggcgaggcggcagccaccggtgagcagccgcagcatgttcctccgcgctcatcttacagcgagtgccagctggaggcgagccccatggctgcttctggaccggatgccaagagggccaagacgaggctgcactcggacacggacaatgactctgcttccgagctgctgcgtgacaaggttctggtggagaacacaaagaaagagctctcaaggattcaggctgagctatcatctacaaatcggaacttgaacttctcgaatcagcagatggaggccatctcaacaaagcttccggtggacaagtctgacctcaagtcctacttcccaaaggcatggtgtgatcagcacggggatggcgtgatcaccgcggctaaggaagggttcaagcagcacgtcgaagagatggagaagcagagggacatcactggcagtgagggctgggctacctttgaggacatcgaccttgatgacaacttcaacccgagggccttctctcgccaccagccggactctgcgtttgctgatgtgctagagacaaatttatcttctatgcaatccgcgtcaacacgaggcaggcagcggtcatgcgacgtcactaagcaggtcccggtagctgacacgtgggccccggttccgtggcgctgtggcccacggcgacgccttgctcgcagttcgctccacgacatggcggcctcggtgctgcaggccgagcgccacctgctcctgctcggcagcggccgcaaccgtcccctcctccgcatgctcccgccacgcgtgctcttcccgcaccggcgccgcagctggccccgggccgtgagggtgtcacccggcgacggcgagggcgcgggagggttcgcgagcgccgtggagaagcgctcgataccggggatagttgaggaggaagggtatggagcgaggggagaggagttggaaggggacgtggccggggctttggagcagaggtggcctccgtgggatgggttggccgagcggtacaagctcatcggcgccacctccctcgccttcgtcatctgcaacatggacaaggttaacttgagtgtcgcaattattccaatgtcacatcaatatggttggaactcatcaactgctggcttagttcagtcctcattcttttggggttatgcattgagtcaactaccaggaggatggctggcaaaattgtttggcggaaggaaagtgcttgaggtcggtgttgtgacatggtctttggccactgctataattcctgttgtagcaggttttatgccagggcttgtactatcgaggattctggtattggagaaggtgtttcaccatcagctgctacagatttaattgctaggtccattccttggcaagaacgatcaagagcagttgctgttgtttttggtgggttgagctttggcagtgtcttaggactcctgtttgcccctcccatcattcagaactttggctgggagtctgtcttttacatatttggccttcttgggattgtttggtgcttaggatttgaatctcttatagtgcaacggttcggtgacaaaaaaagcctattaaatcttggacaaagttctactggatctgatggtcttatctcatatgctatgtcttcggaatcatcacactcgtcattggaagatctgcaaaattcactaaaggatgtgccttggggggcatttttcaaaagcaaggcggtctgggcaatgatatatgcacacttttgtggaagttgggggcattatacttgtttgtcttggctaccaacattctttagcgaggagctgaacctgaacttgacagaagcagcatgggtgtcagtccttcctcctttgggttcaatgatcattacatctattgcagcaccttttgcagacaacttgatatcaaatggagttgacaccacgaaggtgcgaaaaatttgccaaacaattgcctttgtgtcacctgcgactttcatgatgctttcctctgtggatcttggactgcctccctgggaaattgttgcttttcttacaagtggtgtagcactctccagcttcgcattgtcagggctttattgcacacatcaagacatctctagtgaatatgcaagcattctcctgggaatcacaaacactgtaggcgcggtgccaggaattgtaggcgttgcactcacaggctttcttcttgattcaactcattcttggagtatatcactctttgcgccttctatcttcttttacttaactggtactgttgtatggttggcatttgcaagcagtaagccccaggatttttccaagtcaggacctgagtctgagccgtgaatcgtgatgtatggtactcctctgcacataaggatcgtttcacaaggaaaattcgttttgagtttagacaaaagaatggagttctagggcagagaatagatgttatgttcctcttcagtcagtagcagacaagaggaagccactgataaggggacaatgcttgcgtgtatatagtataatgatgataggctttttttctggttagttttcacattttgatatggttttgatttttgaatgtgtgcagtcaggtccgcggtccgccagtttgtagtatcctgttggtttcgggtgtcttggttgttgagtgagatttagaatgtgctgatacttcgtttcagtgcttgtactttagattcgacctgttacgaaaaaaatgaagagtacccactgaattttaaattacaagtcattt

SEQ ID NO: 66550 - DNA, 4115 bp, Zea Mays
ctctcccaccaaaccaccgttctaaacgctcccctagtcccctgctcagcttctccagagatcgccaaagaagcagcatcggcagtaagctctgcggcgatggggtacacgtacactccgacatactactcgggcctgcaggacaccatcgcgtcgctctgcaagtccatcctgccctccttccgcgtgggccggcggctcaccgccgaccaggccgccgcgcggcgccacgccgagcagctcaagtggcagcaggagtccttccaccgcatcctccacctcgccgcgctccaccgcgagggcatcgctccggcctccgacgttgccgccttccgcggaaccatgctcgcggcgctcgtcgcgccgccgcagcacctcgagcagcccgctgtgctccgggacaagctcctcttcctccaggagctcctctacgccaagtgcgtctccgcggcggagtacaacgcgtccaaggcgcccctcgtgcagcggctcgccgcgttcggcgtcatcgtcgactgccccgacgcggaggtctcggccgaggagtggtcggagatcgacctccgtgacccgcctcctcccgccactgcggcggcctccgacaagccgaagcacaaggccttcgtcacgccatggaagagcagatccaagaaggaccaggacgtgaacagcagcgcatcaaggccgccgctggcccctgtggaccataacaacgccaccaacgcgccagtcttcatgaccgagagctcgccgtcggaaacggttccctccgggaaggccgagaaagggaagaggaggcatctggcagggatgttccacagcggcggcagtggcaccgagaacaaggagcctgcgggggaggaaggggtcgtcgagaaagagacggtgagaggtaagaagaagagctcgtgggggttcgatggcatcaagaagtggacgaaagccggtgcctgtaacagtggcgaggcggcagccaccggtgagcagccgcagcatgttcctccgcgctcatcttacagcgagtgccagctggaggcgagccccatggctgcttctggaccggatgccaagagggccaagacgaggctgcactcggacacggacaatgactctgcttccgagctgctgcgtgacaaggttctggtggagaacacaaagaaagagctctcaaggattcaggctgagctatcatctacaaatcggaacttgaacttctcgaatcagcagatggaggccatctcaacaaagcttccggtggacaagtctgacctcaagtcctacttcccaaaggcatggtgtgatcagcacggggatggcgtgatcaccgcggctaaggaagggttcaagcagcacgtcgaagagatggagaagcagagggacatcactggcagtgagggctgggctacctttgaggacatcgaccttgatgacaacttcaacccgagggccttctctcgccaccagccggactctgcggtgaaaggcaagaaagtcaatgaaagcctcaccagcagtttcacaaacccattctacagcgagaagaacccgttcttgaacacaaactacaactgaatgatgttgaactcttttgcgttgggatgtatcagtccgtttatatttttgttactggtataatgttgttattgtacttagggttcaattgttacattggatcagggttgttgtttatgacgtaagaagttgtatggttggagattacttgatcattcttgatatctactaatattgaaatcatttaggtgtctagttgagtttcgataagagtccaaacattgagattggcctagggcccggctctgcctacagcgtccgtgtaaacttaacgccataggaacagacgccgactccgataatatagtcccaccaataacgtaaacatgaaattttgtataaaaaaactaaaaatgtcagcaatatgttacataaaactaaaaaattacaatgaacgctgtactaaatcgatgcatacaaaatcattgtttgcagtttgctgatgtgctagagacaaatttatcttctatgcaatccgcgtcaacacgaggcaggcagcggtcatgcgacgtcactaagcaggtcccggtagctgacacgtgggccccggttccgtggcgctgtggcccacggcgacgccttgctcgcagttcgctccacgacatggcggcctcggtgctgcaggccgagcgccacctgctcctgctcggcagcggccgcaaccgtcccctcctccgcatgctcccgccacgcgtgctcttcccgcaccggcgccgcagctggccccgggccgtgagggtgtcacccggcgacggcgagggcgcgggagggttcgcgagcgccgtggagaagcgctcgataccggggatagttgaggaggaagggtatggagcgaggggagaggagttggaaggggacgtggccggggctttggagcagaggtggcctccgtgggatgggttggccgagcggtacaagctcatcggcgccacctccctcgccttcgtcatctgcaacatggacaaggttaacttgagtgtcgcaattattccaatgtcacatcaatatggttggaactcatcaactgctggcttagttcagtcctcattcttttggggttatgcattgagtcaactaccaggaggatggctggcaaaattgtttggcggaaggaaagtgcttgaggtcggtgttgtgacatggtctttggccactgctataattcctgttgtagcaggttttatgccagggcttgtactatcgaggattctggtaggtattggagaaggtgtttcaccatcagctgctacagatttaattgctaggtccattccttggcaagaacgatcaagagcagttgctgttgtttttggtgggttgagctttggcagtgtcttaggactcctgtttgcccctcccatcattcagaactttggctgggagtctgtcttttacatatttggccttcttgggattgtttggtgcttaggatttgaatctcttatagtgcaacggttcggtgacaaaaaaagcctattaagatgtgccttggggggcatttttcaaaagcaaggcggtctgggcaatgatatatgcacacttttgtggaagttgggggcattatacttgtttgtcttggctaccaacattctttagcgaggagctgaacctgaacttgacagaagcagcatgggtgtcagtccttcctcctttgggttcaatgatcattacatctattgcagcaccttttgcagacaacttgatatcaaatggagttgacaccacgaaggtgcgaaaaatttgccaaacaattgcctttgtgtcacctgcgactttcatgatgctttcctctgtggatcttggactgcctccctgggaaattgttgcttttcttacaagtggtgtagcactctccagcttcgcattgtcagggctttattgcacacatcaagacatctctagtgaatatgcaagcattctcctgggaatcacaaacactgtaggcgcggtgccaggaattgtaggcgttgcactcacaggctttcttcttgattcaactcattcttggagtatatcactctttgcgccttctatcttcttttacttaactggtactgttgtatggttggcatttgcaagcagtaagccccaggatttttccaagtcaggacctgagtctgagccgtgaatcgtgatgtatggtactcctctgcacataaggatcgtttcacaaggaaaattcgttttgagtttagacaaaagaatggagttctagggcagagaatagatgttatgttcctcttcagtcagtagcagacaagaggaagccactgataaggggacaatgcttgcgtgtatatagtataatgatgataggctttttttctggttagttttcacattttgatatggttttgatttttgaatgtgtgcagtcaggtccgcggtccgccagtttgtagtatcctgttggtttcgggtgtcttggttgttgagtgagatttagaatgtgctgatacttcgtttcagtgcttgtactttagattcgacctgttacgaaaaaaatgaagagtacccactgaattttaaattacaagtcattt

SEQ ID NO: 66551 - DNA, 4188 bp, Zea Mays
ctctcccaccaaaccaccgttctaaacgctcccctagtcccctgctcagcttctccagagatcgccaaagaagcagcatcggcagtaagctctgcggcgatggggtacacgtacactccgacatactactcgggcctgcaggacaccatcgcgtcgctctgcaagtccatcctgccctccttccgcgtgggccggcggctcaccgccgaccaggccgccgcgcggcgccacgccgagcagctcaagtggcagcaggagtccttccaccgcatcctccacctcgccgcgctccaccgcgagggcatcgctccggcctccgacgttgccgccttccgcggaaccatgctcgcggcgctcgtcgcgccgccgcagcacctcgagcagcccgctgtgctccgggacaagctcctcttcctccaggagctcctctacgccaagtgcgtctccgcggcggagtacaacgcgtccaaggcgcccctcgtgcagcggctcgccgcgttcggcgtcatcgtcgactgccccgacgcggaggtctcggccgaggagtggtcggagatcgacctccgtgacccgcctcctcccgccactgcggcggcctccgacaagccgaagcacaaggccttcgtcacgccatggaagagcagatccaagaaggaccaggacgtgaacagcagcgcatcaaggccgccgctggcccctgtggaccataacaacgccaccaacgcgccagtcttcatgaccgagagctcgccgtcggaaacggttccctccgggaaggccgagaaagggaagaggaggcatctggcagggatgttccacagcggcggcagtggcaccgagaacaaggagcctgcgggggaggaaggggtcgtcgagaaagagacggtgagaggtaagaagaagagctcgtgggggttcgatggcatcaagaagtggacgaaagccggtgcctgtaacagtggcgaggcggcagccaccggtgagcagccgcagcatgttcctccgcgctcatcttacagcgagtgccagctggaggcgagccccatggctgcttctggaccggatgccaagagggccaagacgaggctgcactcggacacggacaatgactctgcttccgagctgctgcgtgacaaggttctggtggagaacacaaagaaagagctctcaaggattcaggctgagctatcatctacaaatcggaacttgaacttctcgaatcagcagatggaggccatctcaacaaagcttccggtggacaagtctgacctcaagtcctacttcccaaaggcatggtgtgatcagcacggggatggcgtgatcaccgcggctaaggaagggttcaagcagcacgtcgaagagatggagaagcagagggacatcactggcagtgagggctgggctacctttgaggacatcgaccttgatgacaacttcaacccgagggccttctctcgccaccagccggactctgcggtgaaaggcaagaaagtcaatgaaagcctcaccagcagtttcacaaacccattctacagcgagaagaacccgttcttgaacacaaactacaactgaatgatgttgaactcttttgcgttgggatgtatcagtccgtttatatttttgttactggtataatgttgttattgtacttagggttcaattgttacattggatcagggttgttgtttatgacgtaagaagttgtatggttggagattacttgatcattcttgatatctactaatattgaaatcatttaggtgtctagttgagtttcgataagagtccaaacattgagattggcctagggcccggctctgcctacagcgtccgtgtaaacttaacgccataggaacagacgccgactccgataatatagtcccaccaataacgtaaacatgaaattttgtataaaaaaactaaaaatgtcagcaatatgttacataaaactaaaaaattacaatgaacgctgtactaaatcgatgcatacaaaatcattgtttgcagtttgctgatgtgctagagacaaatttatcttctatgcaatccgcgtcaacacgaggcaggcagcggtcatgcgacgtcactaagcaggtcccggtagctgacacgtgggccccggttccgtggcgctgtggcccacggcgacgccttgctcgcagttcgctccacgacatggcggcctcggtgctgcaggccgagcgccacctgctcctgctcggcagcggccgcaaccgtcccctcctccgcatgctcccgccacgcgtgctcttcccgcaccggcgccgcagctggccccgggccgtgagggtgtcacccggcgacggcgagggcgcgggagggttcgcgagcgccgtggagaagcgctcgataccggggatagttgaggaggaagggtatggagcgaggggagaggagttggaaggggacgtggccggggctttggagcagaggtggcctccgtgggatgggttggccgagcggtacaagctcatcggcgccacctccctcgccttcgtcatctgcaacatggacaaggttaacttgagtgtcgcaattattccaatgtcacatcaatatggttggaactcatcaactgctggcttagttcagtcctcattcttttggggttatgcattgagtcaactaccaggaggatggctggcaaaattgtttggcggaaggaaagtgcttgaggtcggtgttgtgacatggtctttggccactgctataattcctgttgtagcaggttttatgccagggcttgtactatcgaggattctggtaggtattggagaaggtgtttcaccatcagctgctacagatttaattgctaggtccattccttggcaagaacgatcaagagcagttgctgttgtttttgactcctgtttgcccctcccatcattcagaactttggctgggagtctgtcttttacatatttggccttcttgggattgtttggtgcttaggatttgaatctcttatagtgcaacggttcggtgacaaaaaaagcctattaaatcttggacaaagttctactggatctgatggtcttatctcatatgctatgtcttcggaatcatcacactcgtcattggaagatctgcaaaattcactaaaggatgtgccttggggggcatttttcaaaagcaaggcggtctgggcaatgatatatgcacacttttgtggaagttgggggcattatacttgtttgtcttggctaccaacattctttagcgaggagctgaacctgaacttgacagaagcagcatgggtgtcagtccttcctcctttgggttcaatgatcattacatctattgcagcaccttttgcagacaacttgatatcaaatggagttgacaccacgaaggtgcgaaaaatttgccaaacaattgcctttgtgtcacctgcgactttcatgatgctttcctctgtggatcttggactgcctccctgggaaattgttgcttttcttacaagtggtgtagcactctccagcttcgcattgtcagggctttattgcacacatcaagacatctctagtgaatatgcaagcattctcctgggaatcacaaacactgtaggcgcggtgccaggaattgtaggcgttgcactcacaggctttcttcttgattcaactcattcttggagtatatcactctttgcgccttctatcttcttttacttaactggtactgttgtatggttggcatttgcaagcagtaagccccaggatttttccaagtcaggacctgagtctgagccgtgaatcgtgatgtatggtactcctctgcacataaggatcgtttcacaaggaaaattcgttttgagtttagacaaaagaatggagttctagggcagagaatagatgttatgttcctcttcagtcagtagcagacaagaggaagccactgataaggggacaatgcttgcgtgtatatagtataatgatgataggctttttttctggttagttttcacattttgatatggttttgatttttgaatgtgtgcagtcaggtccgcggtccgccagtttgtagtatcctgttggtttcgggtgtcttggttgttgagtgagatttagaatgtgctgatacttcgtttcagtgcttgtactttagattcgacctgttacgaaaaaaatgaagagtacccactgaattttaaattacaagtcattt

SEQ ID NO: 66552 - DNA, 3757 bp, Zea Mays
ctctcccaccaaaccaccgttctaaacgctcccctagtcccctgctcagcttctccagagatcgccaaagaagcagcatcggcagtaagctctgcggcgatggggtacacgtacactccgacatactactcgggcctgcaggacaccatcgcgtcgctctgcaagtccatcctgccctccttccgcgtgggccggcggctcaccgccgaccaggccgccgcgcggcgccacgccgagcagctcaagtggcagcaggagtccttccaccgcatcctccacctcgccgcgctccaccgcgagggcatcgctccggcctccgacgttgccgccttccgcggaaccatgctcgcggcgctcgtcgcgccgccgcagcacctcgagcagcccgctgtgctccgggacaagctcctcttcctccaggagctcctctacgccaagtgcgtctccgcggcggagtacaacgcgtccaaggcgcccctcgtgcagcggctcgccgcgttcggcgtcatcgtcgactgccccgacgcggaggtctcggccgaggagtggtcggagatcgacctccgtgacccgcctcctcccgccactgcggcggcctccgacaagccgaagcacaaggccttcgtcacgccatggaagagcagatccaagaaggaccaggacgtgaacagcagcgcatcaaggccgccgctggcccctgtggaccataacaacgccaccaacgcgccagtcttcatgaccgagagctcgccgtcggaaacggttccctccgggaaggccgagaaagggaagaggaggcatctggcagggatgttccacagcggcggcagtggcaccgagaacaaggagcctgcgggggaggaaggggtcgtcgagaaagagacggtgagaggtaagaagaagagctcgtgggggttcgatggcatcaagaagtggacgaaagccggtgcctgtaacagtggcgaggcggcagccaccggtgagcagccgcagcatgttcctccgcgctcatcttacagcgagtgccagctggaggcgagccccatggctgcttctggaccggatgccaagagggccaagacgaggctgcactcggacacggacaatgactctgcttccgagctgctgcgtgacaaggttctggtggagaacacaaagaaagagctctcaaggattcaggctgagctatcatctacaaatcggaacttgaacttctcgaatcagcagatggaggccatctcaacaaagcttccggtggacaagtctgacctcaagtcctacttcccaaaggcatggtgtgatcagcacggggatggcgtgatcaccgcggctaaggaagggttcaagcagcacgtcgaagagatggagaagcagagggacatcactggcagtgagggctgggctacctttgaggacatcgaccttgatgacaacttcaacccgagggccttctctcgccaccagccggactctgcgtttgctgatgtgctagagacaaatttatcttctatgcaatccgcgtcaacacgaggcaggcagcggtcatgcgacgtcactaagcaggtcccggtagctgacacgtgggccccggttccgtggcgctgtggcccacggcgacgccttgctcgcagttcgctccacgacatggcggcctcggtgctgcaggccgagcgccacctgctcctgctcggcagcggccgcaaccgtcccctcctccgcatgctcccgccacgcgtgctcttcccgcaccggcgccgcagctggccccgggccgtgagggtgtcacccggcgacggcgagggcgcgggagggttcgcgagcgccgtggagaagcgctcgataccggggatagttgaggaggaagggtatggagcgaggggagaggagttggaaggggacgtggccggggctttggagcagaggtggcctccgtgggatgggttggccgagcggtacaagctcatcggcgccacctccctcgccttcgtcatctgcaacatggacaaggttaacttgagtgtcgcaattattccaatgtcacatcaatatggttggaactcatcaactgctggcttagttcagtcctcattcttttggggttatgcattgagtcaactaccaggaggatggctggcaaaattgtttggcggaaggaaagtgcttgaggtcggtgttgtgacatggtctttggccactgctataattcctgttgtagcaggttttatgccagggcttgtactatcgaggattctggtattggagaaggtgtttcaccatcagctgctacagatttaattgctaggtccattccttggcaagaacgatcaagagcagttgctgttgtttttggtgggttgagctttggcagtgtcttaggactcctgtttgcccctcccatcattcagaactttggctgggagtctgtcttttacatatttggccttcttgggattgtttggtgcttaggatttgaatctcttatagtgcaacggttcggtgacaaaaaaagcctattaaatcttggacaaagttctactggatctgatggtcttatctcatatgctatgtcttcggaatcatcacactcgtcattggaagatctgcaaaattcactaaaggatgtgccttggggggcatttttcaaaagcaaggcggtctgggcaatgatatatgcacacttttgtggaagttgggggcattatacttgtttgtcttggctaccaacattctttagcgaggagctgaacctgaacttgacagaagcagcatgggtgtcagtccttcctcctttgggttcaatgatcattacatctattgcagcaccttttgcagacaacttgatatcaaatggagttgacaccacgaaggtgcgaaaaatttgccaaacaattgcctttgtgtcacctgcgactttcatgatgctttcctctgtggatcttggactgcctccctgggaaattgttgcttttcttacaagtggtgtagcactctccagcttcgcattgtcaggtcatgttgttaagattgcaaccaagtttccatttttacacggttctgaggtccaaacctaaatattttcgttggtaaacagggctttattgcacacatcaagacatctctagtgaatatgcaagcattctcctgggaatcacaaacactgtaggcgcggtgccaggaattgtaggcgttgcactcacaggctttcttcttgattcaactcattcttggagtgtacgacatcaatccatcttcataatctatattgcattttatgaatcactctgatcaccataatgtaagccccaggatttttccaagtcaggacctgagtctgagccgtgaatcgtgatgtatggtactcctctgcacataaggatcgtttcacaaggaaaattcgttttgagtttagacaaaagaatggagttctagggcagagaatagatgttatgttcctcttcagtcagtagcagacaagaggaagccactgataaggggacaatgcttgcgtgtatatagtataatgatgataggctttttttctggttagttttcacattttgatatggttttgatttttgaatgtgtgcagtcaggtccgcggtccgccagtttgtagtatcctgttggtttcgggtgtcttggttgttgagtgagatttagaatgtgctgatacttcgtttcagtgcttgtactttagattcgacctgttacgaaaaaaatgaagagtacccactgaattttaaattacaagtcattt

SEQ ID NO: 66553 - DNA, 1502 bp, Zea Mays
ctggactcgcctcgatccctcattcctctactgcagcacactaacgccatggatggacgactgaagctccctgctacctctaaatccctgtcctcagtagccgattgcttaaattgagtttgccatcacctccccctcgccacgtcgatccgttcgaaccctttcccgagcgcagccatgagcggcgatgcccgcgccattgcagcagtaggctgccaccgcgggctcgcgtggccaggccacctggggctgccgccggccgagccaactccttggctgtgcgcgccctccactagggacggctcggctggccccgccgcgctcggccgacaccggcgagccccgaccaggaaaggccgatccccttccctgtacgttccaaggaagaagacgacggaccaatctgcaaattccataacagcagggggaccgagagatgatgatcgtgcaagtgatgtggtgacaaccacaagatgcagtcggtggacgacccaaggaaggatggacttgaccagtggatgctcgccaagcgagtgccacccagcaaacactacctaagtgttaaattaaaggcaagccccggttttatgcataaccgtttatatatgctattttactacacttagtgtttgtaggcttgtaccgtgcacttaagtgtaggagttggttgaaaccctagttgcatgaacttaggattccttttgagatggatactagtatgctaggtcgagtagctgctatgctaaatcaggatctcggtagaagtcgagtgatttttctagcactcgcgcgaggtcaggaattggttgtatccattttttataacagaatgatgatggtctgtggacacggatccatggggatgcgttgtctatgagacaaaattggaataaggattaacgtgcggatacctgtgtcaagcgtttgaatgtactaaacacatgtcgggaaaaatggtaaccggtaaacctagtacctgagtgaagccgggcgcgaactttatccctcacgcgacctgagacggggtctcccattctagatatggtgggtacaagtgcggccactgcacgacggcagtcggggtcagtggagcattgtatgccaagacggtgaggcctggacgcgaacggggaatcgatggggacggttgacatgtgtggggtcggagtaccctgacatgtcgtgtgtttaggtttaccttgcaaggttaaaactcgattcgaatcgtctgcttctcacagctaatgagactgcttgatccattgtactgcattgagtaaaaagtggaaatgagacactggaaaagatattgattgatagaatgtttgataccatgtatgagtagataggttctcatctagtctaaattactattctagaacttgaaaagctaaaacttgtttttagactcagctagtgcttttggcaaaccaaactcctcaaccaaacagctgcatgtctagaggtagaggagtagactcctcacaccgggtaagtctagc

SEQ ID NO: 66554 - DNA, 1251 bp, Zea Mays
ctgcagcctgcaggcagccgcccgcgcggaggaggaggaggaggaggaggaaagcaacaagcgatcgtcatcagatctctcacacaagacgccggagtccaggcagatagatacacaccgcgccgcctgccgccatgtcgcctctctgctgtgactcggactggtcgtcggtcacctgagagcaagctaaacgacgacggacggacggagctagctgctggctgctgccagtcacgcctcctgctcatcgaccaagtgcgccaaataaaggatcggaggctgctagcttgttactaataagctgcggcggccggtccgcgtttttctttgcttccgatccgatggcggccgcctcgtccgcgcccttctttgggctcggcgacacgcagatgcagccacagcagggatccagctcctctctgcagcaaaactccacagctgctcctggcgccgcggcggtgccgccgccaaagaagaagaggaaccagccaggcaacccaaatcctgacgcggaggtgatcgcgctgtctccgcggacgctgctggcgacgaaccgcttcgtgtgcgaggtgtgcaacaaggggttccagcgggagcagaacctgcagctgcaccggcgcggccacaacctgccgtggaagctgaagcagaagaaccccagggaggcccgccgccggagacttcctcggcgtcggcaggggcgccgcgacgatggcgccgcccgggctccacatgggcgccctggacccggcccagcagatgaaatgaggtatgacagtacgatcgagtatgatgggtcggtcagggaatgatatgatgaagagcagcaacgtacgataagcacatgacaagagatgcgagaagggaagtcaataataaaacagacgatcatgcacgtgaataagggtactagctttcgcgcgcatgcatgcatgggaaggtaagctagctagtgacgagggatcagaaggatggagtagtagtaaaagaaactgttttgttttaagttaatttccgtgttcatatgcatatgctggctgcatgcaacttgttggtttttcgccatttcccgtacgatttcgtggtgttaattcaagtggtttactactctatatatatatgagtatttaaatttggctggagatggcggcgcgcggtctcccccgatgtgaatgaaacgaagctcatgcatcatatgtggagctaggccgcgcgggccagagaccagaatctaagcaggatgctttggac

SEQ ID NO: 66555 - DNA, 2422 bp, Zea Mays
ctgcaggcagccgcccgcgcggaggaggaggaggaggaggaggaaagcaacaagcgatcgtcatcagatctctcacacaagacgccggagtccaggcagatagatacacaccgcgccgcctgccgccatgtcgcctctctgctgtgactcggactggtcgtcggtcacctgagagcaagctaaacgacgacggacggacggagctagctgctggctgctgccagtcacgcctcctgctcatcgaccaagtgcgccaaataaaggatcggaggctgctagcttgttactaataagctgcggcggccggtccgcgtttttctttgcttccgatccgatggcggccgcctcgtccgcgcccttctttgggctcggcgacacgcagatgcagccacagcagggatccagctcctctctgcagcaaaactccacagctgctcctggcgccgcggcggtgccgccgccaaagaagaagaggaaccagccaggcaacccaaatcctgacgcggaggtgatcgcgctgtctccgcggacgctgctggcgacgaaccgcttcgtgtgcgaggtgtgcaacaaggggttccagcgggagcagaacctgcagctgcaccggcgcggccacaacctgccgtggaagctgaagcagaagaaccccagggaggcccgccgccgggtgtacctgtgcccggagccgacgtgcgtgcaccacgacccgtcccgggcgctgggcgacctcacggggatcaagaagcactactgccgcaagcacggcgagaagaagtggaagtgcgacaagtgcagcaagcgctacgccgtgcagtccgactggaaggcgcactccaagacctgcggcacccgcgagtaccgatgcgactgcggcaccctcttctccaggagggacagcttcatcacccaccgcgccttctgcgacgcgctggctcgtgagagcgcgcagatgccgcccctgggcgccggcctctacgtcggtcccggcagcatgagcctggggctctcccagatccatggctttgcagatcaagcccagtcctcttcagcagcagcagccccgcagtttgaccacatcatgccatcgtcttcgggctccagctccatgttccgttctcaggcgtcggcctcctcgccatcttacttcctcggcggcagcgcccctcctgccgccgcccaggatttctccgaggacggctcccaaggcagccagggccctctgctccacggcaaggcgcacttccacggcctgatgatgcagctccccgagcagcagcaccagccgggcagcagcaacgccgccgtcggcgccaacggtagcaacatcctgaaccttgggttcttctcagccggcaacagcggtggcacgtccggcagcctgcaggacgcgcgcattgccatccaagaccagttcaacctcagcggcagcggcagtggaagcgcagagcacggcaacaacgtgatggtggcgtccatcggaagccacctcggcagaggcttcccttccctgtacagctcgtctccgtcggccgggatggcccagaactcggcgacggcgctcctgatgaaggcggcccagatgggctcgacgacgtcgagcaccacccacaacaaccacaacggccctactacgactagcacgctgctccgtgctacgggcttcagcggcgccaccggcagcgggcagctggggactactggcggcagggccgccgcgggagaagaaggggcggcgtcccacgaggcacacttccatgagctcatcatgaactctctggccggcggcggcttctccggcaccgcagggttcggcggcggcgtggacgacggcaagctgagcaccagagacttcctcggcgtcggcaggggcgccgcgacgatggcgccgcccgggctccacatgggcgccctggacccggcccagcagatgaaatgaggtatgacagtacgatcgagtatgatgggtcggtcagggaatgatatgatgaagagcagcaacgtacgataagcacatgacaagagatgcgagaagggaagtcaataataaaacagacgatcatgcacgtgaataagggtactagctttcgcgcgcatgcatgcatgggaaggtaagctagctagtgacgagggatcagaaggatggagtagtagtaaaagaaactgttttgttttaagttaatttccgtgttcatatgcatatgctggctgcatgcaacttgttggtttttcgccatttcccgtacgatttcgtggtgttaattcaagtggtttactactctatatatatatgagtatttaaatttggctggagatggcggcgcgcggtctcccccgatgtgaatgaaacgaagctcatgcatcatatgtggagctaggccgcgcgggccagagaccagaatctaagcaggatgctttggac

SEQ ID NO: 66556 - DNA, 4610 bp, Zea Mays
aattttgtgtgtcttcaaagcaaatatgccatgtgtgggtgagattgagggagggaatatacatctataatttgtaaagttccttttccctcgtgtaaagtccttttcctttaatgcactagaagtcatgctcacacacgttttctgtggttgtgctacatttatagttgtggggccaaacaaaaacttctgaagtgtttatgtccttacttttattctctatccccttcatttatccttcttataagctttctcacccagcgaatctctacaacattcaaatttactatgggtgagcaaagatttagagattgtggcaatcagacacagtgagaccttaagatgggatgagtctatgaatcctgtgttgatgccaaagggcgagagcggatatggcatctatgatttggaggcgatgagttgggatctcaacgaggtagcaggatgagatcttgatgaggtagcgagctaagagcttgaagtggtagcaagatccttggatctcacctaagcagttcggtgggaccatagagaggaaccaagcgaagatcctaaagcggtggcagtggcgacgagcttggatctggacaagacaccactatggaatctcaaagaggcaacaagttggcattctagagtgatagcgacgattttggatctcaatggggcatcagggggggttgaaagaggcaacaagcctagagatcgaagcaacgacgatgagctcggatctcgataaggcagtaggatgggaccttccaagattagagctcaaagcaatggtgttgaggtgggataacaaaggagcaacatgtctagtgccaaaagaggcagcaacaattcagggtcttggtgaggcgacatgtcgagctcttaaaacatcgaggatgagttgggatttggacaaggatgacaaggggaatctcaacgaggtatcaggcttagagtcgattttgggtttggaggaggacgttgaatggaatctcgatgaggtaccgggcttagagcattgttcagatttagatgaggatgttgagtgggatctcgatgaggtaccaggcttagagacaagttcggatttggacgatgatgcagagtggaatctcgatgaggtactaggcgtagagtcgagttcagatttagagggtgatgaatggaatctcaatgaggtacgaggcttagagtcgagttcgagtttggatgaggatgttgagttgaatctcactgaggtaccaggcttagagccaagttcagatttagacgaggatgttgagtcgaatctcgacaaagtaccaggcttagagtctgaagaaatagaggaccattatgaaccaacacgacatgtcttcgttttttcttcgattcggcgcgtggcaacctggtcagtccaatccgtccgtgaagaatttatccgtattttcgtttgcgtcgcatcgtttctgcgaaggatttcctgttcgttttgggggagaaaggcgtcgtccttgatgtctactatcgcgaccccgccgccgccgattgcgcaagagaaggccgccagccggaataagcgcaagtaccgtgccgagccaccttccgccgagttgggcccatacgggctggagtacccgctgacggcggactgcatgggattcgagtttatgtcgcctgagaaggctgccatggcagcagcggtagccgctgccgagggtgtcagccttgacctcctccagaactcgtgcgaaaagtgcaaagatctccaccctactgcggaggagttactggactgccaacgatatgtgaattggagcgacccaaacgagacgcagctggaggagatccttctcaagagtctgggcaccacctttgacaatgctgtgagtctgatcaccacaatgggctactctgaggcggttgcacgggctgctgttgtgcgggcagctgcgcaatacaactggagggagagccttgcagggtttggagaggcagcagttgaggttctcaagacggaaggggacatgttgccgagggagggtgcctctgttgaagacatgaggaggattgagcaggctgtgcttggtagtatggttatgtgggtaaatgaggctcagccactctgcaccacaggcgatgtaatgttttgcttgcttatgtctgacatgaacgtggcaaatgccagtgccatggactacaatacttcttccctcccatctgttgctgctcaagttattgcccaaccagacgcggggaactatgttactggttcaggttcaaatttatcagtttctattaccaacccacagactggcgttacattccgtggaaaacttaccccaatgccaccgggctcttatggtgctgtaaaagctgattcgtcaatggcaccagcaagcctcaatgtgtcaagtaccaaaccctcggtgccgggcaagactcagtgtgtgataccaaatattgagccaaaagaacaacctgttcctatacatgatcattcagaggaccaaccatttgttgctgctgcgacacaatctgtgaaaaatgacaagccatccccaagcaagagggggggctctaagagggactccttgcatcgacagaagttgacaagctttgataaaagttcccgagcattgggttccaaaggttctcttaggtctggcaagcatagctattcggccagtgcggtattggagaggaagtgccggtcattttcagattctactactagcaacttgaagggtgcatcaagagttgctaaagggtttgctgcaagcatatctggatcagaagtatcagctgacctttcctttactggtaccctttccccttctccatcatttgatgccaagatagttagtaactcaaacccagcacctactgctagcacagatctttcattgtcattgccctcctcaagtgatagtttaacaccatcttcgaatcatgattccattaccgagggagtggactctagtagcaaaattaatttttcgtatgatgaagaacagaaggtctggatcccacaagataaaaaggataaaattgtcttgattcttgttcagaggcagaaagaactgcaagcacatatgcatgactggacagactgggcccagcagaaagtgatgcaggtcgcacaccgacttgcaaaggagaaggatgaacttcagtcactcaggaaagagaaggaagaggctgaccgcctgcaagaggagaggcaccatttggaagagagtactcggaaaaagcttctggagatggagtctgcaatttctagggcaaatgctcagctggagaaagcagaagcttctgctcgcagacgtgaggttgagaatgcacaactcacgttacagatggaagctgcaaagcgacatgcagcagagtcagcaacaaatatttcagagcttttaaagaaagacgagaacagccgtaaaaggtctcagcgttgggaatctgatagagccctattacaagaggaacttgcagcacaaaagagcaggttatttcgggttcaagaacaactccagcatgctaaagagctaaaggatcaagtgcaggcaaggtggaaacaagaggaggctgcaaagactgaggcaattgcccttgtaacctcagtgaggaaagagagagggcaaattgagacctccatgaggtcagaagagaatttgctgcatctcaaagcagcgaatgacgcacaaagatacaagagtgagatccgtgtccttgagcagcgtattgcgcagctgaaggtgtcattggactcttcaagggttgctgcccccaagtggggagccgacaataaatcctatgcattgcatctttctgaagggagaaagaacaacaatgcccaagttttgtccaacacagcagtaccccaaggtctcgattttgacgatatacagcgcgaccgggagtgcgtcatgtgcttgagcgaggagatgtccgtggtgttcctcccctgcgcccaccaggtcgtctgtgccaaatgcagcgacctccatgagaagcaaggtatgaaggaatgcccttcgtgccgggcccccatccagcgcagggtgcgcgcccgccccgccggttgctagatttcacatataccatttggattttacttttcttctttttttcaccttgattgctcagcttaagttgatggaagattggagggaataatcaggtggtgtgagtggttgaaactgtgacaataatacatcgttaaacaccaaacaagccccagcagacagtgggtactggtttggtttgttatatggctataccggccgcttctgaatgctttggttttgctgcactctggttccaagtcccgtactgttttgtaaaaatgtcgatctgtgactgtaatgctcggtaggaaatctgttgatcgatgttgttatgtcctgttgcattcatctgtagctattgaagtcttaaatgaagtcagcttccatcgtctccttgggccactctcaataggagtttcattagatatttcatgacattaattagtatgtcacatagtatttcttttgatgatatgactataggtgacaatgtgttctaaatctctactaatccgtaagacaatagtgtagactaggcacaaccatgcccccgtctccatctcgaccgtccga

SEQ ID NO: 66557 - DNA, 3252 bp, Zea Mays
ccccctctcatccgagcccttcttcctccgccttcccttcacccccatatcgccatacacttctccactcctcccctgatcaccacccccccccccccccccccccctcgatccaatccggttttttcttcgattcggcgcgtggcaacctggtcagtccaatccgtccgtgaagaatttatccgtattttcgtttgcgtcgcatcgtttctgcgaaggatttcctgttcgttttgggggagaaaggcgtcgtccttgatgtctactatcgcgaccccgccgccgccgattgcgcaagagaaggccgccagccggaataagcgcaagtaccgtgccgagccaccttccgccgagttgggcccatacgggctggagtacccgctgacggcggactgcatgggattcgagtttatgtcgcctgagaaggctgccatggcagcagcggtagccgctgccgagggtgtcagccttgacctcctccagaactcgtgcgaaaagtgcaaagatctccaccctactgcggaggagttactggactgccaacgatatgtgaattggagcgacccaaacgagacgcagctggaggagatccttctcaagagtctgggcaccacctttgacaatgctgtgagtctgatcaccacaatgggctactctgaggcggttgcacgggctgctgttgtgcgggcagctgcgcaatacaactggagggagagccttgcagggtttggagaggcagcagttgaggttctcaagacggaaggggacatgttgccgagggagggtgcctctgttgaagacatgaggaggattgagcaggctgtgcttggtagtatggttatgtgggtaaatgaggctcagccactctgcaccacaggcgatgtaatgttttgcttgcttatgtctgacatgaacgtggcaaatgccagtgccatggactacaatacttcttccctcccatctgttgctgctcaagttattgcccaaccagacgcggggaactatgttactggttcaggttcaaatttatcagtttctattaccaacccacagactggcgttacattccgtggaaaacttaccccaatgccaccgggctcttatggtgctgtaaaagctgattcgtcaatggcaccagcaagcctcaatgtgtcaagtaccaaaccctcggtgccgggcaagactcagtgtgtgataccaaatattgagccaaaagaacaacctgttcctatacatgatcattcagaggaccaaccatttgttgctgctgcgacacaatctgtgaaaaatgacaagccatccccaagcaagagggggggctctaagagggactccttgcatcgacagaagttgacaagctttgataaaagttcccgagcattgggttccaaaggttctcttaggtctggcaagcatagctattcggccagtgcggtattggagaggaagtgccggtcattttcagattctactactagcaacttgaagggtgcatcaagagttgctaaagggtttgctgcaagcatatctggatcagaagtatcagctgacctttcctttactggtaccctttccccttctccatcatttgatgccaagatagttagtaactcaaacccagcacctactgctagcacagatctttcattgtcattgccctcctcaagtgatagtttaacaccatcttcgaatcatgattccattaccgagggagtggactctagtagcaaaattaatttttcgtatgatgaagaacagaaggtctggatcccacaagataaaaaggataaaattgtcttgattcttgttcagaggcagaaagaactgcaagcacatatgcatgactggacagactgggcccagcagaaagtgatgcaggtcgcacaccgacttgcaaaggagaaggatgaacttcagtcactcaggaaagagaaggaagaggctgaccgcctgcaagaggagaggcaccatttggaagagagtactcggaaaaagcttctggagatggagtctgcaatttctagggcaaatgctcagctggagaaagcagaagcttctgctcgcagacgtgaggttgagaatgcacaactcacgttacagatggaagctgcaaagcgacatgcagcagagtcagcaacaaatatttcagagcttttaaagaaagacgagaacagccgtaaaaggtctcagcgttgggaatctgatagagccctattacaagaggaacttgcagcacaaaagagcaggttatttcgggttcaagaacaactccagcatgctaaagagctaaaggatcaagtgcaggcaaggtggaaacaagaggaggctgcaaagactgaggcaattgcccttgtaacctcagtgaggaaagagagagggcaaattgagacctccatgaggtcagaagagaatttgctgcatctcaaagcagcgaatgacgcacaaagatacaagagtgagatccgtgtccttgagcagcgtattgcgcagctgaaggtgtcattggactcttcaagggttgctgcccccaagtggggagccgacaataaatcctatgcattgcatctttctgaagggagaaagaacaacaatgcccaagttttgtccaacacagcagtaccccaaggtctcgattttgacgatatacagcgcgaccgggagtgcgtcatgtgcttgagcgaggagatgtccgtggtgttcctcccctgcgcccaccaggtcgtctgtgccaaatgcagcgacctccatgagaagcaagcttaagttgatggaagattggagggaataatcaggtggtgtgagtggttgaaactgtgacaataatacatcgttaaacaccaaacaagccccagcagacagtgggtactggtttggtttgttatatggctataccggccgcttctgaatgctttggttttgctgcactctggttccaagtcccgtactgttttgtaaaaatgtcgatctgtgactgtaatgctcggtaggaaatctgttgatcgatgttgttatgtcctgttgcattcatctgtagctattgaagtcttaaatgaagtcagcttccatcgtctccttgggccactctcaataggagtttcattagatatttcatgacattaattagtatgtcacatagtatttcttttgatgatatgactataggtgacaatgtgttctaaatctctactaatccgtaagacaatagtgtagactaggcacaaccatgcccccgtctccatctcgaccgtccga

SEQ ID NO: 66558 - DNA, 2287 bp, Zea Mays
caatcccgcagcggaacgtgttgggcggccgacctcatgcctcaccccttccccgtcggcccccgactccccgagtcgccattgcctgccctcgttcggctcgatccccgcactacagcgcccgccaccaaccccgcccgcgcctccgctactaaagccgaggcctcacccaccacctgaccaccatgctcctccccctcctcagatcccacccgctcctccaccacgccgcgcgcctgtcctccccacgcacccgcctgctcctccgccgcgacgcaatcccgctcgcacgctccccgcctatccgcatggcggcctcgtccggctccggcgccagctcccctgcctcggcgccgccagctgccgtggtgcacaagtcaaagatcaaattttgccctgcttgtggaagtccaacgaaactggccatacctgatggcgatgagaagatgagggctgtttgttcttcttgtggaagagttcactatgaaaaccccaaaatggtaaatgctgaacaaataaaagaaaaaggaaaggatccatatacatttgtatttgtgctttaaattacgacactgaatgcctgttcgcacagtggccgtggattttttagttctacctacagtattttgtaggaggcaaatcacagctgcagctttaatctgcggtgaacaccccttcaattccatgattatagagcccgcattttttcattcatgtatgaagtgcttttgatgaacagatgtgtccccattttcttttttgtttaatctattggtgaaacaagggactatagctggcaatatttttttgttatatatgtgtaacacatgttggcttctattttctgccatttacaatatatatcatctggataggttgttggttgccttgttgagcatgataataaggttctcctttgcagaagaaagattgaaccagcttatggtctttggacacttcctgctggttatttagaggtgggggagtctactgctgaaggagcctctagagaaacattagaagaagcatgtgcagatgtagagatagtctcgccttttgctcagttggatattccactgattggccaaagttacattattttccgagcaagattgaagacccccaacttttcacctgggccagagtcgctggaatgtgcactttttgctctggatgatataccattcgattctctagcattttcttcaatcattgtcaccttaaggatgtatactgaagatgtgaggtctggaagcatcaaatttcactattgcacgataaacaaaaggttaggagccagcccttcagatcttcggagtttcgatattgataaccatatagccgtgtgaggttgaaaggttctaaaccttttgcgattgaggagaatggttttggcatacaacaggcgcgcgcgcacacaccattggagccttgtttggcgcctccctgcacattggaacagatttaaagtaggtgctggaactgtaaatgattcggtatcaaaaaggctggtttagccattttaggagattatgcgtttcgatttcatgggagttgggaggacagaattgtatcatagtgcagtaactcttggttgtaggattgagttatcctgcatgccatggttgtggcgcttcgtcagcgaccgaatgctgtaatgtggttacgattctctgagctccttttcaaccattaattccagttgtaaagcctgtattgcttcatcttttatcttttaaaagtcacgttatcttcagatcgaactgagtgctcaatacatgtgcagccatgctcgttcgtgattatttgcaccctagaaacagcaaaaggtatcaagtttgttcatcaaattcagaaagaaaaagaactttaactatcaatatctctaaaacaattgctggaatgaaaactcgggtattataagattaggtctgaatgtctgattatggatatagatgtaaaccttgttgccaatggtattataaagtttagtcgtggtaaagaaaacactccgtttatccaaaaaaaaaaaagcaattaatgtgtgttcttcgttaaaaaacaatatataattaaaaatattagcgttcaagacactataataattatactataacaatatttttcatgattaatctatatatacttaatttttataaatattgaaatttttaatatatagttgttaaacttaaaatactttgatttaatattgtattaaaattagacagatgatttactacattgtataaaaagtaatacaactttagaagcatgtcaatcttct

SEQ ID NO: 66559 - DNA, 2290 bp, Zea Mays
caatcccgcagcggaacgtgttgggcggccgacctcatgcctcaccccttccccgtcggcccccgactccccgagtcgccattgcctgccctcgttcggctcgatccccgcactacagcgcccgccaccaaccccgcccgcgcctccgctactaaagccgaggcctcacccaccacctgaccaccatgctcctccccctcctcagatcccacccgctcctccaccacgccgcgcgcctgtcctccccacgcacccgcctgctcctccgccgcgacgcaatcccgctcgcacgctccccgcctatccgcatggcggcctcgtccggctccggcgccagctcccctgcctcggcgccgccagctgccgtggtgcacaagtcaaagatcaaattttgccctgcttgtggaagtccaacgaaactggccatacctgatggcgatgagaagatgagggctgtttgttcttcttgtggaagagttcactatgaaaaccccaaaatggtaaatgctgaacaaataaaagaaaaaggaaaggatccatatacatttgtatttgtgctttaaattacgacactgaatgcctgttcgcacagtggccgtggattttttagttctacctacagtattttgtaggaggcaaatcacagctgcagctttaatctgcggtgaacaccccttcaattccatgattatagagcccgcattttttcattcatgtatgaagtgcttttgatgaacagatgtgtccccattttcttttttgtttaatctattggtgaaacaagggactatagctggcaatatttttttgttatatatgtgtaacacatgttggcttctattttctgccatttacaatatatatcatctggataggttgttggttgccttgttgagcatgataataaggttctcctttgcagaagaaagattgaaccagcttatggtctttggacacttcctgctggttatttagaggtgggggagtctactgctgaaggagcctctagagaaacattagaagaagcatgtgcagatgtagagatagtctcgccttttgctcagttggatattccactgattggccaatagagttacattattttccgagcaagattgaagacccccaacttttcacctgggccagagtcgctggaatgtgcactttttgctctggatgatataccattcgattctctagcattttcttcaatcattgtcaccttaaggatgtatactgaagatgtgaggtctggaagcatcaaatttcactattgcacgataaacaaaaggttaggagccagcccttcagatcttcggagtttcgatattgataaccatatagccgtgtgaggttgaaaggttctaaaccttttgcgattgaggagaatggttttggcatacaacaggcgcgcgcgcacacaccattggagccttgtttggcgcctccctgcacattggaacagatttaaagtaggtgctggaactgtaaatgattcggtatcaaaaaggctggtttagccattttaggagattatgcgtttcgatttcatgggagttgggaggacagaattgtatcatagtgcagtaactcttggttgtaggattgagttatcctgcatgccatggttgtggcgcttcgtcagcgaccgaatgctgtaatgtggttacgattctctgagctccttttcaaccattaattccagttgtaaagcctgtattgcttcatcttttatcttttaaaagtcacgttatcttcagatcgaactgagtgctcaatacatgtgcagccatgctcgttcgtgattatttgcaccctagaaacagcaaaaggtatcaagtttgttcatcaaattcagaaagaaaaagaactttaactatcaatatctctaaaacaattgctggaatgaaaactcgggtattataagattaggtctgaatgtctgattatggatatagatgtaaaccttgttgccaatggtattataaagtttagtcgtggtaaagaaaacactccgtttatccaaaaaaaaaaaagcaattaatgtgtgttcttcgttaaaaaacaatatataattaaaaatattagcgttcaagacactataataattatactataacaatatttttcatgattaatctatatatacttaatttttataaatattgaaatttttaatatatagttgttaaacttaaaatactttgatttaatattgtattaaaattagacagatgatttactacattgtataaaaagtaatacaactttagaagcatgtcaatcttct

SEQ ID NO: 66560 - DNA, 2284 bp, Zea Mays
ggaacgtgttgggcggccgacctcatgcctcaccccttccccgtcggcccccgactccccgagtcgccattgcctgccctcgttcggctcgatccccgcactacagcgcccgccaccaaccccgcccgcgcctccgctactaaagccgaggcctcacccaccacctgaccaccatgctcctccccctcctcagatcccacccgctcctccaccacgccgcgcgcctgtcctccccacgcacccgcctgctcctccgccgcgacgcaatcccgctcgcacgctccccgcctatccgcatggcggcctcgtccggctccggcgccagctcccctgcctcggcgccgccagctgccgtggtgcacaagtcaaagatcaaattttgccctgcttgtggaagtccaacgaaactggccatacctgatggcgatgagaagatgagggctgtttgttcttcttgtggaagagttcactatgaaaaccccaaaatggtaaatgctgaacaaataaaagaaaaaggaaaggatccatatacatttgtatttgtgctttaaattacgacactgaatgcctgttcgcacagtggccgtggattttttagttctacctacagtattttgtaggaggcaaatcacagctgcagctttaatctgcggtgaacaccccttcaattccatgattatagagcccgcattttttcattcatgtatgaagtgcttttgatgaacagatgtgtccccattttcttttttgtttaatctattggtgaaacaagggactatagctggcaatatttttttgttatatatgtgtaacacatgttggcttctattttctgccatttacaatatatatcatctggataggttgttggttgccttgttgagcatgataataaggttctcctttgcagaagaaagattgaaccagcttatggtctttggacacttcctgctggttatttagaggtgggggagtctactgctgaaggagcctctagagaaacattagaagaagcatgtgcagatgtagagatagtctcgccttttgctcagttggatattccactgattggccaaatgcagtagagttacattattttccgagcaagattgaagacccccaacttttcacctgggccagagtcgctggaatgtgcactttttgctctggatgatataccattcgattctctagcattttcttcaatcattgtcaccttaaggatgtatactgaagatgtgaggtctggaagcatcaaatttcactattgcacgataaacaaaaggttaggagccagcccttcagatcttcggagtttcgatattgataaccatatagccgtgtgaggttgaaaggttctaaaccttttgcgattgaggagaatggttttggcatacaacaggcgcgcgcgcacacaccattggagccttgtttggcgcctccctgcacattggaacagatttaaagtaggtgctggaactgtaaatgattcggtatcaaaaaggctggtttagccattttaggagattatgcgtttcgatttcatgggagttgggaggacagaattgtatcatagtgcagtaactcttggttgtaggattgagttatcctgcatgccatggttgtggcgcttcgtcagcgaccgaatgctgtaatgtggttacgattctctgagctccttttcaaccattaattccagttgtaaagcctgtattgcttcatcttttatcttttaaaagtcacgttatcttcagatcgaactgagtgctcaatacatgtgcagccatgctcgttcgtgattatttgcaccctagaaacagcaaaaggtatcaagtttgttcatcaaattcagaaagaaaaagaactttaactatcaatatctctaaaacaattgctggaatgaaaactcgggtattataagattaggtctgaatgtctgattatggatatagatgtaaaccttgttgccaatggtattataaagtttagtcgtggtaaagaaaacactccgtttatccaaaaaaaaaaaagcaattaatgtgtgttcttcgttaaaaaacaatatataattaaaaatattagcgttcaagacactataataattatactataacaatatttttcatgattaatctatatatacttaatttttataaatattgaaatttttaatatatagttgttaaacttaaaatactttgatttaatattgtattaaaattagacagatgatttactacattgtataaaaagtaatacaactttagaagcatgtcaatcttct

SEQ ID NO: 66561 - DNA, 2702 bp, Zea Mays
ggaacgtgttgggcggccgacctcatgcctcaccccttccccgtcggcccccgactccccgagtcgccattgcctgccctcgttcggctcgatccccgcactacagcgcccgccaccaaccccgcccgcgcctccgctactaaagccgaggcctcacccaccacctgaccaccatgctcctccccctcctcagatcccacccgctcctccaccacgccgcgcgcctgtcctccccacgcacccgcctgctcctccgccgcgacgcaatcccgctcgcacgctccccgcctatccgcatggcggcctcgtccggctccggcgccagctcccctgcctcggcgccgccagctgccgtggtgcacaagtcaaagatcaaattttgccctgcttgtggaagtccaacgaaactggccatacctgatggcgatgagaagatgagggctgtttgttcttcttgtggaagagttcactatgaaaaccccaaaatggtaaatgctgaacaaataaaagaaaaaggaaaggatccatatacatttgtatttgtgctttaaattacgacactgaatgcctgttcgcacagtggccgtggattttttagttctacctacagtattttgtaggaggcaaatcacagctgcagctttaatctgcggtgaacaccccttcaattccatgattatagagcccgcattttttcattcatgtatgaagtgcttttgatgaacagatgtgtccccattttcttttttgtttaatctattggtgaaacaagggactatagctggcaatatttttttgttatatatgtgtaacacatgttggcttctattttctgccatttacaatatatatcatctggataggttgttggttgccttgttgagcatgataataaggttctcctttgcagaagaaagattgaaccagcttatggtctttggtaagttccctttgatgtttttctttcgattttttgttctgattctattctgtgctataatagttaatgtcatagctgtactatgttttgatattctcatgcaacttttttgactatgcactccagatgcatatttgcagtatttgtttgccgaactctttgcatgtactgttcagaatatgatgtcatattataatataggttttgcattttttatgttaggaatagcttttcttctgttttcacaaactccctagccaataggatatgctttcttatcttcaacttcaatgcagtaccaattgcctagttctttctgtcaaaacttttcttagatttgtgtgcgatgaacaaattttcttttcattattgaactataatcatgtactgctgtcctccaatttgagttagtttacattaacaggacacttcctgctggttatttagaggtgggggagtctactgctgaaggagcctctagagaaacattagaagaagcatgtgcagatgtagagatagtctcgccttttgctcagttggatattccactgattggccaatagagttacattattttccgagcaagattgaagacccccaacttttcacctgggccagagtcgctggaatgtgcactttttgctctggatgatataccattcgattctctagcattttcttcaatcattgtcaccttaaggatgtatactgaagatgtgaggtctggaagcatcaaatttcactattgcacgataaacaaaaggttaggagccagcccttcagatcttcggagtttcgatattgataaccatatagccgtgtgaggttgaaaggttctaaaccttttgcgattgaggagaatggttttggcatacaacaggcgcgcgcgcacacaccattggagccttgtttggcgcctccctgcacattggaacagatttaaagtaggtgctggaactgtaaatgattcggtatcaaaaaggctggtttagccattttaggagattatgcgtttcgatttcatgggagttgggaggacagaattgtatcatagtgcagtaactcttggttgtaggattgagttatcctgcatgccatggttgtggcgcttcgtcagcgaccgaatgctgtaatgtggttacgattctctgagctccttttcaaccattaattccagttgtaaagcctgtattgcttcatcttttatcttttaaaagtcacgttatcttcagatcgaactgagtgctcaatacatgtgcagccatgctcgttcgtgattatttgcaccctagaaacagcaaaaggtatcaagtttgttcatcaaattcagaaagaaaaagaactttaactatcaatatctctaaaacaattgctggaatgaaaactcgggtattataagattaggtctgaatgtctgattatggatatagatgtaaaccttgttgccaatggtattataaagtttagtcgtggtaaagaaaacactccgtttatccaaaaaaaaaaaagcaattaatgtgtgttcttcgttaaaaaacaatatataattaaaaatattagcgttcaagacactataataattatactataacaatatttttcatgattaatctatatatacttaatttttataaatattgaaatttttaatatatagttgttaaacttaaaatactttgatttaatattgtattaaaattagacagatgatttactacattgtataaaaagtaatacaactttagaagcatgtcaatcttct

SEQ ID NO: 66562 - DNA, 2255 bp, Zea Mays
ggaacgtgttgggcggccgacctcatgcctcaccccttccccgtcggcccccgactccccgagtcgccattgcctgccctcgttcggctcgatccccgcactacagcgcccgccaccaaccccgcccgcgcctccgctactaaagccgaggcctcacccaccacctgaccaccatgctcctccccctcctcagatcccacccgctcctccaccacgccgcgcgcctgtcctccccacgcacccgcctgctcctccgccgcgacgcaatcccgctcgcacgctccccgcctatccgcatggcggcctcgtccggctccggcgccagctcccctgcctcggcgccgccagctgccgtggtgcacaagtcaaagatcaaattttgccctgcttgtggaagtccaacgaaactggccatacctgatggcgatgagaagatgagggctgtttgttcttcttgtggaagagttcactatgaaaaccccaaaatggtaaatgctgaacaaataaaagaaaaaggaaaggatccatatacatttgtatttgtgctttaaattacgacactgaatgcctgttcgcacagtggccgtggattttttagttctacctacagtattttgtaggaggcaaatcacagctgcagctttaatctgcggtgaacaccccttcaattccatgattatagagcccgcattttttcattcatgtatgaagtgcttttgatgaacagatgtgtccccattttcttttttgtttaatctattggtgaaacaagggactatagctggcaatatttttttgttatatatgtgtaacacatgttggcttctattttctgccatttacaatatatatcatctggataggttgttggttgccttgttgagcatgataataaggttctcctttgcagaagaaagattgaaccagcttatggtctttgaggtgggggagtctactgctgaaggagcctctagagaaacattagaagaagcatgtgcagatgtagagatagtctcgccttttgctcagttggatattccactgattggccaatagagttacattattttccgagcaagattgaagacccccaacttttcacctgggccagagtcgctggaatgtgcactttttgctctggatgatataccattcgattctctagcattttcttcaatcattgtcaccttaaggatgtatactgaagatgtgaggtctggaagcatcaaatttcactattgcacgataaacaaaaggttaggagccagcccttcagatcttcggagtttcgatattgataaccatatagccgtgtgaggttgaaaggttctaaaccttttgcgattgaggagaatggttttggcatacaacaggcgcgcgcgcacacaccattggagccttgtttggcgcctccctgcacattggaacagatttaaagtaggtgctggaactgtaaatgattcggtatcaaaaaggctggtttagccattttaggagattatgcgtttcgatttcatgggagttgggaggacagaattgtatcatagtgcagtaactcttggttgtaggattgagttatcctgcatgccatggttgtggcgcttcgtcagcgaccgaatgctgtaatgtggttacgattctctgagctccttttcaaccattaattccagttgtaaagcctgtattgcttcatcttttatcttttaaaagtcacgttatcttcagatcgaactgagtgctcaatacatgtgcagccatgctcgttcgtgattatttgcaccctagaaacagcaaaaggtatcaagtttgttcatcaaattcagaaagaaaaagaactttaactatcaatatctctaaaacaattgctggaatgaaaactcgggtattataagattaggtctgaatgtctgattatggatatagatgtaaaccttgttgccaatggtattataaagtttagtcgtggtaaagaaaacactccgtttatccaaaaaaaaaaaagcaattaatgtgtgttcttcgttaaaaaacaatatataattaaaaatattagcgttcaagacactataataattatactataacaatatttttcatgattaatctatatatacttaatttttataaatattgaaatttttaatatatagttgttaaacttaaaatactttgatttaatattgtattaaaattagacagatgatttactacattgtataaaaagtaatacaactttagaagcatgtcaatcttct

SEQ ID NO: 66563 - DNA, 965 bp, Zea Mays
cccaacaacaccctcctcaaacatccagtcatctccactcagatccccctcgcgctttcgtcgcccgtcgtgatccactgtcacaaaagccaaggacctccctcaacggtgccagaaccaccacgactcccagatccacatctacgtctgccttaaatccctctggcgtccctccggcgcgatgcggccaaccgcgcggcctccccatcctcaacgcctagccccaatgcactgcacccccgcatcatccaccccctccctctcatcaagcctttttctcgaccgcgatagtgacggcgacaagccgacaagcacgacccccctctgcctcgccacgtgtggcctcctccaccgcctggtttggagttttcccatccttgacggcccggttcgaaccccgatcaactatcctccagatcggatcatggcgacgacgcaagagcgagatgtggcgcagccctaacgacggaggaggcgacgtggagtaactatgtggtggcggagcgcaaagtcgacgaagactctctctgccgccttctcacgagtgggattgtgctaccacttgaacagtcagatatcatgctttgtttggaggcctaactctgcaagcaaattcacaccgatggttaccaattgagtgatgaatattgtgttatctgaataatctgtagagagggtcttgactatgaggttagggaagaatgatagctactactatattagcaatgtctgttttactctgctagtatccagtgtaatgtttgaatcagcgcaatcggtcagttttgactactactactactatgccatgtactagaacttcttgttgtatacagtgtgtggttcttattttggtagcaagactgtaatttgataaagcttataaagcagcagtaagacatgcctttggttgattattctttgcgtttgtaagttcactatcaagatggttctttgcatttgtt

SEQ ID NO: 66564 - DNA, 1964 bp, Zea Mays
ctcctcaaacatccagtcatctccactcagatccccctcgcgctttcgtcgcccgtcgtgatccactgtcacaaaagccaaggacctccctcaacggtgccagaaccaccacgactcccagatccacatctacgtctgccttaaatccctctggcgtccctccggcgcgatgcggccaaccgcgcggcctccccatcctcaacgcctagccccaatgcactgcacccccgcatcatccaccccctccctctcatcaagcctttttctcgaccgcgatagtgacggcgacaagccgacaagcacgacccccctctgcctcgccacgtgtggcctcctccaccgcctggtttggagttttcccatccttgacggcccggttcgaaccccgatcaactatcctccagatcggatcatggcgacgacgcaagagcgagatgtggcgcagccctaacgacggaggaggcgacgtggagtaactatgtggtggcggagcgcaaagtcgacgaagactctctctgccgccttctcacggtaaggccctgcactctcttccttcccctctcctatccccgcttgtggaggcggtcagggcggccaagcagagacgcggtcagggcatggtcacgacatgcatcagagacacggtcagggcgcagttaggcgatcagggcagccatacgtttttgtctgaaggctatcatcctcttttatcgaacctgcaagcttgctaccttacctaccccatccattccaaagctccactacaccagacggtcgtcacgaattcctatagagtgttggtcgataatttggacgtacaaatgatagtgttggctttttggctggatgttcctctcttgtgttgtccagtaaatttataagttaaattcaccttgaccaatttgaacaatggagtcgcatgctcctcacataattaattcagcgacactgcgacaccatgcttttgtttcatgtgtgaattaataacttacaatattaatcttaagacgtgttctctggtagcgtagatttgttgttcgttagtggtatagtggtatgccagtgctctgaaagcttgccttattggtttcatgtgatatctggcattgtctgccaacatcagagtgggattgtgctaccacttgaacagtcagatatcatgctttgtttggaggcctaactctgcaagcaaattcacaccgatggttaccaattgagtgatgaatattgtgttatctgaataatctgtagagagggtcttgactatgaggttagggaagaatgatagctactactatattagcaatgtctgttttactctgctagtatccagtgtaatgtttgaatcagcgcaatcggtcagttttgactactactactactatgccatgtactagaacttcttgttgtatacagtgtgtggttcttattttggtagcaagactgtaatttgataaagcttataaagcagcagtaagacatgcctttggttgattattctttgcgtttgtaagttcactatcaagatggttctttgcatttgttcatacatgcttttggttaattcaggtttggctatcacatgtctaaagttgtaagcctctcaaacaaccttttccaatcctaggctaccgaacaaggagaagaagtgttctaggcaaaagtgttccaattggattaattctggactagaaagagcgaaagagtcggatgcactaaatctaggcctgaaacagtttctggcttgggactgttcctatgctgccgaacggggccgagctgtttccaaatatatattatgtgttgctactttcttcacatatcattactttatgtgttcttcctggttacatttggcaccattgttggtaagacggtaccacccacagttttattgagaaaggcttttaagatggttgtagttgcacaaattggaaaataaaactacactgacttaattttcc

SEQ ID NO: 66565 - DNA, 1151 bp, Zea Mays
ctcctcaaacatccagtcatctccactcagatccccctcgcgctttcgtcgcccgtcgtgatccactgtcacaaaagccaaggacctccctcaacggtgccagaaccaccacgactcccagatccacatctacgtctgccttaaatccctctggcgtccctccggcgcgatgcggccaaccgcgcggcctccccatcctcaacgcctagccccaatgcactgcacccccgcatcatccaccccctccctctcatcaagcctttttctcgaccgcgatagtgacggcgacaagccgacaagcacgacccccctctgcctcgccacgtgtggcctcctccaccgcctggtttggagttttcccatccttgacggcccggttcgaaccccgatcaactatcctccagatcggatcatggcgacgacgcaagagcgagatgtggcgcagccctaacgacggaggaggcgacgtggagtaactatgtggtggcggagcgcaaagtcgacgaagactctctctgccgccttctcacgttcgactaccttcaacatgctcaagctcgccgaggaagccagcaggcggcaacatcctgttcgactacctcatcccgccgacggggatggacaagtgcagcacgaatggacaagtgtagcgcgaacaacgtgggcagtggcaacgtacacaaggcgggcatggtgatgaacaggttgcccatcagtgtgtacgcattggagacgtttgggtttacgacggcaacgtccacagacggttgatgagcaagatgctcgggcgcattggggattcaccattgatcaggttcggcacatacacatgcggcgcatgcgccgtgtcgtgcacgctcaagtgggacgtgaccactgtcatggagtacaagggcctacctctgcagcagaccgtcgactactatgttagggacacgatgtagaatatccgaagacaactattatcaataattagccaatataaactatttacaaatctttacaaatgtttacaatataggggtttagacaatatatgggtttgatatatgaacatgtatggtgtttaattgcttcttctactttgttctaattgatgaataaaaaatgaatgggtcacatctcatgaagtgatccaaaattaattacta

SEQ ID NO: 66566 - DNA, 877 bp, Zea Mays
cccctcgcgctttcgtcgcccgtcgtgatccactgtcacaaaagccaaggacctccctcaacggtgccagaaccaccacgactcccagatccacatctacgtctgccttaaatccctctggcgtccctccggcgcgatgcggccaaccgcgcggcctccccatcctcaacgcctagccccaatgcactgcacccccgcatcatccaccccctccctctcatcaagcctttttctcgaccgcgatagtgacggcgacaagccgacaagcacgacccccctctgcctcgccacgtgtggcctcctccaccgcctggtttggagttttcccatccttgacggcccggttcgaaccccgatcaactatcctccagatcggatcatggcgacgacgcaagagcgagatgtggcgcagccctaacgacggaggaggcgacgtggagtaactatgtggtggcggagcgcaaagtcgacgaagactctctctgccgccttctcacggtttggctatcacatgtctaaagttgtaagcctctcaaacaaccttttccaatcctaggctaccgaacaaggagaagaagtgttctaggcaaaagtgttccaattggattaattctggactagaaagagcgaaagagtcggatgcactaaatctaggcctgaaacagtttctggcttgggactgttcctatgctgccgaacggggccgagctgtttccaaatatatattatgtgttgctactttcttcacatatcattactttatgtgttcttcctggttacatttggcaccattgttggtaagacggtaccacccacagttttattgagaaaggcttttaagatggttgtagttgcacaaattggaaaataaaactac

SEQ ID NO: 66567 - DNA, 664 bp, Zea Mays
ctccccatcctcaacgcctagccccaatgcactgcacccccgcatcatccaccccctccctctcatcaagcctttttctcgaccgcgatagtgacggcgacaagccgacaagcacgacccccctctgcctcgccacgtgtggcctcctccaccgcctggtttggagttttcccatccttgacggcccggttcgaaccccgatcaactatcctccagatcggatcatggcgacgacgcaagagcgagatgtggcgcagccctaacgacggaggaggcgacgtggagtaactatgtggtggcggagcgcaaagtcgacgaagactctctctgccgccttctcacggctaccgaacaaggagaagaagtgttctaggcaaaagtgttccaattggattaattctggactagaaagagcgaaagagtcggatgcactaaatctaggcctgaaacagtttctggcttgggactgttcctatgctgccgaacggggccgagctgtttccaaatatatattatgtgttgctactttcttcacatatcattactttatgtgttcttcctggttacatttggcaccattgttggtaagacggtaccacccacagttttattgagaaaggcttttaagatggttgtagttgcacaaattggaaaataaaactac

SEQ ID NO: 66568 - DNA, 259 bp, Zea Mays
ttttttgagaaaagtctaacatgccaacattcctacttcaccgtccaatccaatcccatcgaaccagcggttcttacagacccaaagaagcacgactacaggacgacaaagcaaccagctaccacaactactacaatacgaacacaggaaggcagccaaactagtaccacagatccgagacacctggacaggcaattacccacacctaacctagccgccgaagccatagagagtgcggccctggcgtttgagggcgtac

SEQ ID NO: 66569 - DNA, 2697 bp, Zea Mays
accgaccccagacccagagccaggccgggccaccaccacctgctgacgccggcgatcgatcgggagaaaaactgcttataaggggccggggttccgctgcaggtaaaggcatcgatccgcagcagtgcccaaagaggaagagagcaagcaaggtgtctttggcaacgctcatcagatcacacacccccgcgcgtgctagctagcgagctgctgtgtaggatcctctcgccagccggtgcaccgccggccgggcgccctcctcctcggcgtctgtcatcatccgccggccggcgcgcggcggtggtatcatcagtacgtacttctgctgcttcgtttaagtagtagctcatcgcttcaccgccgccgccggagagagagggagagagagacagatcggtatcatcatcatggcgccggtggggctcccgccgggcttccggttccacccgacggacgaggagctggtgaactactacctgaagcgcaagatccacgggctgaagatcgagctggacatcatccctgaggtcgacctctacaagtgcgagccatgggagctcgcagacaagtcgttcctgccgagccgtgaccctgagtggtacttcttcgggccacgggaccgcaagtaccccaacgggttccgcaccaaccgcgcgacgcgggcggggtactggaagtccacgggcaaggaccgccgcgtgctgcaccacggcggccgctccatcggcatgaagaagacgctcgtctactaccgcggccgcgcgccgcagggggtccgcaccgactgggtcatgcacgagtaccgcctcgacgacaaggacgccgaggacacgctgcccatccaggacacctatgcattatgccgggtcttcaagaagaacgccatctgcaccgaggtggacggcctgcaagcgcagtgcagcatggcgctgctggagggcgcctgccagcagctgctcaccagcggcagccaggagtaccagacctcgtcgccggatgtgcccgtcgcgtccacatccggtggagccgacgacgacgcggaaaaggatgagtcctggatgcagttcatatccgacgacgcgtggtgctccagcacggcggacggcgccgaggagagcacctcccgtgtggccctggccagctgaaacccttttatctgttgttcaaaaatgatgcgactgagaaatcctcctaataactatttttcctcctttttctctgatcgagatggtgatgatgatgccggctagccatcaataaccaccgtgatcatgtctacaaagtgtaagatcatagcacaataagcatgcatctttggggttttcagcttccatcctattgctgggggttgaaggatcgttgccgcctcaagattgttctcagaatccttccttgagttgagttcataaggagggttatatatactcctatattatatatatatagtatataaaacaaccagctcccccttattttcttcttctttgggttttccatcgcatgtattgtactttttgagtggtgtctttttttctcttatgtgaagcatactggttgtagctatgcaattgcatagtttttgtcttgtgcctatatgtcagatgaaatataatgcgcattatgaatggaaattgaagacaattattatgaatattatacctgtcctcttaacttgtatcgatctccaaaatctaactattctgctcatcttactaattgcatccgagttctgccaataaaatgggaaaacaaaaaaagaattcaacagttcactggtgtacatgttatcataagatgagaatatttgcatatattgacatatataaatattatgttactgaaaagtttggagattatttgtcaaaaacaatgcctcattttgcaacacatcaaatatctacttacacatgtaagaaaccggttttcactttaagcatatataaccagcagaaaggctgtatatcttgttcagacatcagtgtttttttttcttaaaattatactacctccattctcgaatatttgtcgcccgctagttcatttttaaactatacgacgataaataaaaaagaacggagtaagtatcatatatacagaacatgagtgaagtctggagaacatatataaaggtctctatagatccgctaatatggaaaagcctaacagcaggcgttagatcacatgctgtcagtatcgatgctacgctgagctaaaaacacttgggttcacaaaggatgaaaggattgaagaaatactattccataagtaatgtcagtggttaaacacatgatgttgcagcagccctttctggaatgtcaatcagaaccccttccaggtcaataactatgaccagtttggctatatagaaatgctttgcacctcctaccttgacattcttgggattcatttttcaacatgtcacagcaaattacctccgagaagtgacatgatagcagacttaagataatcaatatgctgaagaattctgtagattttagcaaagtagtactgttgtattctatcatgtttctaggtatcaagcaaaactaaagttcagaagtctacattacaagcatcttcatggtgacacttcgtcacaagaatgtagcctctgtaatgttcagagcgcctccttgatgtcaacacaccacgtcaccacctttgaactgttccgccatttcaaccggcatatcaact

SEQ ID NO: 66570 - DNA, 1329 bp, Zea Mays
cggacagccctatgcaatctactagcatgaatatgataaaggcgtgttatccagaaaataaaaataaaagtttgttctgttaaaagataagaaaagaagatccagcggtgctgtaagacgtccagagcttgtgtgagaatcttgtaaagtgaaacacatggctacttgtagggcaggctttgaatcatttcacggaggagctaaagagcacggtggccggcaacagaagggaaagacaaagggtaaagacaaagagaaagatcagcaagaaaggaggcagcgagctgggaggccatggcgccggctgatctcccaccaggctttaggttccatccaactgatgaggagcttgtgaactattacctcaagaggaaggtccatgggctcagcatcgagcttgacataatccctgaagtagacctctacaaatgtgagccttgggagctagcagagaaatcattcctgcctggtagagactccgagtggtacttctttgggccaagggataggaagtatccaaatggatgccgcacaaaccgcgcaacccaggcaggatactggaagtcaacaggcaaagatcggcaaatcagctaccagaacagatcaatcggcatgaagaagacactggtctactacaagggtcgagctcctcaggggctgaggaccagctgggtgatgcatgagtaccgcatcgaggaaagcgaatgcgagaacaccatggggattcaggactcatatgcactgtgtcgtgtcttcaagaaaaatgtggcactcggagagcttcagaagcaaaagcaaggcgagtgcagctcatcacaatctaaagaaaaacaagaacagtttacaagtatcagggatgctggacagtcatctggttcaaatgagcacggtaaagacaacacatggatgcagttcatagctgatgatctatggtgcaaccaaacaaagtgatgggagtacgaaactgatgacacagttgtttaacttcatctaactagaaacttctcagttgcacattgactctgtatatgtttgataacatcacttctcaggttggaatctggacaggatgaccactaaatttgggctctgactcttcatgtagagttatagtttcctcttttggtactgtactagaaaaacgtcctactttggtacttcaaggctcggtcttcttgtatctgtcgttaaacacagtgatttataggggggagtacagtacgaagacagaaatttaatttaacctatattatttacatattcgtttcatatgtagttgtagttcagatatcattttacaataaaggtcaccaaagttgtcaatcccct

SEQ ID NO: 66571 - DNA, 4243 bp, Zea Mays
cttttttccataactaaattgtccgtgcacatagattattacaaaagttggtaaaaaaaagctaaacaaaaaataggtcatcatacggcgcgcgacaacatttcgagcgacttcgtctgcttcgcatttccccccaattctctcccgcccaaagccccaaaccaccacccaaaatcctctctgccgcccgccgatggccaccgccgccgccatggccgatgacgacgacttcgcctcgccgccgctcgccccgcgtgcgcgggaggaaggaggaggcagaggcgtgtaccaggtgggcggcgtgccggtggagttcccctacaagccctacgggacgcagctggcgttcatgggacgggtcatcgcgacgctcgaccgtgcccggcggcaggggcgctcccacgcgctcctcgagtcgcccacaggcaccggaaagtcgctctccctcctctgctccgcgctcgcctggcagcggcactacccgctccgttcccctcccgcccccgatccattgctccacggcggaggattcgtcccagatgatacgcagccgcagccgacgccagtcgtcccggagaaggctgtcaagaagaagaacgccccgataatctattacgcgacgaggacgcacgcgcagataagccaggttgtccgggagtaccgcaagacgtcgtaccgagtgcgcatggccatcttggcctcaaggaagcactactgtgtcaataaatttgcttgcgcgagcgacaacattgatgagaaatgcaagtcactgctagacaagactgttcaaggttgcccagaattcaagaatgcacagaaactaagtcggcatccatcccttcagattggtggctgctatgaagttcacgatattgaggatcttgtcagagttggacagaaagcaaaaggatgtccgtattttgctgcacaacacatggcagaagcagcccaattggttttctgcccatataactacctgattagtccggttgtcaggagagcaatggacatcgatatcagtggttccatcattattcttgacgaggcacacaacatagaagatatagcacgtgatgctggcagtattgacatcgatgaagaatcactttgcttgttgcagggagaacttcaaaacctggccgctaatgaggccgttgcaatgatataccaacccttgcacgatattattcaggctcttattggttggattgctgagagggaggacaatttgcataatcatgagttcggacatccggcttcatattggactggtgaaaaggcaatgaatgaacttcagcgggctggtatttctccaatgtatttcccggtattgcaagaatgtgcaacaaaggcaattaaagctgcttcagatactgaatcagatggttcacacttaagtggtggtagtgctatgacactagagagtctattctcttcgttgagctacttttttgctcagaaaggacgcaattcatgtgattatcaacttgctttgcagcgttttgttaaaaaggaaggcaaggacgtaatttcttcaacatgcacaatgagtttgtggtgtctcaatcctgctgttgtttttcaagaaattgcagatcgaacactttcggtaattctgacttctggaacactttcaccaatgggttcctttacatctgaacttggtgtccagtttgaggcctgcatggaagctcctcatgtaattaatgctgattctcaggtttttgcagctgtgctatcatctggtccaacaaggcagatattgaatgctagctataaaactgcggacaattcatctttccaggatgaacttggagcttcactagaggaaatatgcagaattgtgcctggtggtgctctagtgttttttcctagctacaagttgatggacaaattgcaagtgcgctggtctcagacaggtcaatgggcacggcttaatgctcaaaaacatgtgtttgttgagcctaagggaagtagtgaggaactggatcctgttttaaaagggtactatgacgcaatccttggtaaagctcctgtcaagaaaggcagaggtggttcaaaacaaatagcgaagaatcgagtgacaaaaaaatcatcacaggaatcagtgaaagcaggagctgctcttcttgcagtttgccgtgggaaggtatctgaagggattgacttcgctgatgacaatgctagagttgtggttattgttggaattccttttccaaatataaacgatgttcaagtaaagctgaaaaggagatataatgattcatacaaatcatcaaaacatctgttaagtgggagtgaatggtactgtcatcaggcatttcgtgctttaaaccaagctgcaggtcgttgcattcgtcataaatctgattacggaggcataattctgattgatgagcgatatcaggatgacagaaatgttctctacatttccaaatggcttaggaatgcaatcaagaagtatgatagcttccaggagacaatggctaagttgcaaaagttctttcagaatgctcaggaaaaaataaaaattaaagattgtggcatcttccccaaggttaagttggataatgaagcacctcaatctttcagtgatgataaaagaaagttgccgtggccagaattgagttcctcaaaccactcagtatcacgatgtaatcagaaggtaaagactgaatgtcttagtcagaggattccagacattgatggtgtggcggtaaaccaaaaagttgtgggtgtagccaatactggagcaaattatggagtcaaaacagaaattataaaattggaggaggatgattttaaacctaggtatgcagagatcactatcttaaatccattagaagacaggtcacggcaacctactcttgttgagggaacttctgcagcgactccagtagctagtccaagcaactatgctgaggtaaacacctcagtaaatatcaacaatggagatcagattgcagacatgtccatttctcctttttcaacaaacagaaatctttcttccctgtccacactggcagctactcctgaaaggaccacagacaaagactgtcatgattcttttattaacagaagtgtaaattctcactatgagaaaaagagaaggttgagctccccaatgagttgtacttacacgacgcagtctagtcctccaagcaaatcattctgccacactggttctgttatgcctggggatttgaatagaaattctgaattgtgttgtaaaaatataggattgtccaggtgtgaaaatgtcaagtttgaaagaaactacagtccagaagaggtttcagcaaagaagtctatgcaaaagaaacttcttataaattgcattagatgcaaaacagctcttgggttagaagaagatgggtttcttgttacttgtacacaatattattcatcaaaattgtacttggcatatcttttgaaacatgggctatcaacttttggcatcctggaggatgatttttcagcatcgacaccaacagaggtacacgtagtgcagtgtgaagcttcgtcactcaacaaaaatgtatttggcaaattcagcagccagggtcatgtttggtttgcaaaggatggatgtgtatacaacgcaatgacctgttctttgtgctcttctgaaaacacaagtgccatggtcctcggtgtgcaagttcttgcaactgataggtcaaatcaacaattggtggaaaaggtgctcttgttcagtgatcgtttggatgtccagtctgagccatcaaagggacagatttcaagaactcgaagagatgctagtaacatctgccagcaatctgtgatcgaccttgattcttttgcatataaaccattaaagaaagatcctgtggcgctgaactcaagaaggtctaagcttaggttacctgccccgaacaaatccaccactggtacataatttgatggagagtttgagacaatggcgatctttgccgtgaagcattgggaagaactttgttctgtgagatatgacatgcggggagatgcagatgttacgtcgccatggagatttatagtttcaaacatccacatggattagagaagttccctgagctgaagtagggtgtaaaatgcatggcctggcagtagaaaattaggatgctgatgtctatatccatttacatgcgtcccattgtcgattatatctatgaacagtttttgcgttctgaaatttcgcatccgtgactagctgagcgtcctgaaatgtcctaatttcaatctc

SEQ ID NO: 66572 - DNA, 4112 bp, Zea Mays
gcatttccccccaattctctcccgcccaaagccccaaaccaccacccaaaatcctctctgccgcccgccgatggccaccgccgccgccatggccgatgacgacgacttcgcctcgccgccgctcgccccgcgtgcgcgggaggaaggaggaggcagaggcgtgtaccaggtgggcggcgtgccggtggagttcccctacaagccctacgggacgcagctggcgttcatgggacgggtcatcgcgacgctcgaccgtgcccggcggcaggggcgctcccacgcgctcctcgagtcgcccacaggcaccggaaagtcgctctccctcctctgctccgcgctcgcctggcagcggcactacccgctccgttcccctcccgcccccgatccattgctccacggcggaggattcgtcccagatgatacgcagccgcagccgacgccagtcgtcccggagaaggctgtcaagaagaagaacgccccgataatctattacgcgacgaggacgcacgcgcagataagccaggttgtccgggagtaccgcaagacgtcgtaccgagtgcgcatggccatcttggcctcaaggaagcactactgtgtcaataaatttgcttgcgcgagcgacaacattgatgagaaatgcaagtcactgctagacaagactgttcaaggttgcccagaattcaagaatgcacagaaactaagtcggcatccatcccttcagattggtggctgctatgaagttcacgatattgaggatcttgtcagagttggacagaaagcaaaaggatgtccgtattttgctgcacaacacatggcagaagcagcccaattggttttctgcccatataactacctgattagtccggttgtcaggagagcaatggacatcgatatcagtggttccatcattattcttgacgaggcacacaacatagaagatatagcacgtgatgctggcagtattgacatcgatgaagaatcactttgctggagaacttcaaaacctggccgctaatgaggccgttgcaatgatataccaacccttgcacgatattattcaggctcttattggttggattgctgagagggaggacaatttgcataatcatgagttcggacatccggcttcatattggactggtgaaaaggcaatgaatgaacttcagcgggctggtatttctccaatgtatttcccggtattgcaagaatgtgcaacaaaggcaattaaagctgcttcagatactgaatcagatggttcacacttaagtggtggtagtgctatgacactagagagtctattctcttcgttgagctacttttttgctcagaaaggacgcaattcatgtgattatcaacttgctttgcagcgttttgttaaaaaggaaggcaaggacgtaatttcttcaacatgcacaatgagtttgtggtgtctcaatcctgctgttgtttttcaagaaattgcagatcgaacactttcggtaattctgacttctggaacactttcaccaatgggttcctttacatctgaacttggtgtccagtttgaggcctgcatggaagctcctcatgtaattaatgctgattctcaggtttttgcagctgtgctatcatctggtccaacaaggcagatattgaatgctagctataaaactgcggacaattcatctttccaggatgaacttggagcttcactagaggaaatatgcagaattgtgcctggtggtgctctagtgttttttcctagctacaagttgatggacaaattgcaagtgcgctggtctcagacaggtcaatgggcacggcttaatgctcaaaaacatgtgtttgttgagcctaagggaagtagtgaggaactggatcctgttttaaaagggtactatgacgcaatccttggtaaagctcctgtcaagaaaggcagaggtggttcaaaacaaatagcgaagaatcgagtgacaaaaaaatcatcacaggaatcagtgaaagcaggagctgctcttcttgcagtttgccgtgggaaggtatctgaagggattgacttcgctgatgacaatgctagagttgtggttattgttggaattccttttccaaatataaacgatgttcaagtaaagctgaaaaggagatataatgattcatacaaatcatcaaaacatctgttaagtgggagtgaatggtactgtcatcaggcatttcgtgctttaaaccaagctgcaggtcgttgcattcgtcataaatctgattacggaggcataattctgattgatgagcgatatcaggatgacagaaatgttctctacatttccaaatggcttaggaatgcaatcaagaagtatgatagcttccaggagacaatggctaagttgcaaaagttctttcagaatgctcaggaaaaaataaaaattaaagattgtggcatcttccccaaggttaagttggataatgaagcacctcaatctttcagtgatgataaaagaaagttgccgtggccagaattgagttcctcaaaccactcagtatcacgatgtaatcagaaggtaaagactgaatgtcttagtcagaggattccagacattgatggtgtggcggtaaaccaaaaagttgtgggtgtagccaatactggagcaaattatggagtcaaaacagaaattataaaattggaggaggatgattttaaacctaggtatgcagagatcactatcttaaatccattagaagacaggtcacggcaacctactcttgttgagggaacttctgcagcgactccagtagctagtccaagcaactatgctgaggtaaacacctcagtaaatatcaacaatggagatcagattgcagacatgtccatttctcctttttcaacaaacagaaatctttcttccctgtccacactggcagctactcctgaaaggaccacagacaaagactgtcatgattcttttattaacagaagtgtaaattctcactatgagaaaaagagaaggttgagctccccaatgagttgtacttacacgacgcagtctagtcctccaagcaaatcattctgccacactggttctgttatgcctggggatttgaatagaaattctgaattgtgttgtaaaaatataggattgtccaggtgtgaaaatgtcaagtttgaaagaaactacagtccagaagaggtttcagcaaagaagtctatgcaaaagaaacttcttataaattgcattagatgcaaaacagctcttgggttagaagaagatgggtttcttgttacttgtacacaatattattcatcaaaattgtacttggcatatcttttgaaacatgggctatcaacttttggcatcctggaggatgatttttcagcatcgacaccaacagaggtacacgtagtgcagtgtgaagcttcgtcactcaacaaaaatgtatttggcaaattcagcagccagggtcatgtttggtttgcaaaggatggatgtgtatacaacgcaatgacctgttctttgtgctcttctgaaaacacaagtgccatggtcctcggtgtgcaagttcttgcaactgataggtcaaatcaacaattggtggaaaaggtgctcttgttcagtgatcgtttggatgtccagtctgagccatcaaagggacagatttcaagaactcgaagagatgctagtaacatctgccagcaatctgtgatcgaccttgattcttttgcatataaaccattaaagaaagatcctgtggcgctgaactcaagaaggtctaagcttaggttacctgccccgaacaaatccaccactggtacataatttgatggagagtttgagacaatggcgatctttgccgtgaagcattgggaagaactttgttctgtgagatatgacatgcggggagatgcagatgttacgtcgccatggagatttatagtttcaaacatccacatggattagagaagttccctgagctgaagtagggtgtaaaatgcatggcctggcagtagaaaattaggatgctgatgtctatatccatttacatgcgtcccattgtcgattatatctatgaacagtttttgcgttctgaaatttcgcatccgtgactagctgagcgtcctgaaatgtcctaatttcaatctc

SEQ ID NO: 66573 - DNA, 3970 bp, Zea Mays
gcatttccccccaattctctcccgcccaaagccccaaaccaccacccaaaatcctctctgccgcccgccgatggccaccgccgccgccatggccgatgacgacgacttcgcctcgccgccgctcgccccgcgtgcgcgggaggaaggaggaggcagaggcgtgtaccaggtgggcggcgtgccggtggagttcccctacaagccctacgggacgcagctggcgttcatgggacgggtcatcgcgacgctcgaccgtgcccggcggcaggggcgctcccacgcgctcctcgagtcgcccacaggcaccggaaagtcgctctccctcctctgctccgcgctcgcctggcagcggcactacccgctccgttcccctcccgcccccgatccattgctccacggcggaggattcgtcccagatgatacgcagccgcagccgacgccagtcgtcccggagaaggctgtcaagaagaagaacgccccgataatctattacgcgacgaggacgcacgcgcagataagccaggttgtccgggagtaccgcaagacgtcgtaccgagtgcgcatggccatcttggcctcaaggaagcactactgtgtcaataaatttgcttgcgcgagcgacaacattgatgagaaatggaatgcacagaaactaagtcggcatccatcccttcagattggtggctgctatgaagttcacgatattgaggatcttgtcagagttggacagaaagcaaaaggatgtccgtattttgctgcacaacacatggcagaagcagcccaattggttttctgcccatataactacctgattagtccggttgtcaggagagcaatggacatcgatatcagtggttccatcattattcttgacgaggcacacaacatagaagatatagcacgtgatgctggcagtattgacatcgatgaagaatcactttgcttgttgcagggagaacttcaaaacctggccgctaatgaggccgttgcaatgatataccaacccttgcacgatattattcaggctcttattggttggattgctgagagggaggacaatttgcataatcatgagttcggacatccggcttcatattggactggtgaaaaggcaatgaatgaacttcagcgggctggtatttctccaatgtatttcccggtattgcaagaatgtgcaacaaaggcaattaaagctgcttcagatactgaatcagatggttcacacttaagtggtggtagtgctatgacactagagagtctattctcttcgttgagctacttttttgctcagaaaggacgcaattcatgtgattatcaacttgctttgcagcgttttgttaaaaaggaaggcaaggacgtaatttcttcaacatgcacaatgagtttgtggtgtctcaatcctgctgttgtttttcaagaaattgcagatcgaacactttcggtaattctgacttctggaacactttcaccaatgggttcctttacatctgaacttggtgtccagtttgaggcctgcatggaagctcctcatgtaattaatgctgattctcaggtttttgcagctgtgctatcatctggtccaacaaggcagatattgaatgctagctataaaactgcggacaattcatctttccaggatgaacttggagcttcactagaggaaatatgcagaattgtgcctggtggtgctctagtgttttttcctagctacaagttgatggacaaattgcaagtgcgctggtctcagacaggtcaatgggcacggcttaatgctcaaaaacatgtgtttgttgatactaacattgattcaacatggatcagaaacgatgttcaagtaaagctgaaaaggagatataatgattcatacaaatcatcaaaacatctgttaagtgggagtgaatggtactgtcatcaggcatttcgtgctttaaaccaagctgcaggtcgttgcattcgtcataaatctgattacggaggcataattctgattgatgagcgatatcaggatgacagaaatgttctctacatttccaaatggcttaggaatgcaatcaagaagtatgatagcttccaggagacaatggctaagttgcaaaagttctttcagaatgctcaggaaaaaataaaaattaaagattgtggcatcttccccaaggttaagttggataatgaagcacctcaatctttcagtgatgataaaagaaagttgccgtggccagaattgagttcctcaaaccactcagtatcacgatgtaatcagaaggtaaagactgaatgtcttagtcagaggattccagacattgatggtgtggcggtaaaccaaaaagttgtgggtatgtgttatacatcgccagaagtatcgaagatctctgttctagtaaagaaagaaaactcttcatcacctgaaagtttttcaacggtctgtccactgcatccgtgcaaaattcgatctgattccgaaggtgtagccaatactggagcaaattatggagtcaaaacagaaattataaaattggaggaggatgattttaaacctaggtatgcagagatcactatcttaaatccattagaagacaggtcacggcaacctactcttgttgagggaacttctgcagcgactccagtagctagtccaagcaactatgctgaggtaaacacctcagtaaatatcaacaatggagatcagattgcagacatgtccatttctcctttttcaacaaacagaaatctttcttccctgtccacactggcagctactcctgaaaggaccacagacaaagactgtcatgattcttttattaacagaagtgtaaattctcactatgagaaaaagagaaggttgagctccccaatgagttgtacttacacgacgcagtctagtcctccaagcaaatcattctgccacactggttctgttatgcctggggatttgaatagaaattctgaattgtgttgtaaaaatataggattgtccaggtgtgaaaatgtcaagtttgaaagaaactacagtccagaagaggtttcagcaaagaagtctatgcaaaagaaacttcttataaattgcattagatgcaaaacagctcttgggttagaagaagatgggtttcttgttacttgtacacaatattattcatcaaaattgtacttggcatatcttttgaaacatgggctatcaacttttggcatcctggaggatgatttttcagcatcgacaccaacagaggtacacgtagtgcagtgtgaagcttcgtcactcaacaaaaatgtatttggcaaattcagcagccagggtcatgtttggtttgcaaaggatggatgtgtatacaacgcaatgacctgttctttgtgctcttctgaaaacacaagtgccatggtcctcggtgtgcaagttcttgcaactgataggtcaaatcaacaattggtggaaaaggtgctcttgttcagtgatcgtttggatgtccagtctgagccatcaaagggacagatttcaagaactcgaagagatgctagtaacatctgccagcaatctgtgatcgaccttgattcttttgcatataaaccattaaagaaagatcctgtggcgctgaactcaagaaggtctaagcttaggttacctgccccgaacaaatccaccactggtacataatttgatggagagtttgagacaatggcgatctttgccgtgaagcattgggaagaactttgttctgtgagatatgacatgcggggagatgcagatgttacgtcgccatggagatttatagtttcaaacatccacatggattagagaagttccctgagctgaagtagggtgtaaaatgcatggcctggcagtagaaaattaggatgctgatgtctatatccatttacatgcgtcccattgtcgattatatctatgaacagtttttgcgttctgaaatttcgcatccgtgactagctgagcgtcctgaaatgtcctaatttcaatctc

SEQ ID NO: 66574 - DNA, 4250 bp, Zea Mays
gcatttccccccaattctctcccgcccaaagccccaaaccaccacccaaaatcctctctgccgcccgccgatggccaccgccgccgccatggccgatgacgacgacttcgcctcgccgccgctcgccccgcgtgcgcgggaggaaggaggaggcagaggcgtgtaccaggtgggcggcgtgccggtggagttcccctacaagccctacgggacgcagctggcgttcatgggacgggtcatcgcgacgctcgaccgtgcccggcggcaggggcgctcccacgcgctcctcgagtcgcccacaggcaccggaaagtcgctctccctcctctgctccgcgctcgcctggcagcggcactacccgctccgttcccctcccgcccccgatccattgctccacggcggaggattcgtcccagatgatacgcagccgcagccgacgccagtcgtcccggagaaggctgtcaagaagaagaacgccccgataatctattacgcgacgaggacgcacgcgcagataagccaggttgtccgggagtaccgcaagacgtcgtaccgagtgcgcatggccatcttggcctcaaggaagcactactgtgtcaataaatttgcttgcgcgagcgacaacattgatgagaaatgcaagtcactgctagacaagactgttcaaggttgcccagaattcaaggaatgcacagaaactaagtcggcatccatcccttcagattggtggctgctatgaagttcacgatattgaggatcttgtcagagttggacagaaagcaaaaggatgtccgtattttgctgcacaacacatggcagaagcagcccaattggttttctgcccatataactacctgattagtccggttgtcaggagagcaatggacatcgatatcagtggttccatcattattcttgacgaggcacacaacatagaagatatagcacgtgatgctggcagtattgacatcgatgaagaatcactttgcttgttgcagggagaacttcaaaacctggccgctaatgaggccgttgcaatgatataccaacccttgcacgatattattcaggctcttattggttggattgctgagagggaggacaatttgcataatcatgagttcggacatccggcttcatattggactggtgaaaaggcaatgaatgaacttcagcgggctggtatttctccaatgtatttcccggtattgcaagaatgtgcaacaaaggcaattaaagctgcttcagatactgaatcagatggttcacacttaagtggtggtagtgctatgacactagagagtctattctcttcgttgagctacttttttgctcagaaaggacgcaattcatgtgattatcaacttgctttgcagcgttttgttaaaaaggaaggcaaggacgtaatttcttcaacatgcacaatgagtttgtggtgtctcaatcctgctgttgtttttcaagaaattgcagatcgaacactttcggtaattctgacttctggaacactttcaccaatgggttcctttacatctgaacttggtgtccagtttgaggcctgcatggaagctcctcatgtaattaatgctgattctcaggtttttgcagctgtgctatcatctggtccaacaaggcagatattgaatgctagctataaaactgcggacaattcatctttccaggatgaacttggagcttcactagaggaaatatgcagaattgtgcctggtggtgctctagtgttttttcctagctacaagttgatggacaaattgcaagtgcgctggtctcagacaggtcaatgggcacggcttaatgctcaaaaacatgtgtttgttgagcctaagggaagtagtgaggaactggatcctgttttaaaagggtactatgacgcaatccttggtaaagctcctgtcaagaaaggcagaggtggttcaaaacaaatagcgaagaatcgagtgacaaaaaaatcatcacaggaatcagtgaaagcaggagctgctcttcttgcagtttgccgtgggaaggtatctgaagggattgacttcgctgatgacaatgctagagttgtggttattgttggaattccttttccaaatataaacgatgttcaagtaaagctgaaaaggagatataatgattcatacaaatcatcaaaacatctgttaagtgggagtgaatggtactgtcatcaggcatttcgtgctttaaaccaagctgcaggtcgttgcattcgtcataaatctgattacggaggcataattctgattgatgagcgatatcaggatgacagaaatgttctctacatttccaaatggcttaggaatgcaatcaagaagtatgatagcttccaggagacaatggctaagttgcaaaagttctttcagaatgctcaggaaaaaataaaaattaaagattgtggcatcttccccaaggttaagttggataatgaagcacctcaatctttcagtgatgataaaagaaagttgccgtggccagaattgagttcctcaaaccactcagtatcacgatgtaatcagaaggtaaagactgaatgtcttagtcagaggattccagacattgatggtgtggcggtaaaccaaaaagttgtgggtatgtgttatacatcgccagaagtatcgaagatctctgttctagtaaagaaagaaaactcttcatcacctgaaagtttttcaacggtctgtccactgcatccgtgcaaaattcgatctgattccgaaggtgtagccaatactggagcaaattatggagtcaaaacagaaattataaaattggaggaggatgattttaaacctaggtatgcagagatcactatcttaaatccattagaagacaggtcacggcaacctactcttgttgagggaacttctgcagcgactccagtagctagtccaagcaactatgctgaggtaaacacctcagtaaatatcaacaatggagatcagattgcagacatgtccatttctcctttttcaacaaacagaaatctttcttccctgtccacactggcagctactcctgaaaggaccacagacaaagactgtcatgattcttttattaacagaagtgtaaattctcactatgagaaaaagagaaggttgagctccccaatgagttgtacttacacgacgcagtctagtcctccaagcaaatcattctgccacactggttctgttatgcctggggatttgaatagaaattctgaattgtgttgtaaaaatataggattgtccaggtgtgaaaatgtcaagtttgaaagaaactacagtccagaagaggtttcagcaaagaagtctatgcaaaagaaacttcttataaattgcattagatgcaaaacagctcttgggttagaagaagatgggtttcttgttacttgtacacaatattattcatcaaaattgtacttggcatatcttttgaaacatgggctatcaacttttggcatcctggaggatgatttttcagcatcgacaccaacagaggtacacgtagtgcagtgtgaagcttcgtcactcaacaaaaatgtatttggcaaattcagcagccagggtcatgtttggtttgcaaaggatggatgtgtatacaacgcaatgacctgttctttgtgctcttctgaaaacacaagtgccatggtcctcggtgtgcaagttcttgcaactgataggtcaaatcaacaattggtggaaaaggtgctcttgttcagtgatcgtttggatgtccagtctgagccatcaaagggacagatttcaagaactcgaagagatgctagtaacatctgccagcaatctgtgatcgaccttgattcttttgcatataaaccattaaagaaagatcctgtggcgctgaactcaagaaggtctaagcttaggttacctgccccgaacaaatccaccactggtacataatttgatggagagtttgagacaatggcgatctttgccgtgaagcattgggaagaactttgttctgtgagatatgacatgcggggagatgcagatgttacgtcgccatggagatttatagtttcaaacatccacatggattagagaagttccctgagctgaagtagggtgtaaaatgcatggcctggcagtagaaaattaggatgctgatgtctatatccatttacatgcgtcccattgtcgattatatctatgaacagtttttgcgttctgaaatttcgcatccgtgactagctgagcgtcctgaaatgtcctaatttcaatctc

SEQ ID NO: 66575 - DNA, 2732 bp, Zea Mays
ctccctcatgccgctgccctgcttctagctccagcgccgccgccctgcttccctacttccagctgcgccgcccaccccttcgatttccctccagcgctgctcctctacccttcgagctccctccaaagccgtcgccaccgcccatctagcgccgccgccctctccttcaagctccctcctgcaaggcgacagtggacgcccagagtttttgagcgcctggacgcctaggcgtcgcgttaaaaaccatggccatttcactaattatagaagacaatattatgaccttatttggtttcacttataatccgcttatggatgaaaataaatgagaatcccaccaaacgtctagattattttcacttctcacagaatcggcaattcatcttttgaactaatacgcgagaatcaaataattgtaagaatcttggcgtttccacgaatctaagcatgagcctaagggaagtagtgaggaactggatcctgttttaaaagggtactatgacgcaatccttggtaaagctcctgtcaagaaaggcagaggtggttcaaaacaaatagcgaagaatcgagtgacaaaaaaatcatcacaggaatcagtgaaagcaggagctgctcttcttgcagtttgccgtgggaaggtatctgaagggattgacttcgctgatgacaatgctagagttgtggttattgttggaattccttttccaaatataaacgatgttcaagtaaagctgaaaaggagatataatgattcatacaaatcatcaaaacatctgttaagtgggagtgaatggtactgtcatcaggcatttcgtgctttaaaccaagctgcaggtcgttgcattcgtcataaatctgattacggaggcataattctgattgatgagcgatatcaggatgacagaaatgttctctacatttccaaatggcttaggaatgcaatcaagaagtatgatagcttccaggagacaatggctaagttgcaaaagttctttcagaatgctcaggaaaaaataaaaattaaagattgtggcatcttccccaaggttaagttggataatgaagcacctcaatctttcagtgatgataaaagaaagttgccgtggccagaattgagttcctcaaaccactcagtatcacgatgtaatcagaaggtaaagactgaatgtcttagtcagaggattccagacattgatggtgtggcggtaaaccaaaaagttgtgggtgtagccaatactggagcaaattatggagtcaaaacagaaattataaaattggaggaggatgattttaaacctaggtatgcagagatcactatcttaaatccattagaagacaggtcacggcaacctactcttgttgagggaacttctgcagcgactccagtagctagtccaagcaactatgctgaggtaaacacctcagtaaatatcaacaatggagatcagattgcagacatgtccatttctcctttttcaacaaacagaaatctttcttccctgtccacactggcagctactcctgaaaggaccacagacaaagactgtcatgattcttttattaacagaagtgtaaattctcactatgagaaaaagagaaggttgagctccccaatgagttgtacttacacgacgcagtctagtcctccaagcaaatcattctgccacactggttctgttatgcctggggatttgaatagaaattctgaattgtgttgtaaaaatataggattgtccaggtgtgaaaatgtcaagtttgaaagaaactacagtccagaagaggtttcagcaaagaagtctatgcaaaagaaacttcttataaattgcattagatgcaaaacagctcttgggttagaagaagatgggtttcttgttacttgtacacaatattattcatcaaaattgtacttggcatatcttttgaaacatgggctatcaacttttggcatcctggaggatgatttttcagcatcgacaccaacagaggtacacgtagtgcagtgtgaagcttcgtcactcaacaaaaatgtatttggcaaattcagcagccagggtcatgtttggtttgcaaaggatggatgtgtatacaacgcaatgacctgttctttgtgctcttctgaaaacacaagtgccatggtcctcggtgtgcaagttcttgcaactgataggtcaaatcaacaattggtggaaaaggtgctcttgttcagtgatcgtttggatgtccagtctgagccatcaaagggacagatttcaagaactcgaagagatgctagtaacatctgccagcaatctgtgatcgaccttgattcttttgcatataaaccattaaagaaagatcctgtggcgctgaactcaagaaggtctaagcttaggttacctgccccgaacaaatccaccactggtacataatttgatggagagtttgagacaatggcgatctttgccgtgaagcattgggaagaactttgttctgtgagatatgacatgcggggagatgcagatgttacgtcgccatggagatttatagtttcaaacatccacatggattagagaagttccctgagctgaagtagggtgtaaaatgcatggcctggcagtagaaaattaggatgctgatgtctatatccatttacatgcgtcccattgtcgattatatctatgaacagtttttgcgttctgaaatttcgcatccgtgactagctgagcgtcctgaaatgtcctaatttcaatctc

SEQ ID NO: 66576 - DNA, 389 bp, Zea Mays
cccagaatttcaagtgtaatcagcttaggttacctgccccgaacaaatccaccactggtacataatttgatggagagtttgagacaatggcgatctttgccgtgaagcattgggaagaactttgttctgtgagatatgacatgcggggagatgcagatgttacgtcgccatggagatttatagtttcaaacatccacatggattagagaagttccctgagctgaagtagggtgtaaaatgcatggcctggcagtagaaaattaggatgctgatgtctatatccatttacatgcgtcccattgtcgattatatctatgaacagtttttgcgttctgaaatttcgcatccgtgactagctgagcgtcctgaaatgtcctaatttcaatctc

SEQ ID NO: 66577 - DNA, 439 bp, Zea Mays
ccatcatagtgttctgagatttaaaacaaacgtctattgtgatctgagatttaaaacaggcatcatagatgcttggggtaagtacagactgcaggctaaacatcccaatccaacaacggtcgagtgccgatgaagcgaagaaactacaaactaaactgcctcactccagggacgggacgacacttgcaaggaaactactcagagaagacggcactaatctactgcatctagaaagtccttcgagaaagcccggttaggccgacaacgacgaagatttttttccctgactgcaaacacttggacagagtttcatccgtcatacatcactcgtcaccctgcaaaaccaatttcaaatgaacgagtccaatgaggttgttggatccacaaagcaaaactactaaaccaggtgaaagcacaaataagagcaaggactcaagag

SEQ ID NO: 66578 - DNA, 976 bp, Zea Mays
aacgaggactccaaacgggctgcgtgcacggacatctcacccttgtcgcggcgtcgtgcacccgagtaggccggttgtgtcgatctgtggagaggagacacgtcacgttacgatccccaacttaacgccgatcggaggccggagagaccggctcagcctcgctccgccgccgccggcgaccatgtccctggcggctatcttcgtcttcctcatcgtgtccgcgctgcagctgctctaccgctacctcgacctcgccagaaagagcggaggacttagtgatgagcagatcaaagtgcggcttgaaatcaagcaacttctcaaggaggctgatcagttgtcaacgccgtccacatttgcacaagctgctaaactcaagcgcctggctgctgccaaggagaaggaactggcaaaaagaacatgaccttaaagggaagcaatccttatacgacaaatacacaaaatttttgttggttactaaggtcataatttatgctgtgctcgttctgtgcttttggagtactcctgtaactgcagttccacaacatcttctacagcccttcggaaaaatgttttcctggagaggtgttgatactgccaccggcaatgttgtggttggaatactcccgtggctgtttttgacctctcgggtcagcaagatgctgtgccagaaactgggcttcgtgcttgtgcgtccgtagcgcctttccatgagaaagtcagcaagttgctgcacctaaacaagactgctaactttgttcttcttctatatctttttataatcaactgtttcacttattgtccactatatactctgtccgttcttttttaattgtcgtgttttagtttaaaaattagcgggcgataaatattcgagaacggacttgtagtcatataaatttgctgtgctatgtgctcaagcggatacgtgtataagttactagtagccgtgaatgatgtgtagtttttccccctttcc

SEQ ID NO: 66579 - DNA, 2633 bp, Zea Mays
gatcacaaataacttttattgaatcattttcatgtggataatcatcaccgagccggttacctagttcgttcgatatcaagccgtaactactacacaaaacacaagttacacaaccccggctcccgctggcgcacacgctcctcacgtgccgcacccgaaacgtcccaagaaaaaagggagaaaactcaccgaaaagtctacccacctgggccctggccacctcccccctgctcgctcacgacccccaacacgcgagtacgcgacgacgcccctcacaaaaacaggggccaaaaaggataaaaaaaagtggggaaaagaacgccgggaatgggcaagcagcagcaggcgccaccggcgcggcggtccccggcgatgtcggcgcctccgccgccgaagcgccggaagaagaagggccgcccgtccctgctcgacctccagaagcggagcctccgcctcgagcagcagcagctaccccaggggcgccgctccaaccgcaggagcgccggctccgcggacgaggacgacgatgggcccgcctccggctccggccgccgcgagaagaagctgcgcctcgtcatgggcctccacgacggatcagccaagggagaaaagatgaggaaagcgacggatgggcgtgaagagccgtcagattccgggcccacaacacctttaccgaacaaaaagttgttgctcttcatcctcgacaggctacagaagaaggatacgtatggtgtattttcagagcctgttgatcctgaagagctacctgactatcatgacattataaagcatccaatggatttttcgacaataagaaagaagctcgataaggaggcctatttcaacttggagcaatttgaggatgatgtgttcctgataacctccaacgcgatgtgttacaattcaccagatacaatatactatcgacaggcacgaggtattcaagagattgctaaaaaggattttgagaatcttaggcaagatagtgatgccagtgaaccagaaccggaaccagaacgagaacccaagccggagcccgaaccagaagaaccaaagccacagcctcgccggggcaggcctccaaacaagaataatgccaaacagaaagttgggaagccaccagcagaacgtgccactgcagacttttctggtgcaacacttgctactgcggcaaatattggacggcatgcacaggcagatgttgatctgtcacgaagagtaatggataaagcgatgattgcggatgtgttgagagcttcttttgccaacctaaggaatgagcacaactggtctggtgagcggaagtttgaaagacttgaagcttactcaggttatgggggtacatggtctgcaaaaacggggaagaggccgattctgatggaagatagtcgccggagcacatattatgagactcaaccatccagttcaatatatgagctgccggtatcgtcctcctacaatgggaccgagaagctgctagtaccagttggggttcagttaccgcagtcctattcccacagcctggcacgttttgctgcacaacttggccctgttggctgggaaattgcgtcaagacgacttgaacggagccttgctcctggaacaaagtttggtcgtggctgggtaggagatggtgaaacgccgccgaacccatttcagacacctgtactcgctgcattttcagaaacaatggcaccaccgagcagtatagcagcatcaggtgagcagccatctatgaacgcgccccccgccacagaggcctgtgctggcagcataagccatcgggtgggatctcagccatgtgcttctatcagcacagtgcagacgataaattccgaagcattagcaagccagcaatgcggatccgtaccacaggtttctataaaccgaggcgaacgtgctgttgagatgaagggcagcactaataatcttcacgggcacccggccatgccgcaaactatgaatggtttcaatgccgttccaggacgggtgctgttcccacctgcggctcaactggtggtgagtcagatgcagacacatacggctgattgagtaacaagtagccattggatcaacattgtcaacatggcaattgaacattgcccgcttccattcatcagtcgcggtcaccaagcgacgacggccttaagccgcaccctgccagtggcttggcgcccaccacattgggggtgtctggtcgctgttgaatcgtcgcgcctcaacctggcgctgcaactgtgaatctgttgtgtaattgcgtaagtaggaattaggatgataacgtgcatagatgtgttgggcggatggtgtaacagcggtgagttgcagtttggagatttagcgattctgaatgtgtagtagaaaaaccacaggggaaacgaaacaacatctgtatagactattcaggatcaggaggtttttttagcgtttcggcgactagcaacaggtgcgatcgagcatgaaatcgtgcgaaccagattgtctgttgccggtattgtttctatatacatcaatctgacggtgttctgggttgcaggtaccacagtccacagtgtaggtaagaagtagaatcatgcggcaacaacatgaatgccctgttccaatctcgcgagataaactttagcagctttttt

SEQ ID NO: 66580 - DNA, 1279 bp, Zea Mays
gcttattcccgcagtcatgctagaagaatgccacatttctggaacgaatatgaatatttggatgatgtgttcctgataacctccaacgcgatgtgttacaattcaccagatacaatatactatcgacaggcacgaggtattcaagagattgctaaaaaggattttgagaatcttaggcaagatagtgatgccagtgaaccagaaccggaaccagaacgagaacccaagccggagcccgaaccagaagaaccaaagccacagcctcgccggggcaggcctccaaacaagaataatgccaaacagaaagttgggaagccaccagcagaacgtgccactgcagacttttctggtgcaacacttgctactgcggcaaatattggacggcatgcacaggcagatgttgatctgtcacgaagagtaatggataaagcgatgattgcggatgtgttgagagcttcttttgccaacctaaggaatgagcacaactggtctggttatgggggtacatggtctgcaaaaacggggaagaggccgattctgatggaagatagtcgccggagcacatattatgagactcaaccatccagttcaatatatgagctgccggtatcgtcctcctacaatgggaccgagaagctgctagtaccagttggggttcagttaccgcagtcctattcccacagcctggcacgttttgctgcacaacttggccctgttggctgggaaattgcgtcaagacgacttgaacggagccttgctcctggaacaaagtttggtcgtggctgggtaggagatggtgaaacgccgccgaacccatttcagacacctgtactcgctgcattttcagaaacaatggcaccaccgagcagtatagcagcatcaggtgagcagccatctatgaacgcgccccccgccacagaggcctgtgctggcagcataagccatcgggtgggatctcagccatgtgcttctatcagcacagtgcagacgataaattccgaagcattagcaagccagcaatgcggatccgtaccacaggtttctataaaccgaggcgaacgtgctgttgagatgaagggcagcactaataatcttcacgggcacccggccatgccgcaaactatgaatggtttcaatgccgttccaggacgggtgctgttcccacctgcggctcaactggtggtaccacagtccacagtgtaggtaagaagtagaatcatgcggcaacaacatgaatgccctgttccaatctcgcgagataaactttagcagctttttt

SEQ ID NO: 66581 - DNA, 786 bp, Zea Mays
atggttcaccgctcccctatttgacagctcgcgagtcgagtcagccggccgacgacagggagcctcgcctccggcgccgcggcggcgatcacccaattccacccccactgccttctcctatctccccacactaccgctctgtttcctccaccatccgcttgcgtccacgcgctctctcgttaagccatcgcttgcgtcaacggccgcgccctctagtcgttcgacgaaacgccaccgagccactgacgcgtccgctgcacgcgtagtcgcgcttccatcttgctccgccgccccgcagctcctagccggagggaggccaccgatccatgtctgtcgccaagcgctacgtgctgcgcctcttcatctcgctcaagtacgtgacggcgaacgtggtggaccggcagagcggtcgcatcgtgacgaccgcctcgaccgcggagcggcccctgcgagacgggctggagtgcggccgcgcctgcaacgcaaaggcggcggcagccgtcggcgaggtgctcgccatgcgcctcaaggtggacggcctcgcgcgggagcccatatacgccaacgcggagaaagaggtcgcgaagaaagggttcaagaaccagaccaaggtctgggccatcctcaatgcgttgcgcagtcacggggtcaacctccacatcgacgacgatggcgaccacaggccgcacgtctgaaacaaccataagttcaggagtttgctcctccaactaacaaaagctctcatggtctggttgaactcctgatggtaccaaagcccagggcatg

SEQ ID NO: 66582 - DNA, 1837 bp, Zea Mays
aaaaggctgtataaaagccacctgcctccctctcacagctcctccctcccaagaactcggaagtcggaagcagggcaagggatggatagcaagtcggtgggaatcgtcggcgcaggcgtgagcggcctagcagcctgcaagcacgccctcgacaaggggttcaggccggtggtgttcgaggccgacggaagcgttggcggagtgtgggcacacaccctggagtccacgaggctccaggcgccgacgacggcgttccggttctcggacctggcgtggccgccggagagcgcgagggaggcgtacccaggccaccgcagggtcatggagtacataaggtcgtacgcgcgtgcgttcgacctcctcaagcacatcaggttcaacagccaggtgctgggcgtcgagtacctcggtgcgaccgaggaagaggtcatgggctgggatcagtggtccggcgatgggacggcgttcggagccgtgaagggtggcggatggcgcctcaccgtccaggacttgaaagtcggtagcactgaggtttttgtggtggattttctcatcctgtgtattggaaggcacagtggaaccccaaacatcccagagttcccagcgaatgggcctgagctgttcaaggggaagatactgcactcgctggactactcctacatggacgacggcgacgctgctgagttcgtgagggggaagcgcgtgacggtgatcggctccggtaaatcggcgttcgacatcgccgcggaggtcgccaaggtgaacgccatgcaccatcgtgtacagaacaaggcactggctggtccacaagtccagcgtgtggggagtcgacctcagctacttctacctgaaccgcatctcgcagctcctggttcacaaacctggtgaaggattcttgcgctgcatgctggccgccgcactctctcccttgagatgggcgatctctaaagcgatcgaaacgtactacaagtggagcgttcctctgcggaagcacgggatggtcccggactacagcttctccttcgccatgtcctcgtgcctgatcgcgatgctgccggaaggtttctacgacagggtcgacgaaggcagcatcgttctcaggaaatccaaggcggtcggcttctctagcgacggagtcgtcctgcgagacagaaacgaaagcgtgagaagcgatatcgtgatcctggcgacggggttcagaggagaccagaagcttagggacatcttcactgcgaactggtgcagggagatagtggcagggtcaccggatacagcagctcctctgtacagagaatgcatccatccccggattcctcagctggctatagtgggttactccgagagcctcaccaacatatacgcctcggagaggatgagcaactgggtagctcaatttctggccggcggcttccagttgccaagcgtgagatgcatggaggagagcgtggcggagtgggcagagtacaagaaccgatacaacgggaggtatttccgcaggtcctgcgtaagcaccgctaacatctggcttaatgatctgctgtgccgagatatggggtgcaaccctagaaggaagaaagggttcctggccgaatggttccagccatatggacctgcggactatgcaggtctttgctgaagatggttgcattgcatgcctgtcagtgcatactcctaggaagagatgacagagttgctacctccatgggtgtaatactgcaatgtgaaacgtacaagcaaaatatgtctgatgtttgaactgtaaggtgtgaacctatgagacctgtctaaacaattttgcaacaatctacagttttgaactcgaacagggagaagatag

SEQ ID NO: 66583 - DNA, 1431 bp, Zea Mays
atttgcactttgttcatccatgggcatagattcacatttaagcacttgtgttggcactcaatcaccaaaatacttagaaatggcccaaaggcacatttccctttcaatctccccctttttggtgatttatgccagcacaacataaagtaactagaacaagtgcaatatcacttcaaataaaaactcaaattcattttgattcaatttggcatatatggatcatcctttgccaccacttggtttgtttttgcaaatcaaactcaaaatcctatctctaagtcaaatccacttgtagagacataaagagaggttttccaaagaaaattgattcaagattccaaaaactcccccttttccccttaatcaacacttctccccacaagaggccaacttttgacaaaagagacaatgcaagagttttgacaaaacaaaaagctctattctactattttcaaaatctctcaagtggtagctgatccatttatcgctttggcctttattttctccccctttggcatcaagcaccaaaacaggatcaatcttggccctttaaccccattgcctcaccaaaatcttcaattaagagcaaataggcaataagagtttaaagatgaacttggaataagttaccctctcatcggagtgcagtggaagtctttcatggtccaagtccacctttttccctttcaatcctccttcgagactaaatcatcaaactcaagcacatggttagtctccaagggtcaagttgtaacacatctccccctaaacatgtgcatcactttgcaacggacttgtgaggtccagggagtgtttgtacaacttgagcaccataataagcaacaaaatgcaaaaaggaacatgatcaagagcataaatacatgtatgctacaattcaatccaagttccgcgaatctaagacatttagctcactacgcagcctgcaaaaggtcttctcatctagaggcttggtaaagatatcggctagctggttctcggtgctaacatgaaacacttcgatatctcccttttgctgatggtctctcaaaaagtgatgtcggatgtctatgtgctttgtgcggctgtgctcaacaggattttccgccatgcggatagcactctcattgtcacataggagtgggacttttctcagattgtagccaaagtccctgagggtttgcctcatccaaagtagttgcgtgcaacactgtgacggaacctcccaagtaattaggcccacctacagttgtccttgtccaacggacttcagacaaccctgtaggtgcccctgaactacttgacaagttcggtatctttccttaccttaccaggaacgtttcacccgtcttgcagacattacagaacatcggagataaagaaatgcggaagcgaattacataatcttacatttatttcaaaaacaagcttgag

SEQ ID NO: 66584 - DNA, 10881 bp, Zea Mays
agcgagttgatcctgcaagtgtcggatgtcccttctcagttcattgattctgtctccgtcggcaacccaagcatcggtcctctgttgaagagctgcttgaagtcgactcacacgagcttcaaggtctccgatggggtcgttacttccactgctgctactttcatgtcggggagccaattgatgccgaggcaccccaattggtcccgtagacttgcgtgccgttagcctggtacgtggcggcatcttttctaagggggaaaatgttattagaatagtgcttagcatgatgcatgtataattacagaatcaaccttagtcgattcaaccttctatatgttgcactcttcctatctggtctttaagatagactcttcagaatacttaggtaagaagagagaagaatttttaggtaagacttttgaaaatccttttgaagatgcctcataatatctgcaaagcagggctacgctccgataccagctgtgacggaacctcccaagtaattaggcccacctacagttgtccttgtccaacggacttcagacaaccctgtaggtgcccctgaactacttgacaagtttcggtatctttccttaccttaccaggaacgtttcacccgtcttgcagacattacagaacatcggagataaagaaatgcggaagcgaattacataatcttacatttatttcaaaaacaagcttgagttatgttattacagaccagactaacagtgagtgcagagtagtaatataatacaaaccagggaggcacaaactcctcctgagaagttataaacaaagatcctaagtggaggaccgagtcctcccgcacttcagtcttctttttcctcatttggtaccaccttggagcagaagcaacaaaagtttgtcgcttcctcacctaaaaacaacaaagggataaaccctgagtatggaatactcagcaagtcttacccgactaaggaaaagactctcaagggtatgctggataaataggagtcaaggagaggctttagcaaaaatcaacttatacttttgcagaagtagcttactaaagtgagtccttactttcaatcttttaacgccatgttaagtattaatagaagcttgagttatgttattacagaccagactaacagtgagtgcagagtagtaatataatacaaaccagggaggcacaaactcctcccgagaagttataaacaaagatcctaagtggaggaccgagtcctcccgcacttcagtcttctttttcctcatttggtaccaccttggagcagaagcaacaaaagtttgtcgcttcctcacctaaaaacaacaaagggataaaccctgagtatggaatactcagcaagtcttacccgactaaggaaaagactctcaagggtatgctggataaataggagtcaaggagaggctttagcaaaaatcaacttatacttttgcagaagtagcttactaaagtgagtccttactttcaatcttttaacgccatgttaagtattaatagactccatttgcatctagcctaatttcacatcacatcaagacaacatcattcttatccattgtgttcacatcttgactctaggttgcagggaagtgaccaagtcttcataaccgcgaaggtacggcgatccgaatcgattatactcagttgaggatctccaatcacacgacatatgtagcacttaacccttgcatatgtcaaacccgccacctgggttcttaagaccggatcaggttcacgcagaccgagagcacagatacaccaccgtccagcctcttgccacggagggtacacgctactctcgccaccgctccacgcccatctcgtgttgtcttattccggccttagtctgcccaaggcaaggcttacccatgacgaggcatgtgaccagttaaagggtcctcggtcagcacgcctacatacgcgttaatccttaaccaacctgggtagaacatcacctgttcctacccccaagtttcaatttaagtatttccacccttaggaatgtgtctgttccttaggatgaaagagcatcacggggagctttgcagtaagatcccactattgctccaaatgaaaatattcttgcaggtagaagctatcctctccatggttaaattgaggacaacttctatccacaagatctaagcaaggctaagcatttttgtaaatcataattttgatacttcacagaagtatctataaaggtatggatatcaaggaaagcaatgcatcaaagggtttcaagtaactcctatgaacttaatgcacatttcactagacttaagtgtgtgaaaagtatttaaaaactcaaggaaaggggttgcatgcaccggggcttgccttcgttcacaggtgaatcaggctcggatccacaaatgtcaaagtagaaatgattcccggcctgagactccgaaggtggtggtggtgtctcctcttcagttacttctacctcttcttcacgttctaatcataaccatacatatatataagaatggatgccatgggatgctcatgagaatgcaaagataacataaatttattatttatgtcttgaatacaacttgccttcacggagttccgggaacttagggtttccggagtcggtaaaggagttcatagggcaggggggtgttttgaggtttggtgatcaaacaaggtccaaatcaattcaaactctacccaaggcttctaaatattgtataacactcatataaaaattttgggcattttaggacttatcaattattttctaaaaatccataatcaacattttttaaccattttaaataccctaaaatttcttactttcactaaaaatcacaaacttatttttattaaatactatggaaaataacaaacctaggaaaattagtttcacaattttagcatttttctacatttttctacatatttttgaatctctactgaaaaagaaaaaggaaaataattaatagaactgggtcgaattcagcccagcggcccaggtccagagggaaagcgcccgcgcgcggccgcgccctggcggctttgcacaggggaccatggggttttggttaatttgaagcaggtttatttactgtgtttctcagtcactgacaacttgcaaaaagaccctcggtcttctattctttcgcgcgacggggtccacgacggtgctccgcatgggcggcacaactccggcgagttagactggccggggaagatcgagaccggtgctcagcttcggattaaaccggattcgtgacctaaagagtactttccctaacttaattgcacaaataaccaacccccgaactctggccacggtgaccaagagcagagcggcaagatcgtcgtgttcccggcgaccagagagttcctagctcacttacatgggtcggcaagcatcactaacatgcacagatgctagaacaggaacaaagagggtatgagcagacctgtggagggctggccgcggtggggttgatttcgggtggcggaaacttgatttgggggaaaaccgaaattcaagcgcactggtgcacgattgctagcgattcacggtggctaggtgggtgatgatgctgcgaagctagtgggggcttcaatttataggcggagtgatcggtggccgcagattttggacgagcaacgcggcggccggaggggaggaagaagcctggcgcggtgaatacgtggctattgccgtggcaagctccccggcgacgatgggacgggtagagggagtcatggcgacgcggtaaaacggctaggccacgcggcgcacggtcgggaagcggcggtcgacggcgaacttatcgtgccagccgcaaagcagaaaggaagataggagagggggtcgtcggagtggtggccagctcaccggcggtgaggatctttaccgagccatgtttatctgatggccacgacgcacgaatcgcgacgagcggcgatcaacggtgagggaccaccggcggcgagcaaagggatgggatcttcttcagttactcgttactgtaccatggcaagcgcttcatcagtcgcctgacaaccaaagttgaagctgagtttcctctcgacttcccataacaactccaaccaagatctgcagcaaagttgtaaagcaacatgccctctacaatcttgccatctgatgttgccccaaaaagccactgcatctggtttgaaattgggcttgaagttcagggcaagaatctgttagtctgatattcagacagaaccagactgacagtccaacttgggttgagattttctctatttttttcataaggacatggcttgaacccttaaacaaagttgttctcctatgattgggctatcaacttgatgtggtgacctagggcaaaaaccctatgctttgaaagttacaaagccctaaagtggagcctttaacactgaatttcagacttagtgtagaactcaaatgaggtccattttgcacttaagtccaaatctcagggtttggcttgtaaattcacatatttgtgaaccaattggctttagattcataaacatagtggtttttacattttagtccaaaggttcatcacttttgcacataagcccctagggtttggacttagagttttccagggttccaattagagtttctggtatcccaggggtacaaaaagtgattcaagtttatttttagggtcattttatgacttttaccctaaagcttttaggttttcttaacttgggttaagttttacccctttaaccactatttagggttaagtccattaaccagggttccatttgcaaaaacattaaaacaatacaacttgtttgaaatttttgcctagtgaatgcactctaggtgtgtcacacatatgcaatgccaatgcttatgatgtcatgctcaagttttagttatagtaacaccaggggtgttacatccttccccccataaaagaatctcgtcccgagattaaaatcctagggtagtaatggtaaaggaaacacatcacatttttatttccttaattttggtacaaggcaggggtgatgtgggggttacttctttattacacagctatacaaactttacaatttacatgaggctaaaaagcctgggaaattcttatctaagaactcttgggtttcccatgtagcctcgtcttcagaatgctggttccactgtatcttgtagaatttgagagtctttcttcgggtgatcctatccttttgatccagaactcgaataggatgttccgagtatgttaaatctggttccaggacaacatcagtcacttcaatggttcgatcaggaacccgaagacacttctttagttgtgacacgtggaacacattgtgcacagcagacaaggtttcggggagttggagtcgatacgccactggcccatatctttccagaataagaaaaggaccaatatatcgtggtgcaagttttcctttaactccgaaacgcgatacgcccttcattggtgagaccttcaagtagacatagtctccttcaagaaaatataagggcattcgccgtttgtctgcataactcttttgccgtgcttgagctttcttcatattatggataattctctgaaccttttcttcaacctctttcaccatatcaggtctaaagaagtatctttctccaggttcagaccaatttagcggagttcgacaccgtcgtccatataaagcttcaaaaggtgccatcttgatactttcttgataactgttattgtatgaaaactccgctaggggcaaacattcatcccattttggtgagaagtccaggacacatgcccgcagcatatcttcaagtatttggttcaccctctcagtctgcccactggtttgaggatgataagccgaactgtggagtaatttagtacccaaggagttgtgaagtgcttcccagaatttagatacgaattgaggtccacgatccgacacaatgttcttcggaacaccatgcaaactgagaatacgggcaatgtataatgctgcataagtggctactgtatatttggccctgacgggtaagaagtgggcaatctttgtgagtcgatcaacgataacccaaatagaatcataccctttggctgtcctgggcagtcccacaataaagtccatactgatgtcttcccatttccatgttgggattggcaaagattgtaatggaccagcggttttcatgtgtatggccttgacacgtctacaagtgtcacacttagccacatagcgtgcaatttcaatcttcatcttagtccaccagtagtgttgctttaagtcttgatacatcttagtgcttccgggatgaatagaatagcgactaagatgtgcttcatccaaaatttgctggcggagttcttcgttctttggcactactatgcggtttttaaaccatatcacaccttgatcgtcttccttgaaacacttggctactccagcctttatcttctctcgaatgtgcttcatacccagattatccttttgagcatcaattattctttgcaaaatgattgattcaagctttagttgatttagagtcccttgttggatgattcccaggtttagcttttccatttcctgacacaaagtgttctcggaggtcttcgccataagacagtggcagacaaccctacggctcaatgcatctgccaccacattggctttgcctgggtgataatggatctccaaatcatagtctttaatgagctcaagccatcgtctttgtctcatatttaactctgactgggtgaagatgtacttcaaacttttatgatctgtatatatgtgacagatattacccagcagatagtgacgccaaatctttagggcatgaaccacaacagctagctccagatcatgagttggatagtgctcctcatgtcggcgcaactgccttgaagcatacgcaatcactcggccctcttgcatcagtacacagccgagcccactgccggaggcatcacaatatacgtcaaaaggtttagtgatgtccggttgagctaataccggagcagtggtcaatagtgtcttcagttgctcaaaggcttcattacacttagaagaccaattgaacttagtgtcactcttcaacaaacttgtgattggcttcacaagcttagaaaaatctggtatgaatctgcgataatacccagctagtccaagaaaactctggacttggtgaacagttgttgggggtttccactccagaatatctttgaccttgctaggatctaccgcaattcctttagccgataacacgtgccccaaaaattgaatttcttccagccagaacgcgcacttgctgaacttggcatatagctgatgttccctgaggcgcgtcaatacaatccgtaaatgctgagcatggtcttcttcattcttagaatatatcaagatatcatcgatgaagactaccacgaacttgtccaactcgggcatgaacaccgagttcatcaaataagtgaaatgggcaggagcatttgtgagcccgaaagacattaccaagtattcaaacaatccatatcgcgtagtaaacgcggtcttcggtatatcctcgggccgaatatggatttgatgatagcccgacctgagatcaattttggaaaataccctcgccccagtcagttgatcaaataagatgtcgatccttggaagagggtacttattcttaatagtgacctcatttaggggtcgataatccacgcacattctcaaggtttgatccttcttcttaacaaaaatggcgggacaaccccacggggacgagcttggccggatgaatcctttattcagtaggtcttgcaattgaatcttcagttccgccaattcattagggggcatacggtacgatcttcgggatatgggagccgtaccgggctttagctcaattacgaattctacatctctttcagggggcagtccaggcaaatcttccggaaatacatctggaaactcacatactaccggaatgttcttgatctccggtacaatggcttcatagattctaccagaagctttggctggattggttgcggggagagtcaaaagaatctcttcttggttatagctcaacctgacggttctgagttcagtgttgagaattgctttgtgttgggttaaccaattcatacccaagattacatctatttcctggccttttagaacaatcatgttagcaggaaagttccgtccggccattgttactggcactccataggccacttctttagtataaatgtgtcccccaggtgaatgaattttaaatccctcctttgattcatggtatgcaatatgatgttattccacaaatgtcttgctaatgaatgtatgtgaagcaccagaatcaaaaagaataattgctgggtgactggccacgggaaacgtacccatcatcaccggctctccttccggtgtagtagccacttgagtataatacacacgccccgttttcttcatattcttccccatagcatttcctttaggctgagaggacttcccggttccttgctgagcattggattgattttgtttggggtatgggcagtctttgataaaatgtcctgacttgccacagttaaaacacccagttgaagaactaggcaaggcagggaatcgagtgcctggggcacccggctagtttggggtagtgggggcagtgttggggcggataatgattggctgtttgaagggaaatgaaggtggacgagaaaaagtacggttttggctagaaggccggatgacgaaccgttgcttctttgcctggccctgagtaggcctctcaccaccgaatcccttattcttcccagaatttgtgtatttggcttcaacagataaggctgtgctgacagcctttccatatgtgaggtctatgcatgtggccattttcctttgtagccgatcattcagtcctcgcataaaacagttcttcttcttcaaatctgtattcacctgatcgatagcatactgcgacaggtgattgaatttgttgaggtattgagtgacggtatctccgccttgttgtaacttcataaactcctcttgtttcatatgcagcactccttcggggatgtagtgttcacggaaggctgctttaaattcattccaagtgatttgatggttgtcaggttggatggccacaaaatttccacaccaggtactggcaggaccacggagttgttatgcggcaaacaacggcttctgcgtctctgagcaacgaagaagaccaaacttttgctcgataacccgaatccactcgtcagcttctaggggatcttctgctttgacgaatagaggtggacgagtttccgagaaatccagataagtggtctcacggggaccctgcggataacctcttgctgcttgctgctggaattgttgctgacccgccatttccctaaggaagcgggtattatcggcggtggcattcaccaaggcggcaatcgcctcggctaacgtgggaggaactggaggtgggtttggggtagcatcccgtcccccagaagttcctgctgcgtcttgtcctcgagtcctggtcggcatctgtggcaaaaacatttgaagtaaacataatgtgccagagaaaaccttccattttacattactataaaaagtaatgatacagactcgatattacataacaggatacaatacccactatacaaaggttcaacctaatatacaacagtacaccctacaataccctaccatacactactctacttctattacacctttattcctacttgccattactcttggcggcttcatcgtcaggtgtgggagtccagacatcaaccaacctcaaagaaggagggggctcaaaaaggtctaactccccacccagtgcacgtcccgcaacgtgagatggtccagcttccgcctcaggttgtgcaggctcacttgggtgtaattgtgagtataatacatggacttcctcgtgcaacgtattgcagtaaacctgcaggttatcaacagtcgagctaagttctttaactcgggcctgagcccttgcttccttagcacacattagcaaacgagactgtacagcccagtcaagtgctaagtctcgatcagcgagttgatcctgcaagtgtcggatgtcccttctcagttcattgattctgtctccgtcggcaacccaagcatcggtcctctgttgaagagctgcttgaagtcgactcacacgagcttcaaggtctccgatggggtcgttacttccactgctgctactttcatgtcggggagccaattgatgccgaggcaccccaattggtcccgtagacttgcgtgccgttagcctggtacgtggcggcatcttttctaagggggaaaatgttattagaatagtgcttagcatgatgcatgtataattacagaatcaaccttagtcgattcaaccttctatatgttgcactcttcctatctggtctttaagatagactcttcagaatacttaggtaagaagagagaagaatttttaggtaagacttttgaaaatccttttgaagatgcctcataatatctgcaaagcagggctacgctccgataccagctgtgacggaacctcccaagtaattaggcccacctacagttgtccttgtccaacggacttcagacaaccctgtaggtgcccctgaactacttgacaagtttcggtatctttccttaccttaccaggaacgtttcacccgtcttgcagacattacagaacatcggagataaagaaatgcggaagcgaattacataatcttacatttatttcaaaaacaagcttgagttatgttattacagaccagactaacagtgagtgcagagtagtaatataatacaaaccagggaggcacaaactcctcctgagaagttataaacaaagatcctaagtggaggac

SEQ ID NO: 66585 - DNA, 959 bp, Zea Mays
atggcgcgctccgcctccgcgacggcccccctctcctgcgccattgaccctgccatggttctctctcacaagttccccgaggtcgcgtacgagtacgatgagaggtcgttgccacccacgatctgctcgatggaacgtcccaatggttgctctgaaagtcggaatggctgatgcatgtttcacttggttggtgcagggatgtagcgctgtacgcgctggtggtgggagcttgcaacgcagatgcagccgatgagaaggagcttcagctggtgtaccacagggatggccagtcctccattaaggttttacctacttttatttctgcacttaatgcaaaaactggcgatcggttttacatggatgtccctggccttcactatgatccaacacttttactgcatggtcagcaatatatagagatatataaaccaattccttcacgagctaatgttgctaacaaaattaaaatagctggtttgcatgaccgagggaaggccgctattcttgaagttgaaacactaacctgtcttgaaggttctggtgaagttttgtgtatgaataggagtactatctatttgcgtggtgctggtggcttctccaactcttcacaaccgttctcatatgccacttatccttctaatgaggtttccaatgttacattttcagattccacaccttttgctgtgtatgaagatcgcattcagaaatcccagcctctccgcatttacaggacaaggcttgcctcggtttatattttcttagacctcactcatgtgggagtccggcattggatctgcctttatttatagcgaacatgcaggagagctgcttatctttatatttccattatttgtacacttgttggaacacaactcttctttgtagtttgatttgttttgttattacatttagctgcgccatttttctctagtcaaatttgacacacaacttcagattag

SEQ ID NO: 66586 - DNA, 2790 bp, Zea Mays
taatccgccattcaaacgagattagcacaaaaaaaaaacaataaacaaacagaggaagcagcgcagtcggaggcagtgaggtgagctcgccctcctgctcctgctcctgctcccgcagctgcgctgtgctgccatcgctttcccctcctcccagtcccacccccagattcgcatgcgcgcttccctctccaccgccacaggcacagcgtcagcgcctagcttagccagctcgccgccgcaatggcgaccgcgtcggaggacgaggccgcctcggaccgctgcagcggcagctacagccccagcgccgatgtcagcgagtccgagacctccagcgactgctccgcgcccaccacccgccgcttcgcctcctcttcctccgcctccgcctccgcctccgccaccgtctcccgccgcctcgcgtcctcctcctcgtcgctgcccaccccggcatcggccgccgccttctacctctccaagccaccctcctccgacctctccgagatcgacatgatgaaggagcgcttcgccaaactcctgctcggcgaggacatgtccggcagcggcaagggcgtctgcaccgcgctcgccatctccaacgccatcaccaacctctccgccaccgtgttcggcgagctgtggaggctggagccgctcgcgaaggcgaggaaggcgatgtggacgcgggagatggagtggttgctctccgtctccgactccatcgtcgagctcaccccctccatccaggagctccccgaaggcggcggccagttcgaggtcatggtcccgcgcccgcgcaccgacctctacatgaacctccccgcgctcaagaaactcgacgccatgctcctcgccatgattgacgggttcaaggggacggagttctggtacgtggacaggggggttatggtcgaagacagcggggggccattcccgtcctcctcctcgtcatcgtcttgtggccggccgtcggtgcggcaggaggagaagtggtggttgccctgcccacgagtgccacccaaggggctgtccgaggattcgaggaggaagctgcagcaaagcagggattgtgcaaaccagatactgaaagcagccatggcgattaacagcgatgtgctcgcagagatggaaatccccgaaatgtacctggagacactgcccaagagtggtaaatcttgcttgggtgagataatttaccgatacataacagctgagcagttctcaccagaatgtctactggattgcttggatctatcatcggaacaccacacactcgaagtggcaaacagaatagaagctgccatccatgtttggaaactgaaaggccaaaaaaattcgacacctcaagccagatcaaagaaatcttggggtggaaaagtgaagggtcttgtcggagataaggaaaagagccacactttgtctgaaagagctaatggtctattgcagagcctaagattgagatatcctggtctgccacaaacctcccttgacatgaacaagatccagtataacaaggatgttgggcagtccatacttgaaagttactcaagggttctggagagcttggcatttaacataattgcaagaattgatgatgtgatatatgttgatgatgctacaaagaaatctgctgctgccgagtctgtttcgatcttcaatcgtggcaccggtgtgccaattcagaagaggatctctctaagcccattctctattcagaatacgccatatgcctctccattcgcaacacccactttctgctcctccaccccagttacatgcagccctggaagagtacagcccccgttaaacaaaaccaatctaggaaggccagaaatcaaggtcgagaagcttttttctggtgatctagagaaggtctggacatatgctggaaacctgagcgctaggaaagacgctggcgatgctcccgagagagactgatgggcgatggaggaaggtagacttgttatggaaacattatcgctatttagcagcgtactcgttcgtgtttatactgcgaggctgggttcatcagcaagtgactgaattcctcctgctgctgctgctgctgctgctttttgtcgctgaagacccagtttcctccggttcatctgccagtgagctctgcacagcagtcgactgcagaaaggcgatccagatgagatctagatgagaactagatgtgtcaaatgataaaacggtacgacatttgtatattgcgggtaatcaatccaattgacaaatcgtcagatcttttctctctttgctctgtactgtactatgactactatcgagggcttgaatgaacctctagagataattgttaacggctcaaattggctgtagctgttttaaacgcactagctaaattgttagttcgatctatcatctatgaggccattcccaataaaagttgcattgcacgtttctaaaagtgacacatcagcttatctataaaaccgtatatcctgagtttcatctggatgaaatcctctctcctataaaactctctccgcctctcttatcgtaaatactgtgttatgtcatcaaatattgtgatgtgtcatctcatttgatgataatttaatgagaataaaactataatgaaactccaactaggaatgacctaacttacaattagtttattaaccgggatagaggaactaaaatttggcaaaaagatggtattacttttatcttgagatgtaggagatctaactccatcgctcctctatagaaggctacgctggtctgaaccactgttcgagaattttggcaaaaaaggaaaaaaaaaga

SEQ ID NO: 66587 - DNA, 1704 bp, Zea Mays
catcatgttgtgcaggattttatatgcttctttttcgaaagcctgaatgtttctagtctaatcactttgttcttgagtggtaaatcttgcttgggtgagataatttaccgatacataacagctgagcagttctcaccagaatgtctactggattgcttggatctatcatcggaacaccacacactcgaagtggcaaacagaatagaagctgccatccatgtttggaaactgaaaggccaaaaaaattcgacacctcaagccagatcaaagaaatcttggggtggaaaagtgaagggtcttgtcggagataaggaaaagagccacactttgtctgaaagagctaatggtctattgcagagcctaagattgagatatcctggtctgccacaaacctcccttgacatgaacaagatccagtataacaaggatgttgggcagtccatacttgaaagttactcaagggttctggagagcttggcatttaacataattgcaagaattgatgatgtgatatatgttgatgatgctacaaagaaatctgctgctgccgagtctgtttcgatcttcaatcgtggcaccggtgtgccaattcagaagaggatctctctaagcccattctctattcagaatacgccatatgcctctccattcgcaacacccactttctgctcctccaccccagttacatgcagccctggaagagtacagcccccgttaaacaaaaccaatctaggaaggccagaaatcaaggtcgagaagcttttttctggtgatctagagaaggtctggacatatgctggaaacctgagcgctaggaaagacgctggcgatgctcccgagagagactgatgggcgatggaggaaggtagacttgttatggaaacattatcgctatttagcagcgtactcgttcgtgtttatactgcgaggctgggttcatcagcaagtgactgaattcctcctgctgctgctgctgctgctgctttttgtcgctgaagacccagtttcctccggttcatctgccagtgagctctgcacagcagtcgactgcagaaaggcgatccagatgagatctagatgagaactagatgtgtcaaatgataaaacggtacgacatttgtatattgcgggtaatcaatccaattgacaaatcgtcagatcttttctctctttgctctgtactgtactatgactactatcgagggcttgaatgaacctctagagataattgttaacggctcaaattggctgtagctgttttaaacgcactagctaaattgttagttcgatctatcatctatgaggccattcccaataaaagttgcattgcacgtttctaaaagtgacacatcagcttatctataaaaccgtatatcctgagtttcatctggatgaaatcctctctcctataaaactctctccgcctctcttatcgtaaatactgtgttatgtcatcaaatattgtgatgtgtcatctcatttgatgataatttaatgagaataaaactataatgaaactccaactaggaatgacctaacttacaattagtttattaaccgggatagaggaactaaaatttggcaaaaagatggtattacttttatcttgagatgtaggagatctaactccatcgctcctctatagaaggctacgctggtctgaaccactgttcgagaattttggcaaaaaaggaaaaaaaaaga

SEQ ID NO: 66588 - DNA, 2625 bp, Zea Mays
tgtgttgggccaatccagcctctcatctcatttctgtgtctttgggctgcgatcggatgatggacttaggcacacgtgactggtggactagacaggaaaatcccaagttacgacgacttccccgagacgacggcgtaacaaggggggaaaaaaggaaaggggatcgccatggcagcgtcgccgcagcagcaaggccagggcggccctggcagcggcgggtggactcccgagcagttctggtcgctgctggacaaggcggaccgccggttcgcccgggtgcgagacctgccctccttcggccgccaggagcccgacgagttcgccaaggccttccgcgcctacacccagctctggcggatgcagcaggagcaccgtcaccgtcttctcgacgcgggcctccgccgctggcaggtcggcgagatcgccgcccgcatcgcccacctctactacgcccagtaccagcgcaccgccgacaccgcgcttctctccgaggcgttcgtcttctaccacgccgtcctcgaccgcgcctacttccaggacgccgaccaccacctcgcccccgccaaacacctccgcttcctcgccaggatgccgaatacaaggagtggaagcatgtcgtgcaagagatcgcgaggttcctgcgagctgactcaccatttatgaacatgaggccgctcaggtacagctatgcattcgatccgcccccggacacgcttcgtactgtgccaactactgtcaagaagcgaggtctcgtcttaagtgacaccatactttgcagctactatcctaacgaggtcaaatttacagacctctccatagatgtattcagaatggttcagtgcctcgaatgggaaccatgtggttcatttgcgctaaacgatggttacagcgcccatgatgaaagtggacaaaatcaacccaatctattgaaagatttaagagatgctgcactgcccccgaatccacttaagacaattctctatcgcccttcggtaacacatttcctaacggtcctttccacaaaatgcgaggagcttccttcaaatggtatcatgttaatatatctttcagctacaggggagatgggaacttctggattttgtcctgatactggtgaaaatgttttgagcaactttaataagtttgacatatccagtcttagtcatactagttcaaaggaaaacaaagaaccttgtctatggttaggctgccgtgaaactgaaggttcaaattgcatataccctggtgatctaatcccatttacaagaagacctctatttttggtgattgacagtagcaccagctatgcattcaaggcagtctattcatggtactgaaaggggggagacttctgccatgctactttcaccaagttcccgatcttccgctgcgggattcagtggcgattctactcggcacagtggtagccaatttactatgttcctcacatctccattgcaagctttctgccttctgcttggcaacaatgggacagatattgacagggatgcatataacaaagctgaggagttattattattgtccctaaatgaatgggctgcgactttagttgcatcatcttcacttcattctatttgggttgaagttttaggcgacccgctcctaagaaggttacttctcaggttcatcttctgccgagcaactcattccctgttcaaaccaacaaaccataagacagagttccttccgacctgcatgcctcctttgcctgagtctgttgatgcagagagcatgctctcccaaagctgtgtgctgcgagtcgcatcattctttggcgctgccagtcagttctcatttgctgaggttaccacatggcctgatgttgactctgaggaggctgttgtcaccagttcatctggcagtgccaacaaaggtgtgcctgagacagccagagattcagacatttcaaactcatcatcatctttttgatgcgaccatggcgctaccttcgtccgcttgtgttatttacttatctgcatatgcggatccatttgtaattactggtgctcctttatgcttgatttacacatcatgcagaactgccttgcctttttgtttcctggttacttactgaattaatagtcactagaacatttttttatcccttagtttggaggtgtggaggagctgtgtgagaaagtgtggttgaagagtgttgtttcgttactgtccatggctcggtagaatgtattccctcggtcatttcggtttttctatgtatgttttctatacaccttggtatacattagattagatacataataaaagttatatatgtaaaaaagacaaaatggcatctaatttagaacggaaggaatattatgcaatatttttgttagattaccgtgtttattcttaatataatgggccttggtttagcccatgttatagatatagtcctttagtccagcatggtccaagcacaaaaaggtccgacacatttaaattaaatttcgggctgataatggtccataattgttataggctatgtcggcctagtccatgggtttagttctcgacccacgacatattatgtgttagaccttttttttttgcaacccgaaattataaatagcctaaaattcacattagatctcgaaatcc

SEQ ID NO: 66589 - DNA, 2694 bp, Zea Mays
ccagcctctcatctcatttctgtgtctttgggctgcgatcggatgatggacttaggcacacgtgactggtggactagacaggaaaatcccaagttacgacgacttccccgagacgacggcgtaacaaggggggaaaaaaggaaaggggatcgccatggcagcgtcgccgcagcagcaaggccagggcggccctggcagcggcgggtggactcccgagcagttctggtcgctgctggacaaggcggaccgccggttcgcccgggtgcgagacctgccctccttcggccgccaggagcccgacgagttcgccaaggccttccgcgcctacacccagctctggcggatgcagcaggagcaccgtcaccgtcttctcgacgcgggcctccgccgctggcaggtcggcgagatcgccgcccgcatcgcccacctctactacgcccagtaccagcgcaccgccgacaccgcgcttctctccgaggcgttcgtcttctaccacgccgtcctcgaccgcgcctacttccaggacgccgaccaccacctcgcccccgccaaacacctccgcttcctcgccaggttcctcctcgtcgcactcctgctcggcaggcgttcgcacaccgtcccgcgtctcgcctcggacatacgcacgctcttagatgactccaaaaagtccttccaggatgccgaatacaaggagtggaagcatgtcgtgcaagagatcgcgaggttcctgcgagctgactcaccatttatgaacatgaggccgctcaggtacagctatgcattcgatccgcccccggacacgcttcgtactgtgccaactactgtcaagaagcgaggtctcgtcttaagtgacaccatactttgcagctactatcctaacgaggtcaaatttacagacctctccatagatgtattcagaatggttcagtgcctcgaatgggaaccatgtggttcatttgcgctaaacgatggttacagcgcccatgatgaaagtggacaaaatcaacccaatctattgaaagatttaagagatgctgcactgcccccgaatccacttaagacaattctctatcgcccttcggtaacacatttcctaacggtcctttccacaaaatgcgaggagcttccttcaaatggtatcatgttaatatatctttcagctacaggggagatgggaacttctggattttgtcctgatactggtgaaaatgttttgagcaactttaataagtttgacatatccagtcttagtcatactagttcaaaggaaaacaaagaaccttgtctatggttaggctgccgtgaaactgaaggttcaaattgcatataccctggtgatctaatcccatttacaagaagacctctatttttggtgattgacagtagcaccagctatgcattcaagtctattcatggtactgaaaggggggagacttctgccatgctactttcaccaagttcccgatcttccgctgcgggattcagtggcgattctactcggcacagtggtagccaatttactatgttcctcacatctccattgcaagctttctgccttctgcttggcaacaatgggacagatattgacaggctgaggagttattattattgtccctaaatgaatgggctgcgactttagttgcatcatcttcacttcattctatttgggttgaagttttaggcgacccgctcctaagaaggttacttctcaggttcatcttctgccgagcaactcattccctgttcaaaccaacaaaccataagacagagttccttccgacctgcatgcctcctttgcctgagtctgttgatgcagagagcatgctctcccaaagctgtgtgctgcgagtcgcatcattctttggcgctgccagtcagttctcatttgctgaggttaccacatggcctgatgttgactctgaggaggctgttgtcaccagttcatctggcagtgccaacaaaggtgtgcctgagacagccagagattcagacatttcaaactcatcatcatctttttgatgcgaccatggcgctaccttcgtccgcttgtgttatttacttatctgcatatgcggatccatttgtaattactggtgctcctttatgcttgatttacacatcatgcagaactgccttgcctttttgtttcctggttacttactgaattaatagtcactagaacatttttttatcccttagtttggaggtgtggaggagctgtgtgagaaagtgtggttgaagagtgttgtttcgttactgtccatggctcggtagaatgtattccctcggtcatttcggtttttctatgtatgttttctatacaccttggtatacattagattagatacataataaaagttatatatgtaaaaaagacaaaatggcatctaatttagaacggaaggaatattatgcaatatttttgttagattaccgtgtttattcttaatataatgggccttggtttagcccatgttatagatatagtcctttagtccagcatggtccaagcacaaaaaggtccgacacatttaaattaaatttcgggctgataatggtccataattgttataggctatgtcggcctagtccatgggtttagttctcgacccacgacatattatgtgttagaccttttttttttgcaacccgaaattataaatagcctaaaattcacattagatctcgaaatcc

SEQ ID NO: 66590 - DNA, 2577 bp, Zea Mays
ccagcctctcatctcatttctgtgtctttgggctgcgatcggatgatggacttaggcacacgtgactggtggactagacaggaaaatcccaagttacgacgacttccccgagacgacggcgtaacaaggggggaaaaaaggaaaggggatcgccatggcagcgtcgccgcagcagcaaggccagggcggccctggcagcggcgggtggactcccgagcagttctggtcgctgctggacaaggcggaccgccggttcgcccgggtgcgagacctgccctccttcggccgccaggagcccgacgagttcgccaaggccttccgcgcctacacccagctctggcggatgcagcaggagcaccgtcaccgtcttctcgacgcgggcctccgccgctggcaggtcggcgagatcgccgcccgcatcgcccacctctactacgcccagtaccagcgcaccgccgacaccgcgcttctctccgaggcgttcgtcttctaccacgccgtcctcgaccgcgcctacttccaggacgccgaccaccacctcgcccccgccaaacacctccgcttcctcgccaggttcctcctcgtcgcactcctgctcggcaggcgttcgcacaccgtcccgcgtctcgcctcggacatacgcacgctcttagatgactccaaaaagtccttccaggatgccgaatacaaggagtggaagcatgtcgtgcaagagatcgcgaggttcctgcgagctgactcaccatttatgaacatgaggccgctcaggtacagctatgcattcgatccgcccccggacacgcttcgtactgtgccaactactgtcaagaagcgaggtctcgtcttaagtgacaccatactttgcagctactatcctaacgaggtcaaatttacagacctctccatagatgtattcagaatggttcagtgcctcgaatgggaaccatgtggttcatttgcgctaaacgatggttacagcgcccatgatgaaagtggacaaaatcaacccaatctattgaaagatttaagagatgctgcactgcccccgaatccacttaagacaattctctatcgcccttcggtaacacatttcctaacggtcctttccacaaaatgcgaggagcttccttcaaatggtatcatgttaatatatctttcagctacaggggagatgggaacttctggattttgtcctgatactggtgaaaatgttttgagcaactttaataagtttgacatatccagtcttagtcatactagttcaaaggaaaacaaagaaccttgtctatggttaggctgccgtgaaactgaaggttcaaattgcatataccctggtgatctaatcccatttacaagaagacctctatttttggtgattgacagtagcaccagctatgcattcaaggcagtctattcatggtactgaaaggggggagacttctgccatgctactttcaccaagttcccgatcttccgctgcgggattcagtggcgattctactcggcacagtggtagccaatttactatgttcctcacatctccattgcaagctttctgccttctgcttggcaacaatgggacagatattgacagggttcatcttctgccgagcaactcattccctgttcaaaccaacaaaccataagacagagttccttccgacctgcatgcctcctttgcctgagtctgttgatgcagagagcatgctctcccaaagctgtgtgctgcgagtcgcatcattctttggcgctgccagtcagttctcatttgctgaggttaccacatggcctgatgttgactctgaggaggctgttgtcaccagttcatctggcagtgccaacaaaggtgtgcctgagacagccagagattcagacatttcaaactcatcatcatctttttgatgcgaccatggcgctaccttcgtccgcttgtgttatttacttatctgcatatgcggatccatttgtaattactggtgctcctttatgcttgatttacacatcatgcagaactgccttgcctttttgtttcctggttacttactgaattaatagtcactagaacatttttttatcccttagtttggaggtgtggaggagctgtgtgagaaagtgtggttgaagagtgttgtttcgttactgtccatggctcggtagaatgtattccctcggtcatttcggtttttctatgtatgttttctatacaccttggtatacattagattagatacataataaaagttatatatgtaaaaaagacaaaatggcatctaatttagaacggaaggaatattatgcaatatttttgttagattaccgtgtttattcttaatataatgggccttggtttagcccatgttatagatatagtcctttagtccagcatggtccaagcacaaaaaggtccgacacatttaaattaaatttcgggctgataatggtccataattgttataggctatgtcggcctagtccatgggtttagttctcgacccacgacatattatgtgttagaccttttttttttgcaacccgaaattataaatagcctaaaattcacattagatctcgaaatcc

SEQ ID NO: 66591 - DNA, 2698 bp, Zea Mays
ccagcctctcatctcatttctgtgtctttgggctgcgatcggatgatggacttaggcacacgtgactggtggactagacaggaaaatcccaagttacgacgacttccccgagacgacggcgtaacaaggggggaaaaaaggaaaggggatcgccatggcagcgtcgccgcagcagcaaggccagggcggccctggcagcggcgggtggactcccgagcagttctggtcgctgctggacaaggcggaccgccggttcgcccgggtgcgagacctgccctccttcggccgccaggagcccgacgagttcgccaaggccttccgcgcctacacccagctctggcggatgcagcaggagcaccgtcaccgtcttctcgacgcgggcctccgccgctggcaggtcggcgagatcgccgcccgcatcgcccacctctactacgcccagtaccagcgcaccgccgacaccgcgcttctctccgaggcgttcgtcttctaccacgccgtcctcgaccgcgcctacttccaggacgccgaccaccacctcgcccccgccaaacacctccgcttcctcgccaggttcctcctcgtcgcactcctgctcggcaggcgttcgcacaccgtcccgcgtctcgcctcggacatacgcacgctcttagatgactccaaaaagtccttccaggatgccgaatacaaggagtggaagcatgtcgtgcaagagatcgcgaggttcctgcgagctgactcaccatttatgaacatgaggccgctcaggtacagctatgcattcgatccgcccccggacacgcttcgtactgtgccaactactgtcaagaagcgaggtctcgtcttaagtgacaccatactttgcagctactatcctaacgaggtcaaatttacagacctctccatagatgtattcagaatggttcagtgcctcgaatgggaaccatgtggttcatttgcgctaaacgatggttacagcgcccatgatgaaagtggacaaaatcaacccaatctattgaaagatttaagagatgctgcactgcccccgaatccacttaagacaattctctatcgcccttcggtaacacatttcctaacggtcctttccacaaaatgcgaggagcttccttcaaatggtatcatgttaatatatctttcagctacaggggagatgggaacttctggattttgtcctgatactggtgaaaatgttttgagcaactttaataagtttgacatatccagtcttagtcatactagttcaaaggaaaacaaagaaccttgtctatggttaggctgccgtgaaactgaaggttcaaattgcatataccctggtgatctaatcccatttacaagaagacctctatttttggtgattgacagtagcaccagctatgcattcaaggcagtctattcatggtactgaaaggggggagacttctgccatgctactttcaccaagttcccgatcttccgctgcgggattcagtggcgattctactcggcacagtggtagccaatttactatgttcctcacatctccattgcaagctttctgccttctgcttggcaacaatgggacagatattgacaggctgaggagttattattattgtccctaaatgaatgggctgcgactttagttgcatcatcttcacttcattctatttgggttgaagttttaggcgacccgctcctaagaaggttacttctcaggttcatcttctgccgagcaactcattccctgttcaaaccaacaaaccataagacagagttccttccgacctgcatgcctcctttgcctgagtctgttgatgcagagagcatgctctcccaaagctgtgtgctgcgagtcgcatcattctttggcgctgccagtcagttctcatttgctgaggttaccacatggcctgatgttgactctgaggaggctgttgtcaccagttcatctggcagtgccaacaaaggtgtgcctgagacagccagagattcagacatttcaaactcatcatcatctttttgatgcgaccatggcgctaccttcgtccgcttgtgttatttacttatctgcatatgcggatccatttgtaattactggtgctcctttatgcttgatttacacatcatgcagaactgccttgcctttttgtttcctggttacttactgaattaatagtcactagaacatttttttatcccttagtttggaggtgtggaggagctgtgtgagaaagtgtggttgaagagtgttgtttcgttactgtccatggctcggtagaatgtattccctcggtcatttcggtttttctatgtatgttttctatacaccttggtatacattagattagatacataataaaagttatatatgtaaaaaagacaaaatggcatctaatttagaacggaaggaatattatgcaatatttttgttagattaccgtgtttattcttaatataatgggccttggtttagcccatgttatagatatagtcctttagtccagcatggtccaagcacaaaaaggtccgacacatttaaattaaatttcgggctgataatggtccataattgttataggctatgtcggcctagtccatgggtttagttctcgacccacgacatattatgtgttagaccttttttttttgcaacccgaaattataaatagcctaaaattcacattagatctcgaaatcc

SEQ ID NO: 66592 - DNA, 2697 bp, Zea Mays
ccagcctctcatctcatttctgtgtctttgggctgcgatcggatgatggacttaggcacacgtgactggtggactagacaggaaaatcccaagttacgacgacttccccgagacgacggcgtaacaaggggggaaaaaaggaaaggggatcgccatggcagcgtcgccgcagcagcaaggccagggcggccctggcagcggcgggtggactcccgagcagttctggtcgctgctggacaaggcggaccgccggttcgcccgggtgcgagacctgccctccttcggccgccaggagcccgacgagttcgccaaggccttccgcgcctacacccagctctggcggatgcagcaggagcaccgtcaccgtcttctcgacgcgggcctccgccgctggcaggtcggcgagatcgccgcccgcatcgcccacctctactacgcccagtaccagcgcaccgccgacaccgcgcttctctccgaggcgttcgtcttctaccacgccgtcctcgaccgcgcctacttccaggacgccgaccaccacctcgcccccgccaaacacctccgcttcctcgccaggttcctcctcgtcgcactcctgctcggcaggcgttcgcacaccgtcccgcgtctcgcctcggacatacgcacgctcttagatgactccaaaaagtccttccaggatgccgaatacaaggagtggaagcatgtcgtgcaagagatcgcgaggttcctgcgagctgactcaccatttatgaacatgaggccgctcaggtacagctatgcattcgatccgcccccggacacgcttcgtactgtgccaactactgtcaagaagcgaggtctcgtcttaagtgacaccatactttgcagctactatcctaacgagacctctccatagatgtattcagaatggttcagtgcctcgaatgggaaccatgtggttcatttgcgctaaacgatggttacagcgcccatgatgaaagtggacaaaatcaacccaatctattgaaagatttaagagatgctgcactgcccccgaatccacttaagacaattctctatcgcccttcggtaacacatttcctaacggtcctttccacaaaatgcgaggagcttccttcaaatggtatcatgttaatatatctttcagctacaggggagatgggaacttctggattttgtcctgatactggtgaaaatgttttgagcaactttaataagtttgacatatccagtcttagtcatactagttcaaaggaaaacaaagaaccttgtctatggttaggctgccgtgaaactgaaggttcaaattgcatataccctggtgatctaatcccatttacaagaagacctctatttttggtgattgacagtagcaccagctatgcattcaagtctattcatggtactgaaaggggggagacttctgccatgctactttcaccaagttcccgatcttccgctgcgggattcagtggcgattctactcggcacagtggtagccaatttactatgttcctcacatctccattgcaagctttctgccttctgcttggcaacaatgggacagatattgacagggatgcatataacaaagctgaggagttattattattgtccctaaatgaatgggctgcgactttagttgcatcatcttcacttcattctatttgggttgaagttttaggcgacccgctcctaagaaggttacttctcaggttcatcttctgccgagcaactcattccctgttcaaaccaacaaaccataagacagagttccttccgacctgcatgcctcctttgcctgagtctgttgatgcagagagcatgctctcccaaagctgtgtgctgcgagtcgcatcattctttggcgctgccagtcagttctcatttgctgaggttaccacatggcctgatgttgactctgaggaggctgttgtcaccagttcatctggcagtgccaacaaaggtgtgcctgagacagccagagattcagacatttcaaactcatcatcatctttttgatgcgaccatggcgctaccttcgtccgcttgtgttatttacttatctgcatatgcggatccatttgtaattactggtgctcctttatgcttgatttacacatcatgcagaactgccttgcctttttgtttcctggttacttactgaattaatagtcactagaacatttttttatcccttagtttggaggtgtggaggagctgtgtgagaaagtgtggttgaagagtgttgtttcgttactgtccatggctcggtagaatgtattccctcggtcatttcggtttttctatgtatgttttctatacaccttggtatacattagattagatacataataaaagttatatatgtaaaaaagacaaaatggcatctaatttagaacggaaggaatattatgcaatatttttgttagattaccgtgtttattcttaatataatgggccttggtttagcccatgttatagatatagtcctttagtccagcatggtccaagcacaaaaaggtccgacacatttaaattaaatttcgggctgataatggtccataattgttataggctatgtcggcctagtccatgggtttagttctcgacccacgacatattatgtgttagaccttttttttttgcaacccgaaattataaatagcctaaaattcacattagatctcgaaatcc

SEQ ID NO: 66593 - DNA, 2714 bp, Zea Mays
ccagcctctcatctcatttctgtgtctttgggctgcgatcggatgatggacttaggcacacgtgactggtggactagacaggaaaatcccaagttacgacgacttccccgagacgacggcgtaacaaggggggaaaaaaggaaaggggatcgccatggcagcgtcgccgcagcagcaaggccagggcggccctggcagcggcgggtggactcccgagcagttctggtcgctgctggacaaggcggaccgccggttcgcccgggtgcgagacctgccctccttcggccgccaggagcccgacgagttcgccaaggccttccgcgcctacacccagctctggcggatgcagcaggagcaccgtcaccgtcttctcgacgcgggcctccgccgctggcaggtcggcgagatcgccgcccgcatcgcccacctctactacgcccagtaccagcgcaccgccgacaccgcgcttctctccgaggcgttcgtcttctaccacgccgtcctcgaccgcgcctacttccaggacgccgaccaccacctcgcccccgccaaacacctccgcttcctcgccaggttcctcctcgtcgcactcctgctcggcaggcgttcgcacaccgtcccgcgtctcgcctcggacatacgcacgctcttagatgactccaaaaagtccttccaggatgccgaatacaaggagtggaagcatgtcgtgcaagagatcgcgaggttcctgcgagctgactcaccatttatgaacatgaggccgctcaggtacagctatgcattcgatccgcccccggacacgcttcgtactgtgccaactactgtcaagaagcgaggtctcgtcttaagtgacaccatactttgcagctactatcctaacgaggtcaaatttacagacctctccatagatgtattcagaatggttcagtgcctcgaatgggaaccatgtggttcatttgcgctaaacgatggttacagcgcccatgatgaaagtggacaaaatcaacccaatctattgaaagatttaagagatgctgcactgcccccgaatccacttaagacaattctctatcgcccttcggtaacacatttcctaacggtcctttccacaaaatgcgaggagcttccttcaaatggtatcatgttaatatatctttcagctacaggggagatgggaacttctggattttgtcctgatactggtgaaaatgttttgagcaactttaataagtttgacatatccagtcttagtcatactagttcaaaggaaaacaaagaaccttgtctatggttaggctgccgtgaaactgaaggttcaaattgcatataccctggtgatctaatcccatttacaagaagacctctatttttggtgattgacagtagcaccagctatgcattcaaggcagtctattcatggtactgaaaggggggagacttctgccatgctactttcaccaagttcccgatcttccgctgcgggattcagtggcgattctactcggcacagtggtagccaatttactatgttcctcacatctccattgcaagctttctgccttctgcttggcaacaatgggacagatattgacagggatgcatataacaaagctgaggagttattattattgtccctaaatgaatgggctgcgactttagttgcatcatcttcacttcattctatttgggttgaagttttaggcgacccgctcctaagaaggttacttctcaggttcatcttctgccgagcaactcattccctgttcaaaccaacaaaccataagacagagttccttccgacctgcatgcctcctttgcctgagtctgttgatgcagagagcatgctctcccaaagctgtgtgctgcgagtcgcatcattctttggcgctgccagtcagttctcatttgctgaggttaccacatggcctgatgttgactctgaggaggctgttgtcaccagttcatctggcagtgccaacaaaggtgtgcctgagacagccagagattcagacatttcaaactcatcatcatctttttgatgcgaccatggcgctaccttcgtccgcttgtgttatttacttatctgcatatgcggatccatttgtaattactggtgctcctttatgcttgatttacacatcatgcagaactgccttgcctttttgtttcctggttacttactgaattaatagtcactagaacatttttttatcccttagtttggaggtgtggaggagctgtgtgagaaagtgtggttgaagagtgttgtttcgttactgtccatggctcggtagaatgtattccctcggtcatttcggtttttctatgtatgttttctatacaccttggtatacattagattagatacataataaaagttatatatgtaaaaaagacaaaatggcatctaatttagaacggaaggaatattatgcaatatttttgttagattaccgtgtttattcttaatataatgggccttggtttagcccatgttatagatatagtcctttagtccagcatggtccaagcacaaaaaggtccgacacatttaaattaaatttcgggctgataatggtccataattgttataggctatgtcggcctagtccatgggtttagttctcgacccacgacatattatgtgttagaccttttttttttgcaacccgaaattataaatagcctaaaattcacattagatctcgaaatcc

SEQ ID NO: 66594 - DNA, 1356 bp, Zea Mays
ttccttttctggcctacctcaacttgcttgggactaaagggctggtcactgtctattcatggtactgaaaggggggagacttctgccatgctactttcaccaagttcccgatcttccgctgcgggattcagtggcgattctactcggcacagtggtagccaatttactatgttcctcacatctccattgcaagctttctgccttctgcttggcaacaatgggacagatattgacagggatgcatataacaaagctgaggagttattattattgtccctaaatgaatgggctgcgactttagttgcatcatcttcacttcattctatttgggttgaagttttaggcgacccgctcctaagaaggttacttctcaggttcatcttctgccgagcaactcattccctgttcaaaccaacaaaccataagacagagttccttccgacctgcatgcctcctttgcctgagtctgttgatgcagagagcatgctctcccaaagctgtgtgctgcgagtcgcatcattctttggcgctgccagtcagttctcatttgctgaggttaccacatggcctgatgttgactctgaggaggctgttgtcaccagttcatctggcagtgccaacaaaggtgtgcctgagacagccagagattcagacatttcaaactcatcatcatctttttgatgcgaccatggcgctaccttcgtccgcttgtgttatttacttatctgcatatgcggatccatttgtaattactggtgctcctttatgcttgatttacacatcatgcagaactgccttgcctttttgtttcctggttacttactgaattaatagtcactagaacatttttttatcccttagtttggaggtgtggaggagctgtgtgagaaagtgtggttgaagagtgttgtttcgttactgtccatggctcggtagaatgtattccctcggtcatttcggtttttctatgtatgttttctatacaccttggtatacattagattagatacataataaaagttatatatgtaaaaaagacaaaatggcatctaatttagaacggaaggaatattatgcaatatttttgttagattaccgtgtttattcttaatataatgggccttggtttagcccatgttatagatatagtcctttagtccagcatggtccaagcacaaaaaggtccgacacatttaaattaaatttcgggctgataatggtccataattgttataggctatgtcggcctagtccatgggtttagttctcgacccacgacatattatgtgttagaccttttttttttgcaacccgaaattataaatagcctaaaattcacattagatctcgaaatcc

SEQ ID NO: 66595 - DNA, 525 bp, Zea Mays
cccgcggtacgtgccctccttctcgcgctcctaaacaatcgcccggcctcctccccttccattctaggctccgcgtctcgctgtccccactccgtctcctccggctccgtctcatcccgatgccgctccttctcatcgtcgtcgtcccagtcccggagtcgctcccctcctctggctaagcgcagccttgatgtgtcggcaactggagtatttggtacgagactgcttgatccagataattttattacacttcaggcgtggcttgtgtgttcagactactactgttgaatacagttacaattggtccttgtggccctcaacagtttggatgctgtcattcagcattgaacagagccagagtctgttcgcctggagcacggaaagacgatcaccttcacccccccctaaaaagggttcaccttcaaaaaaagtttgttcgccatcaccaccccctaaaaaggcttcaccccctaggtatataaaagttttcatacaaattgcatatgtttctctggctatgtttat

SEQ ID NO: 66596 - DNA, 1758 bp, Zea Mays
cccgcggtacgtgccctccttctcgcgctcctaaacaatcgcccggcctcctccccttccattctaggctccgcgtctcgctgtccccactccgtctcctccggctccgtctcatcccgatgccgctccttctcatcgtcgtcgtcccagtcccggagtcgctcccctcctctggctaagcgcagccttgatgtgtcggcaactggagtatttgttacaattggtccttgtggccctcaacagtttggatgctgtcattcagcattgaacagagccagagtctggtaacagtttttaatcatgttcttgataggatggatacatctgttaaatgtgtgaccctgcattcagaattcagatcgacacctttgattggttccaattccctgctgctggcttattatttaactttcctttttgcagtttctataatagcagagacatgcgctaaccagcatttgctaacccaatcaatttgttggcatcattttattgatcgaatccatcccgcctcatgcttttgcttcgccctgttaacatgtttttattgctgccgtgggctcttcgcaatttaaagttctctcgtatatgaagtcacatagttacatgacgtacattctacttgaacatggttgtttggtatttttctcatgaattgtaatgtttcttatgctggttctctttatcctgggtgcatttacttctggataatgttgtatgcctctgattacatatcgtccgactaatcgtgattagtcgcgattagtcggtctgatcggttgttagaactcgataaggtgtaacgattcgatcagggtagctgatcgtccttatcgtccgcctaatcgcgatttatagcgattaatcaccgcgttggtccatcagcggataggcctgatagtccaaaagccattttaggcttaaatgatgtctgggggaggccaaaggacgcccaatcccttcagatacagcctgggtagacgtgagcagtcagcagtcctttaaatgctgtttgggaggccaaaagccattttagacgtgagcagtcagcagcaccagccttctcccccattttagacgtgagcagtcagcagcagccttctccgccattttagtcgcgaaaaacagcagctgagcagtccaaccaaagatgagcagctcttctgaaggtatggatgttgtgctgcttttgcctgttctttactctttgttctctgctatcttcccccctctgttcttcattcctctttgttcagcaaggtctggactttggaggcagagctgctactaagatgtttgacgtcgcagatatgcatggacatcatggtgatggacgttgtgctgctgctgttcaagtcatcttcccgcagtcctctatactatataattatatatttatatatagtgttatatatgactatatgtctctatatatatcatatatgtcctggaatacacaggacgaccagggggacgattagggtcgatcaggggcgactaatcgccttgatcgatgcctaatcgcgactaatcgcctgatcgcccagtggcttcgatcaggcgatcagacgatctgaaaactatgttgtatgcccagttcgcctggagcacggaaagacgatcaccttcacccccccctaaaaagggttcaccttcaaaaaaagtttgttcgccatcaccaccccctaaaaaggcttcaccccctaggtatataaaagttttcatacaaattgcatatgtttctctggctatgtttat

SEQ ID NO: 66597 - DNA, 1185 bp, Zea Mays
gtgggttccgtccgcgggaaaaccggggtcaatggagtagccttaatttcaggcctttcaggaccgccggactcttctcttgctgctcacacccgccgctctctctgggcatcttgcccttgtggtctctgtttcctcaaattggaaacgaattcaatcatccaaccaaaaatcctgtaggttccttgccactcccgtcaagcgcacggggacatatgcttgccttgttagcaagcctgtagcactacgtctttgtcgcactaggtctcataaaagttcatccctcttcttgcttcctcggtttgtttcacgggattgttccatgccgaccaatttatctttgggctcactcgtcggaatcttcattggtgccttcatggggatgtctacagaaagcggcatgttccgcggggctggtgtcggagcagtctcgggagcagtcttctccattgaggctgttgagtcctgcatcgagatttggaggtccagccattcgggaaaatacagcattctctatgtgctggacatcatctctagcctcttcagcggaagaattgtgtgggagaaagtcagtccagcgctaccagcgtgcagtgcaaagccagatgagtctaatgagcacaccgttcatcgacaacaatgacctttttgaaactggcagtacaggaggcatgtcaagggctctgattgataggatcccaaagatgaggttcagtgctgcaagcaattgtgacaaggaaactgatagcagctgctgctcagtctgcctgcaggattttggagcacagcaatttgtgagggccctgcctcagtgccaacacatattccatgtgcggtgcatcgacaattggctccttcggcacgcatcctgcccactatgccgggccggcgttcatattgaccatatacatatgtaaataaactcgcagggtggcacctggtgtattttcatagtgaatacccgtgctcctgttggatatcacaagtatagctggatgtatacataggttttctcctttttttttgttacttctccggtcttatgtggggctatgctttcagctgcacgtttttgtcgaagtaatacctggattggctggatatgtacatcttgagaacggattgactaacaagctccctgaattatggtcctgtgtgcttcaaaaactgctttcaaaaagaaaa

SEQ ID NO: 66598 - DNA, 1224 bp, Zea Mays
caaacgttccgacctaaccacattccttccatcatttcatccttcccggtgcggctgcggccagatgcgtccaaattcctcatattttctctcctcccctggtcccttctcgttctcgcccgcgtaattcctctctggcgtctaccaaaagcggagcaaccgaggcaagaaaaaggggtgggcgaggaaaagcgattaggcttctcttccagttcctgattcagtctgagaaacaatggatatctgaagcatgaaaagtcaacccacctcactcttttaaacagttcggttaacacacttaatggctgcggtgtttgcatgacattctctttgagcttatatgggattctaaaccgaagcgatctttgagaaagaaatatcaggattcatcgactggaaacagaagacgatggcaatcgggtctagaagcaatggagaagaatgttagcatatctgtttctcttgaggggaatatctcttctattcccaattcaatagccaacgactctaaaacgtcaatggaaaacagggtagatacatcatttatcaaccatgcggctgaagcatgggctgagatgagaagacaatgggttggacgccaggcagaagttctgagaaagaccccccgagagccagtgataagttggtccacaacatacgatgatctcttgtcgacaagtgagcgttttccacaacgaatcccattatctgagatggttgattttttggttgacatatggcacgaagaagggctctatgattagctgacctctgcctttctttacgccttgcttttagaatgtggtcaacttcctccccacaaaatatgtgaccttcagaagaaatgaaaaaactacatactctatgaattagtcgcaacatttgaaattgaaaaaaaaaactctcatgtgaaaaggtacaacagtgggttggtatatttggtgatgagttatcaacggtttcttcatgttgaaggactcgatgacctgtcattcctgaatgaacgattgcttaagaatataagggggaagggcatttttttctcatatcatcattgtgatgttattggctagttcatgtctgaggaccctgaagtttttatcaacgttggtcatcaacttcaacatcttgcaatggattataatgcaataacaaaacttttaataccaactaagttggataggctagagttcaaaacctaaaggaacccacagtcatggtttg

SEQ ID NO: 66599 - DNA, 1149 bp, Zea Mays
aaacgttccgacctaaccacattccttccatcatttcatccttcccggtgcggctgcggccagatgcgtccaaattcctcatattttctctcctcccctggtcccttctcgttctcgcccgcgtaattcctctctggcgtctaccaaaagcggagcaaccgaggcaagaaaaaggggtgggcgaggaaaagcgattaggcttctcttccagttcctgattcagtctgagtggctgtattggtaatttaagcagatctcagtcacttccagattctaaaccgaagcgatctttgagaaagaaatatcaggattcatcgactggaaacagaagacgatggcaatcgggtctagaagcaatggagaagaatgttagcatatctgtttctcttgaggggaatatctcttctattcccaattcaatagccaacgactctaaaacgtcaatggaaaacagggtagatacatcatttatcaaccatgcggctgaagcatgggctgagatgagaagacaatgggttggacgccaggcagaagttctgagaaagaccccccgagagccagtgataagttggtccacaacatacgatgatctcttgtcgacaagtgagcgttttccacaacgaatcccattatctgagatggttgattttttggttgacatatggcacgaagaagggctctatgattagctgacctctgcctttctttacgccttgcttttagaatgtggtcaacttcctccccacaaaatatgtgaccttcagaagaaatgaaaaaactacatactctatgaattagtcgcaacatttgaaattgaaaaaaaaaactctcatgtgaaaaggtacaacagtgggttggtatatttggtgatgagttatcaacggtttcttcatgttgaaggactcgatgacctgtcattcctgaatgaacgattgcttaagaatataagggggaagggcatttttttctcatatcatcattgtgatgttattggctagttcatgtctgaggaccctgaagtttttatcaacgttggtcatcaacttcaacatcttgcaatggattataatgcaataacaaaacttttaataccaactaagttggataggctagagttcaaaacctaaaggaacccacagtcatggtttg

SEQ ID NO: 66600 - DNA, 1154 bp, Zea Mays
aaacgttccgacctaaccacattccttccatcatttcatccttcccggtgcggctgcggccagatgcgtccaaattcctcatattttctctcctcccctggtcccttctcgttctcgcccgcgtaattcctctctggcgtctaccaaaagcggagcaaccgaggcaagaaaaaggggtgggcgaggaaaagcgattaggcttctcttccagttcctgattcagtctgagagcagtggctgtattggtaatttaagcagatctcagtcacttccagattctaaaccgaagcgatctttgagaaagaaatatcaggattcatcgactggaaacagaagacgatggcaatcgggtctagaagcaatggagaagaatgttagcatatctgtttctcttgaggggaatatctcttctattcccaattcaatagccaacgactctaaaacgtcaatggaaaacagggtagatacatcatttatcaaccatgcggctgaagcatgggctgagatgagaagacaatgggttggacgccaggcagaagttctgagaaagaccccccgagagccagtgataagttggtccacaacatacgatgatctcttgtcgacaagtgagcgttttccacaacgaatcccattatctgagatggttgattttttggttgacatatggcacgaagaagggctctatgattagctgacctctgcctttctttacgccttgcttttagaatgtggtcaacttcctccccacaaaatatgtgaccttcagaagaaatgaaaaaactacatactctatgaattagtcgcaacatttgaaattgaaaaaaaaaactctcatgtgaaaaggtacaacagtgggttggtatatttggtgatgagttatcaacggtttcttcatgttgaaggactcgatgacctgtcattcctgaatgaacgattgcttaagaatataagggggaagggcatttttttctcatatcatcattgtgatgttattggctagttcatgtctgaggaccctgaagtttttatcaacgttggtcatcaacttcaacatcttgcaatggattataatgcaataacaaaacttttaataccaactaagttggataggctagagttcaaaacctaaaggaacccacagtcatggtttg

SEQ ID NO: 66601 - DNA, 1232 bp, Zea Mays
attctgaatttctcaccgtctaactgtaggtgcagctgtgatctcccaacgccatttcacggttcttcgtcaaccgtcatcgctttctccccctcccccgtctcttctccctcgagggaataagcccgccgcgtgaagcttcttcttgcatccgagtgcggaatcacctccaatctgcccctcgggccgccggcgccgatggagaagatgtgcagagggaggagaagaacgtggagaaagccatcagggaggctgccaagcgcaatgacatgggatctgcaaaggaacttgtaagatcaagacgtgctgttaatcgtctttatgagaacaaggctcaactaaattcagtatcaatgcaccttggagaaattgtcgcaactgcaagaacagtgggtcatctgtccaaaagcactgaagtgatgaaaattgttaacaatctaatgaaagctccagagttggctaccacgatgcaagaatttagcaaagaaatgaccaaggcaggtgtgatggaagagatggtgaacgaggcagttgattcagctttggactctgaggacatggaggaggaaatcgaagaggaggttgacaaggttcttgcttcagtagctggggagactgcctcccagctaccagatgctgccagaacacagaagatacatgaggcttcaacaagcagggttccagaagaacgacaagctgttgcagagggtgctgatgacgacgaggaagacctagaagagatcagggcacggcttgctaaagtgaggtcgtaaatcatatacatatctgagttttctaacctggggagcccatggctcacaaaatatggtgccaaaacccgtgtattgtgaactgagtcgatagcaatgcaattttttttttaattggccctcgagtcgaccatatatgaagtggcagtctattgttgtacaacgctacgagagtggcatggaatatcggaatatggatagcgaaatgcctctgatttcataaagcgatgtaaaatttattagcaggaaaacaaaacggctggataacagcgtctgccgttgaacaaatgcgtgtcccatctctagcccttcgttagcaatgttacgtgtaagaaaactgtgcacacgctggagctaaggctccgtgagccgtgatgttgctggtttcaacgtccagctgaactcgtttgctattgacttgttttgcctgcttataaaagacggatgaatacagtgtctttg

SEQ ID NO: 66602 - DNA, 1610 bp, Zea Mays
attctgaatttctcaccgtctaactgtaggtgcagctgtgatctcccaacgccatttcacggttcttcgtcaaccgtcatcgctttctccccctcccccgtctcttctccctcgagggaataagcccgccgcgtgaagcttcttcttgcatccgagtgcggaatcacctccaatctgcccctcgggccgccggcgccgatggagaaggtgaagaacatgctcaagccgcggccgacgccgcagcagcagctgcgcgagtggcagcgccgcctccgcaacgagtgccgcgtcctcgaccgtcagatccgaggtcctacccccgaacgcgcccgcatctccttcccttctcgtcccccacatctccttcccctggtctccaagggaactggcgatcgggctcgtgtggacgggtactaggtgtgattcaaggattggtggtcgggtgttgcttgttgctctggtttgcctcagaaatggccaaggcggtgatgcgattagccgagcgattctcccgaccctgggggctgtgcgccaaacccttaacccttacctgtaagtatttttgggtatgaattgtttttgcagatgtgcagagggaggagaagaacgtggagaaagccatcagggaggctgccaagcgcaatgacatgggatctgcaaaggaacttgtaagatcaagacgtgctgttaatcgtctttatgagaacaaggctcaactaaattcagtatcaatgcaccttggagaaattgtcgcaactgcaagaacagtgggtcatctgtccaaaagcactgaagtgatgaaaattgttaacaatctaatgaaagctccagagttggctaccacgatgcaagaatttagcaaagaaatgaccaaggcaggtgtgatggaagagatggtgaacgaggcagttgattcagctttggactctgaggacatggaggaggaaatcgaagaggaggttgacaaggttcttgcttcagtagctggggagactgcctcccagctaccagatgctgccagaacacagaagatacatgaggcttcaacaagcagggttccagaagaacgacaagctgttgcagagggtgctgatgacgacgaggaagacctagaagagatcagggcacggcttgctaaagtgaggtcgtaaatcatatacatatctgagttttctaacctggggagcccatggctcacaaaatatggtgccaaaacccgtgtattgtgaactgagtcgatagcaatgcaattttttttttaattggccctcgagtcgaccatatatgaagtggcagtctattgttgtacaacgctacgagagtggcatggaatatcggaatatggatagcgaaatgcctctgatttcataaagcgatgtaaaatttattagcaggaaaacaaaacggctggataacagcgtctgccgttgaacaaatgcgtgtcccatctctagcccttcgttagcaatgttacgtgtaagaaaactgtgcacacgctggagctaaggctccgtgagccgtgatgttgctggtttcaacgtccagctgaactcgtttgctattgacttgttttgcctgcttataaaagacggatgaatacagtgtctttg

SEQ ID NO: 66603 - DNA, 1343 bp, Zea Mays
attctgaatttctcaccgtctaactgtaggtgcagctgtgatctcccaacgccatttcacggttcttcgtcaaccgtcatcgctttctccccctcccccgtctcttctccctcgagggaataagcccgccgcgtgaagcttcttcttgcatccgagtgcggaatcacctccaatctgcccctcgggccgccggcgccgatggagaaggtgaagaacatgctcaagccgcggccgacgccgcagcagcagctgcgcgagtggcagcgccgcctccgcaacgagtgccgcgtcctcgaccgtcagatccgagatgtgcagagggaggagaagaacgtggagaaagccatcagggaggctgccaagcgcaatgacatgggatctgcaaaggctcttgctaaggaacttgtaagatcaagacgtgctgttaatcgtctttatgagaacaaggctcaactaaattcagtatcaatgcaccttggagaaattgtcgcaactgcaagaacagtgggtcatctgtccaaaagcactgaagtgatgaaaattgttaacaatctaatgaaagctccagagttggctaccacgatgcaagaatttagcaaagaaatgaccaaggtgtgatggaagagatggtgaacgaggcagttgattcagctttggactctgaggacatggaggaggaaatcgaagaggaggttgacaaggttcttgcttcagtagctggggagactgcctcccagctaccagatgctgccagaacacagaagatacatgaggcttcaacaagcagggttccagaagaacgacaagctgttgcagagggtgctgatgacgacgaggaagacctagaagagatcagggcacggcttgctaaagtgaggtcgtaaatcatatacatatctgagttttctaacctggggagcccatggctcacaaaatatggtgccaaaacccgtgtattgtgaactgagtcgatagcaatgcaattttttttttaattggccctcgagtcgaccatatatgaagtggcagtctattgttgtacaacgctacgagagtggcatggaatatcggaatatggatagcgaaatgcctctgatttcataaagcgatgtaaaatttattagcaggaaaacaaaacggctggataacagcgtctgccgttgaacaaatgcgtgtcccatctctagcccttcgttagcaatgttacgtgtaagaaaactgtgcacacgctggagctaaggctccgtgagccgtgatgttgctggtttcaacgtccagctgaactcgtttgctattgacttgttttgcctgcttataaaagacggatgaatacagtgtctttg

SEQ ID NO: 66604 - DNA, 2341 bp, Zea Mays
attagataccttctcgttataaaatttggtgtagtgaaagataaaagaggataggatcgatttcttccgtcccgacgattcgcagattttacattctgattttggacgattttggtagaagctattttcacggaatcggactccaaccgaagtgtttgagtggcagaagccgattcccacggtcggaatctggcaagccgaaacaaacaggctgactgggttggcttccggtttcggcgatggagtgcgcggcgaagggactggccgcggagccgtgcgccggcggcgtcgccgatcggcggtgcggcggctgcggagccgtcgcctactgctcccgcgtccaccagattatacattggagggttcacaaagaagaatgtgaaaggtttgcagaacaaatgaggcacatcaatgcgctgagccagtttccattcacattcttggaacctcctgctctgaaccatgaattcccaagtgcaaggtgcttatttttgcaatcaatcaaacttcaccaaaaaggactctggaaatctgaatgtatatgtggccgagatgttgctcctttgaagggcttaagcgtagaagctgaatggaacttgcaaagctccctctgcccttgtgcagagcctaaaaatcctgtgtcttcggccctggcaagctgggaagcatattatcagtggagatcccttcccctgcattcacctgttgctgttttacttcattggccacttactctatatcattgtgttcaactctctcggacccaaactccaagatatgatggtcaggacaccctatgcattcactatttagggcctgagaaggagctacttcagcttgcagcgtttggggaactacgtgcattgtttccaagtgtccagattcacattgagcttgtcggaccagaagttccaaagtccagggatggagaggttgtgaacatttccagatatgcatgttgttctgataagagttgctgttgtaaatcttctattggttccaaagacttgagttgcactgcagtgacactcaaactgtggaaaggtttctatcatgagagatgcagtgatatattgaaggttctctctacaattactcctattttctaaaaagatgtgaagttacccaccatattatagagccaagcatgtccttattgtaaagtttagaaagaatgttaatactggacaagctttcacatgcatcacacacagttctgtattgtctggtgctatacatagttgtaggtccagttaattctagaagtgctaagttatttacagtcttctgcttacgttgtatcttgtaagctcagctctccaataatcactggaatgtgtagaactcataactcatttcctagcaggtcgatttctgattttctgttaatttacaaacaaaagtatgaaaagaaaagagcaccatgccgctgctgcttgctggtggcccctaccagagctacagctagctttagcactgaaccatagacctaatgctatttttccaacagatctagagcgtgttctaccatttgagagatgatgacatgtcttgtttgaaactgataaaaatgatttactcaccagataattcagttggcaggattccgttccacaacttatttttgccccaaatgcgggtgtggctgcatatcctagttggatgccaactattgaaatgataaggcagactgggattcctgcaatctttacggacttctgtgaagaagctgcacatctagcatcctgctgcataagctccataactggtcaaccccttaaaattccaatccaggtaaatcctttcaggcagccagttgcagcggaaaacaatgcattatacgtaccatgttattcaaattgctttgtttttgggatgtaaaattgccctgtcaccaggaagtatatttagagattgatttgtcaagaaatggaatgtgaattttcaaagaagacaagggtgccattcctagaacatctgagatgggaggtttttatttctgagagatgatggaattaggatttaatgttggtacacttagaatttgagaagacaagttgcacaaatcaagaggaacactggaagggctaggaatagcatgtgtacaagccgactaggagaaaatgtattttatttgaacctctgaaaatatttagatactgcaattgtaagattttcgcatcaaccgattcttgaaatacactttttcataattgggagatgtatatgttttcttatggtggagctacatattatctaattttgttgttcacagcaatctggaggaccgagattgtaagaactgattttgattcataaaaacatagaccagtgttccatg

SEQ ID NO: 66605 - DNA, 2266 bp, Zea Mays
aggatcgatttcttccgtcccgacgattcgcagattttacattctgattttggacgattttggtagaagctattttcacggaatcggactccaaccgaagtgtttgagtggcagaagccgattcccacggtcggaatctggcaagccgaaacaaacaggctgactgggttggcttccggtttcggcgatggagtgcgcggcgaagggactggccgcggagccgtgcgccggcggcgtcgccgatcggcggtgcggcggctgcggagccgtcgcctactgctcccgcgtccaccagattatacattggagggttcacaaagaagaatgtgaaaggtttgcagaacaaatgaggcacatcaatgcgctgagccagtttccattcacattcttggaacctcctgctctgaaccatgaattcccaagtgcaaggtgcttatttttgcaatcaatcaaacttcaccaaaaaggactctggaaatctgaatgtatatgtggccgagatgttgctcctttgaagggcttaagcgtagaagctgaatggaacttgcaaagctccctctgcccttgtgcagagcctaaaaatcctgtgtcttcggccctggcaagctgggaagcatattatcagtggagatcccttcccctgcattcacctgttgctgttttacttcattggccacttactctatatcattgtgttcaactctctcggacccaaactccaagatatgatggtcaggacaccctatgcattcactatttagcttgcagcgtttggggaactacgtgcattgtttccaagtgtccagattcacattgagcttgtcggaccagaagttccaaagtccagggatggagaggttgtgaacatttccagatatgcatgttgttctgataagagttgctgttgtaaatcttctattggttccaaagacttgagttgcactgcagtgacactcaaactgtggaaaggtttctatcatgagagatgcagtgatatattgaaggttctctctacaattactcctattttctaaaaagatgtgaagttacccaccatattatagagccaagcatgtccttattgtaaagtttagaaagaatgttaatactggacaagctttcacatgcatcacacacagttctgtattgtctggtgctatacatagttgtaggtccagttaattctagaagtgctaagttatttacagtcttctgcttacgttgtatcttgtaagctcagctctccaataatcactggaatgtgtagaactcataactcatttcctagcaggtcgatttctgattttctgttaatttacaaacaaaagtatgaaaagaaaagagcaccatgccgctgctgcttgctggtggcccctaccagagctacagctagctttagcactgaaccatagacctaatgctatttttccaacagatctagagcgtgttctaccatttgagagatgatgacatgtcttgtttgaaactgataaaaatgatttactcaccagataattcagttggcaggattccgttccacaacttatttttgccccaaatgcgggtgtggctgcatatcctagttggatgccaactattgaaatgataaggcagactgggattcctgcaatctttacggacttctgtgaagaagctgcacatctagcatcctgctgcataagctccataactggtcaaccccttaaaattccaatccaggtaaatcctttcaggcagccagttgcagcggaaaacaatgcattatacgtaccatgttattcaaattgctttgtttttgggatgtaaaattgccctgtcaccaggaagtatatttagagattgatttgtcaagaaatggaatgtgaattttcaaagaagacaagggtgccattcctagaacatctgagatgggaggtttttatttctgagagatgatggaattaggatttaatgttggtacacttagaatttgagaagacaagttgcacaaatcaagaggaacactggaagggctaggaatagcatgtgtacaagccgactaggagaaaatgtattttatttgaacctctgaaaatatttagatactgcaattgtaagattttcgcatcaaccgattcttgaaatacactttttcataattgggagatgtatatgttttcttatggtggagctacatattatctaattttgttgttcacagcaatctggaggaccgagattgtaagaactgattttgattcataaaaacatagaccagtgttccatg

SEQ ID NO: 66606 - DNA, 2511 bp, Zea Mays
aggatcgatttcttccgtcccgacgattcgcagattttacattctgattttggacgattttggtagaagctattttcacggaatcggactccaaccgaagtgtttgagtggcagaagccgattcccacggtcggaatctggcaagccgaaacaaacaggctgactgggttggcttccggtttcggcgatggagtgcgcggcgaagggactggccgcggagccgtgcgccggcggcgtcgccgatcggcggtgcggcggctgcggagccgtcgcctactgctcccgcgtccaccagattatacattggagggttcacaaagaagaatgtgaaaggtttgcagaacaaatgaggcacatcaatgcgctgagccagtttccattcacattcttggaacctcctgctctggtacttttctgtacccattgttttttttcatagctaagatcttctgggttgctattacctccctcgaaatgacatggtggaaggtactataaatttcagtgccttgcttcctaaactgcactttgcccacatggactgtctattttttctctacttttttattgtacaagctaattatatacattatgcatcaattatttgatacagataaaggattcatgcatttatgcttaattattatctagttctctcacaagttgttccttttttagaaccatgaattcccaagtgcaaggtgcttatttttgcaatcaatcaaacttcaccaaaaaggactctggaaatctgaatgtatatgtggccgagatgttgctcctttgaagggcttaagcgtagaagctgaatggaacttgcaaagctccctctgcccttgtgcagagcctaaaaatcctgtgtcttcggccctggcaagctgggaagcatattatcagtggagatcccttcccctgcattcacctgttgctgttttacttcattggatatgatggtcaggacaccctatgcattcactatttagggcctgagaaggagctacttcagcttgcagcgtttggggaactacgtgcattgtttccaagtgtccagattcacattgagcttgtcggaccagaagttccaaagtccagggatggagaggttgtgaacatttccagatatgcatgttgttctgataagagttgctgttgtaaatcttctattggttccaaagacttgagttgcactgcagtgacactcaaactgtggaaaggtttctatcatgagagatgcagtgatatattgaaggttctctctacaattactcctattttctaaaaagatgtgaagttacccaccatattatagagccaagcatgtccttattgtaaagtttagaaagaatgttaatactggacaagctttcacatgcatcacacacagttctgtattgtctggtgctatacatagttgtaggtccagttaattctagaagtgctaagttatttacagtcttctgcttacgttgtatcttgtaagctcagctctccaataatcactggaatgtgtagaactcataactcatttcctagcaggtcgatttctgattttctgttaatttacaaacaaaagtatgaaaagaaaagagcaccatgccgctgctgcttgctggtggcccctaccagagctacagctagctttagcactgaaccatagacctaatgctatttttccaacagatctagagcgtgttctaccatttgagagatgatgacatgtcttgtttgaaactgataaaaatgatttactcaccagataattcagttggcaggattccgttccacaacttatttttgccccaaatgcgggtgtggctgcatatcctagttggatgccaactattgaaatgataaggcagactgggattcctgcaatctttacggacttctgtgaagaagctgcacatctagcatcctgctgcataagctccataactggtcaaccccttaaaattccaatccaggtaaatcctttcaggcagccagttgcagcggaaaacaatgcattatacgtaccatgttattcaaattgctttgtttttgggatgtaaaattgccctgtcaccaggaagtatatttagagattgatttgtcaagaaatggaatgtgaattttcaaagaagacaagggtgccattcctagaacatctgagatgggaggtttttatttctgagagatgatggaattaggatttaatgttggtacacttagaatttgagaagacaagttgcacaaatcaagaggaacactggaagggctaggaatagcatgtgtacaagccgactaggagaaaatgtattttatttgaacctctgaaaatatttagatactgcaattgtaagattttcgcatcaaccgattcttgaaatacactttttcataattgggagatgtatatgttttcttatggtggagctacatattatctaattttgttgttcacagcaatctggaggaccgagattgtaagaactgattttgattcataaaaacatagaccagtgttccatg

SEQ ID NO: 66607 - DNA, 1657 bp, Zea Mays
aggatcgatttcttccgtcccgacgattcgcagattttacattctgattttggacgattttggtagaagctattttcacggaatcggactccaaccgaagtgtttgagtggcagaagccgattcccacggtcggaatctggcaagccgaaacaaacaggctgactgggttggcttccggtttcggcgatggagtgcgcggcgaagggactggccgcggagccgtgcgccggcggcgtcgccgatcggcggtgcggcggctgcggagccgtcgcctactgctcccgcgtccaccagattatacattggagggttcacaaagaagaatgtgaaaggtttgcagaacaaatgaggcacatcaatgcgctgagccagtttccattcacattcttggaacctcctgctctgaaccatgaattcccaagtgcaaggtgcttatttttgcaatcaatcaaacttcaccaaaaaggactctggaaatctgaatgtatatgtggccgagatgttgctcctttgaagggcttaagcgtagaagctgaatggaacttgcaaagctccctctgcccttgtgcagagcctaaaaatcctgtgtcttcggccctggcaagctgggaagcatattatcagtggagatcccttcccctgcattcacctgttgctgttttacttcattggccacttactctatatcattgtgttcaactctctcggacccaaactccaagatatgatggtcaggacaccctatgcattcactatttagggatggagaggttgtgaacatttccagatatgcatgttgttctgataagagttgctgttgtaaatcttctattggttccaaagacttgagttgcactgcagtgacactcaaactgtggaaaggtttctatcatgagagatgcagtgatatattgaaggattccgttccacaacttatttttgccccaaatgcgggtgtggctgcatatcctagttggatgccaactattgaaatgataaggcagactgggattcctgcaatctttacggacttctgtgaagaagctgcacatctagcatcctgctgcataagctccataactggtcaaccccttaaaattccaatccaggtaaatcctttcaggcagccagttgcagcggaaaacaatgcattatacgtaccatgttattcaaattgctttgtttttgggatgtaaaattgccctgtcaccaggaagtatatttagagattgatttgtcaagaaatggaatgtgaattttcaaagaagacaagggtgccattcctagaacatctgagatgggaggtttttatttctgagagatgatggaattaggatttaatgttggtacacttagaatttgagaagacaagttgcacaaatcaagaggaacactggaagggctaggaatagcatgtgtacaagccgactaggagaaaatgtattttatttgaacctctgaaaatatttagatactgcaattgtaagattttcgcatcaaccgattcttgaaatacactttttcataattgggagatgtatatgttttcttatggtggagctacatattatctaattttgttgttcacagcaatctggaggaccgagattgtaagaactgattttgattcataaaaacatagaccagtgttccatg

SEQ ID NO: 66608 - DNA, 2561 bp, Zea Mays
aggatcgatttcttccgtcccgacgattcgcagattttacattctgattttggacgattttggtagaagctattttcacggaatcggactccaaccgaagtgtttgagtggcagaagccgattcccacggtcggaatctggcaagccgaaacaaacaggctgactgggttggcttccggtttcggcgatggagtgcgcggcgaagggactggccgcggagccgtgcgccggcggcgtcgccgatcggcggtgcggcggctgcggagccgtcgcctactgctcccgcgtccaccagattatacattggagggttcacaaagaagaatgtgaaaggtttgcagaacaaatgaggcacatcaatgcgctgagccagtttccattcacattcttggaacctcctgctctggtacttttctgtacccattgttttttttcatagctaagatcttctgggttgctattacctccctcgaaatgacatggtggaaggtactataaatttcagtgccttgcttcctaaactgcactttgcccacatggactgtctattttttctctacttttttattgtacaagctaattatatacattatgcatcaattatttgatacagataaaggattcatgcatttatgcttaattattatctagttctctcacaagttgttccttttttagaaccatgaattcccaagtgcaaggtgcttatttttgcaatcaatcaaacttcaccaaaaaggactctggaaatctgaatgtatatgtggccgagatgttgctcctttgaagggcttaagcgtagaagctgaatggaacttgcaaagctccctctgcccttgtgcagagcctaaaaatcctgtgtcttcggccctggcaagctgggaagcatattatcagtggagatcccttcccctgcattcacctgttgctgttttacttcattggccacttactctatatcattgtgttcaactctctcggacccaaactccaagatatgatggtcaggacaccctatgcattcactatttagggcctgagaaggagctacttcagcttgcagcgtttggggaactacgtgcattgtttccaagtgtccagattcacattgagcttgtcggaccagaagttccaaagtccagggatggagaggttgtgaacatttccagatatgcatgttgttctgataagagttgctgttgtaaatcttctattggttccaaagacttgagttgcactgcagtgacactcaaactgtggaaaggtttctatcatgagagatgcagtgatatattgaaggttctctctacaattactcctattttctaaaaagatgtgaagttacccaccatattatagagccaagcatgtccttattgtaaagtttagaaagaatgttaatactggacaagctttcacatgcatcacacacagttctgtattgtctggtgctatacatagttgtaggtccagttaattctagaagtgctaagttatttacagtcttctgcttacgttgtatcttgtaagctcagctctccaataatcactggaatgtgtagaactcataactcatttcctagcaggtcgatttctgattttctgttaatttacaaacaaaagtatgaaaagaaaagagcaccatgccgctgctgcttgctggtggcccctaccagagctacagctagctttagcactgaaccatagacctaatgctatttttccaacagatctagagcgtgttctaccatttgagagatgatgacatgtcttgtttgaaactgataaaaatgatttactcaccagataattcagttggcaggattccgttccacaacttatttttgccccaaatgcgggtgtggctgcatatcctagttggatgccaactattgaaatgataaggcagactgggattcctgcaatctttacggacttctgtgaagaagctgcacatctagcatcctgctgcataagctccataactggtcaaccccttaaaattccaatccaggtaaatcctttcaggcagccagttgcagcggaaaacaatgcattatacgtaccatgttattcaaattgctttgtttttgggatgtaaaattgccctgtcaccaggaagtatatttagagattgatttgtcaagaaatggaatgtgaattttcaaagaagacaagggtgccattcctagaacatctgagatgggaggtttttatttctgagagatgatggaattaggatttaatgttggtacacttagaatttgagaagacaagttgcacaaatcaagaggaacactggaagggctaggaatagcatgtgtacaagccgactaggagaaaatgtattttatttgaacctctgaaaatatttagatactgcaattgtaagattttcgcatcaaccgattcttgaaatacactttttcataattgggagatgtatatgttttcttatggtggagctacatattatctaattttgttgttcacagcaatctggaggaccgagattgtaagaactgattttgattcataaaaacatagaccagtgttccatg

SEQ ID NO: 66609 - DNA, 1858 bp, Zea Mays
aggatcgatttcttccgtcccgacgattcgcagattttacattctgattttggacgattttggtagaagctattttcacggaatcggactccaaccgaagtgtttgagtggcagaagccgattcccacggtcggaatctggcaagccgaaacaaacaggctgactgggttggcttccggtttcggcgatggagtgcgcggcgaagggactggccgcggagccgtgcgccggcggcgtcgccgatcggcggtgcggcggctgcggagccgtcgcctactgctcccgcgtccaccagattatacattggagggttcacaaagaagaatgtgaaaggtttgcagaacaaatgaggcacatcaatgcgctgagccagtttccattcacattcttggaacctcctgctctgaaccatgaattcccaagtgcaaggtgcttatttttgcaatcaatcaaacttcaccaaaaaggactctggaaatctgaatgtatatgtggccgagatgttgctcctttgaagggcttaagcgtagaagctgaatggaacttgcaaagctccctctgcccttgtgcagagcctaaaaatcctgtgtcttcggccctggcaagctgggaagcatattatcagtggagatcccttcccctgcattcacctgttgctgttttacttcattggccacttactctatatcattgtgttcaactctctcggacccaaactccaagatatgatggtcaggacaccctatgcattcactatttagggcctgagaaggagctacttcagcttgcagcgtttggggaactacgtgcattgtttccaagtgtccagattcacattgagcttgtcggaccagaagttccaaagtccagggatggagaggttgtgaacatttccagatatgcatgttgttctgataagagttgctgttgtaaatcttctattggttccaaagacttgagttgcactgcagtgacactcaaactgtggaaaggtttctatcatgagagatgcagtgatatattgaagatctagagcgtgttctaccatttgagagatgatgacatgtcttgtttgaaactgataaaaatgatttactcaccagataattcagttggcaggattccgttccacaacttatttttgccccaaatgcgggtgtggctgcatatcctagttggatgccaactattgaaatgataaggcagactgggattcctgcaatctttacggacttctgtgaagaagctgcacatctagcatcctgctgcataagctccataactggtcaaccccttaaaattccaatccaggtaaatcctttcaggcagccagttgcagcggaaaacaatgcattatacgtaccatgttattcaaattgctttgtttttgggatgtaaaattgccctgtcaccaggaagtatatttagagattgatttgtcaagaaatggaatgtgaattttcaaagaagacaagggtgccattcctagaacatctgagatgggaggtttttatttctgagagatgatggaattaggatttaatgttggtacacttagaatttgagaagacaagttgcacaaatcaagaggaacactggaagggctaggaatagcatgtgtacaagccgactaggagaaaatgtattttatttgaacctctgaaaatatttagatactgcaattgtaagattttcgcatcaaccgattcttgaaatacactttttcataattgggagatgtatatgttttcttatggtggagctacatattatctaattttgttgttcacagcaatctggaggaccgagattgtaagaactgattttgattcataaaaacatagaccagtgttccatg

SEQ ID NO: 66610 - DNA, 2180 bp, Zea Mays
aggatcgatttcttccgtcccgacgattcgcagattttacattctgattttggacgattttggtagaagctattttcacggaatcggactccaaccgaagtgtttgagtggcagaagccgattcccacggtcggaatctggcaagccgaaacaaacaggctgactgggttggcttccggtttcggcgatggagtgcgcggcgaagggactggccgcggagccgtgcgccggcggcgtcgccgatcggcggtgcggcggctgcggagccgtcgcctactgctcccgcgtccaccagattatacattggagggttcacaaagaagaatgtgaaaggtttgcagaacaaatgaggcacatcaatgcgctgagccagtttccattcacattcttggaacctcctgctctgaaccatgaattcccaagtgcaaggtgcttatttttgcaatcaatcaaacttcaccaaaaaggactctggaaatctgaatgtatatgtggccgagatgttgctcctttgaagggcttaagcgtagaagctgaatggaacttgcaaagctccctctgcccttgtgcagagcctaaaaatcctgtgtcttcggccctggcaagctgggaagcatattatcagtggagatcccttcccctgcattcacctgttgctgttttacttcattggccacttactctatatcattgtgttcaactctctcggacccaaactccaagatatgatggtcaggacaccctatgcattcactatttagggatggagaggttgtgaacatttccagatatgcatgttgttctgataagagttgctgttgtaaatcttctattggttccaaagacttgagttgcactgcagtgacactcaaactgtggaaaggtttctatcatgagagatgcagtgatatattgaaggttctctctacaattactcctattttctaaaaagatgtgaagttacccaccatattatagagccaagcatgtccttattgtaaagtttagaaagaatgttaatactggacaagctttcacatgcatcacacacagttctgtattgtctggtgctatacatagttgtaggtccagttaattctagaagtgctaagttatttacagtcttctgcttacgttgtatcttgtaagctcagctctccaataatcactggaatgtgtagaactcataactcatttcctagcaggtcgatttctgattttctgttaatttacaaacaaaagtatgaaaagaaaagagcaccatgccgctgctgcttgctggtggcccctaccagagctacagctagctttagcactgaaccatagacctaatgctatttttccaacagatctagagcgtgttctaccatttgagagatgatgacatgtcttgtttgaaactgataaaaatgatttactcaccagataattcagttggcaggattccgttccacaacttatttttgccccaaatgcgggtgtggctgcatatcctagttggatgccaactattgaaatgataaggcagactgggattcctgcaatctttacggacttctgtgaagaagctgcacatctagcatcctgctgcataagctccataactggtcaaccccttaaaattccaatccaggtaaatcctttcaggcagccagttgcagcggaaaacaatgcattatacgtaccatgttattcaaattgctttgtttttgggatgtaaaattgccctgtcaccaggaagtatatttagagattgatttgtcaagaaatggaatgtgaattttcaaagaagacaagggtgccattcctagaacatctgagatgggaggtttttatttctgagagatgatggaattaggatttaatgttggtacacttagaatttgagaagacaagttgcacaaatcaagaggaacactggaagggctaggaatagcatgtgtacaagccgactaggagaaaatgtattttatttgaacctctgaaaatatttagatactgcaattgtaagattttcgcatcaaccgattcttgaaatacactttttcataattgggagatgtatatgttttcttatggtggagctacatattatctaattttgttgttcacagcaatctggaggaccgagattgtaagaactgattttgattcataaaaacatagaccagtgttccatg

SEQ ID NO: 66611 - DNA, 3127 bp, Zea Mays
aggatcgatttcttccgtcccgacgattcgcagattttacattctgattttggacgattttggtagaagctattttcacggaatcggactccaaccgaagtgtttgagtggcagaagccgattcccacggtcggaatctggcaagccgaaacaaacaggctgactgggttggcttccggtttcggcgatggagtgcgcggcgaagggactggccgcggagccgtgcgccggcggcgtcgccgatcggcggtgcggcggctgcggagccgtcgcctactgctcccgcgtccaccagattatacattggagggttcacaaagaagaatgtgaaaggtttgcagaacaaatgaggcacatcaatgcgctgagccagtttccattcacattcttggaacctcctgctctggtacttttctgtacccattgttttttttcatagctaagatcttctgggttgctattacctccctcgaaatgacatggtggaaggtactataaatttcagtgccttgcttcctaaactgcactttgcccacatggactgtctattttttctctacttttttattgtacaagctaattatatacattatgcatcaattatttgatacagataaaggattcatgcatttatgcttaattattatctagttctctcacaagttgttccttttttagaaccatgaattcccaagtgcaaggtgcttatttttgcaatcaatcaaacttcaccaaaaaggactctggaaatctgaatgtatatgtggccgagatgttgctcctttgaagggcttaagcgtagaagctgaatggaacttgcaaagctccctctgcccttgtgcagagcctaaaaatcctgtgtcttcggccctggcaagctgggaagcatattatcagtggagatcccttcccctgcattcacctgttgctgttttacttcattggccacttactctatatcattgtgttcaactctctcggacccaaactccaagatatgatggtcaggacaccctatgcattcactatttagggcctgagaaggagctacttcagcttgcagcgtttggggaactacgtgcattgtttccaagtgtccagattcacattgagcttgtcggaccagaagttccaaagtccagggatggagaggttgtgaacatttccagatatgcatgttgttctgataagagttgctgttgtaaatcttctattggttccaaagacttgagttgcactgcagtgacactcaaactgtggaaaggtttctatcatgagagatgcagtgatatattgaaggttctctctacaattactcctattttctaaaaagatgtgaagttacccaccatattatagagccaagcatgtccttattgtaaagtttagaaagaatgttaatactggacaagctttcacatgcatcacacacagttctgtattgtctggtgctatacatagttgtaggtccagttaattctagaagtgctaagttatttacagtcttctgcttacgttgtatcttgtaagctcagctctccaataatcactggaatgtgtagaactcataactcatttcctagcaggtcgatttctgattttctgttaatttacaaacaaaagtatgaaaagaaaagagcaccatgccgctgctgcttgctggtggcccctaccagagctacagctagctttagcactgaaccatagacctaatgctatttttccaacagatctagagcgtgttctaccatttgagagatgatgacatgtcttgtttgaaactgataaaaatgatttactcaccagataattcagttggcaggattccgttccacaacttatttttgccccaaatgcgggtgtggctgcatatcctagttggatgccaactattgtgagtatcttgtttttaattgtctgttagacatgtatgtatatactcgtttacattaagaacctcatgtttccttacagcagcctcatgttattggctgtgagatgccatacggcactgtttgttcctactttaccaatactccttctgtcccaaattaaaattcgtttttagtaaattaatagattcatacatcacttgatgtatgtgttttatatatgtggctaggttcatcatcatccatttaaatatagacataaaaaccaagagctaaaatgaatactattttagaacggagagagtatttttaactagtcaatttgattccgaggcgcatgcagaacataaacttcacaatggattgtaatctttttcatttgtaatcccaacaattttcaccaaccatattactcatattttattgaagcacgagatgtcaatacattatttgagaattcattatgctgctgcatcggaccagataatatcaactagtgttttgccttagcctgcaattagctttacttgttggtcctcatcatcattcatatttcatttcactaaaggaaatgataaggcagactgggattcctgcaatctttacggacttctgtgaagaagctgcacatctagcatcctgctgcataagctccataactggtcaaccccttaaaattccaatccaggtaaatcctttcaggcagccagttgcagcggaaaacaatgcattatacgtaccatgttattcaaattgctttgtttttgggatgtaaaattgccctgtcaccaggaagtatatttagagattgatttgtcaagaaatggaatgtgaattttcaaagaagacaagggtgccattcctagaacatctgagatgggaggtttttatttctgagagatgatggaattaggatttaatgttggtacacttagaatttgagaagacaagttgcacaaatcaagaggaacactggaagggctaggaatagcatgtgtacaagccgactaggagaaaatgtattttatttgaacctctgaaaatatttagatactgcaattgtaagattttcgcatcaaccgattcttgaaatacactttttcataattgggagatgtatatgttttcttatggtggagctacatattatctaattttgttgttcacagcaatctggaggaccgagattgtaagaactgattttgattcataaaaacatagaccagtgttccatg

SEQ ID NO: 66612 - DNA, 1427 bp, Zea Mays
gagcaaggcacagccacgtggctgcgtcttcccgcaggacgcaggccccttcccaccgttctcttgacgactcctcgtctcctcgtcgtagtagttgcagccaccggtcttgagagctgccacctatttgccttgacgcggagaaaagtatacctggggggttggggcttgccgccgcaactatccccggcctcggctcgcctgcactgcacctctctccttggtttcttcccgttacccgtctcggcagatgcctctcttcctgcagcttcaacttcagggtgcctgtccacttagtcagtactgcagcggcgatatctgaaggtccgactaatgtgatgtcaatcacatgctgcttgcctgtcgtcgagtgcgtgtactgcctggcgtgtgcgcggtgggtgtggcagcgctgcctccactccggaggctacgacagtgagacctggggtgttgcatcggctgaagagtttgagcctgtgccgcgcttgtgtcggatcatcctctcggtctatgaggatgaccttgagaacccccaatgggcgcctccaggtggttatggcatggagccacgttgggtggtgcagcggagaatatatgaagacactcatggtcatgcaccaacataccttctgtatgttgatcaccagcattcagatgttgtgcttgctgttcgaggaatgaacatggcgaaggagagtgactatgctgtccttctggataacaagcttgggcaaaggaggtttgacggcggctacgtgcacaatggcttgcttaaggccgccgagtgggtttttgatgctgagtgtgatgttctgaaggaccttctggagaggaatcctggctatacactcacatttgctgggcattctcttggctctggtgtggtgtcaatgctagctttgctggcagtgcacaacagggagctgctcggtggcatagacaggaagaggatacgatgttttgcaatggcaccagcccgatgtatgtcactgaatttggctgtccgttatgcagatgtcatcaatgcagttattcttcaggatgattttttgcctcgcacagacattcctttggaagacatcttcaagtcactattctgggtacctgatgtagtcctctttgtacagcttaccatgccttctatgtggaagatgcctaatagacacatgtatacctgaaagtgtgatgttgagagatccaaggcgcctctatgcacctggtaggctttaccacattgttgaaagaaaacctttcagattttcatgctaatgcaaagtaggtttcaattcatctttgcaactcacatattgcaatggcaatgaatatctacagaacaagcttcctggaaaaaaagtagttatttcgcttttcctcattgatacatagttcataatttttattgaaacaattcctgattgctgcag

SEQ ID NO: 66613 - DNA, 2037 bp, Zea Mays
ggccccttcccaccgttctcttgacgactcctcgtctcctcgtcgtagtagttgcagccaccggtcttgagagctgccacctatttgccttgacgcggagaaaagtatacctggggggttggggcttgccgccgcaactatccccggcctcggctcgcctgcactgcacctctctccttggtttcttcccgttacccgtctcggcagatgcctctcttcctgcagcttcaacttcagggtgcctgtccacttagtcagtactgcagcggcgatatctgaaggtccgactaatgtgatgtcaatcacatgctgcttgcctgtcgtcgagtgcgtgtactgcctggcgtgtgcgcggtgggtgtggcagcgctgcctccactccggaggctacgacagtgagacctggggtgttgcatcggctgaagagtttgagcctgtgccgcgcttgtgtcggatcatcctctcggtctatgaggatgaccttgagaacccccaatgggcgcctccaggtggttatggcatggagccacgttgggtggtgcagcggagaatatatgaagacactcatggtcatgcaccaacataccttctgtatgttgatcaccagcattcagatgttgtgcttgctgttcgaggaatgaacatggcgaaggagagtgactatgctgtccttctggataacaagcttgggcaaaggaggtttgacggcggctacgtgcacaatggcttgcttaaggccgccgagtgggtttttgatgctgagtgtgatgttctgaaggaccttctggagaggaatcctggctatacactcacatttgctgggcattctcttggctctggtgtggtgtcaatgctagctttgctggcagtgcacaacagggagctgctcggtggcatagacaggaagaggatacgatgttttgcaatggcaccagcccgatgtatgtcactgaatttggctgtccgttatgcagatgtcatcaatgcagttattcttcaggatgattttttgcctcgcacagacattcctttggaagacatcttcaagtcactattctgggtacctgatgtagtcctctttgtacagcttaccatgccttctatgtggaagatgcctaatagacacatgtatacctgaaagtgtgatgttgagagatccaaggcgcctctatgcacctggtaggctttaccacattgttgaaagaaaacctttcagatgtggaagatacccccctattgtgagaacagcagttcctgtggatgggagatttgaacgcattgttctctcttgcaacgcaacatctgatcatgctattatatggatagaaagagaggcgcaaagggcattagatttattgctagagagtgagaaaaccatgcaagcacctgcggttgaaaggatgagcagtgagatcactgttacaagagatcacgacgaagagcagcaggaggctctgcggcgtgcgatcatgctaggggttgctgatgtaaacatgccatcaacatatggtacgttcaacgaaaatcctacttctgaaccagccgaggcctccccattactatcagacagcggaaggcgcagggcagtatgggaggagtggatcgcaaggatcttcgagaaggatgaatcagggcaaatggttccacggagatgatcgtggcgacagctcaaggcatgcttgcttgatgggtcggtttcttgatgctgcttccactctgtttcgagcctattttgaaacttcggaacggtaatgtaagatgagtaggggttagggattagatcatgtatttagggctagtttgacaaccctatttttctatgggatttttaatttcctaagggaaaacgaactaattttctataagaaaatgaaaaacccttggaaaattggggttaccaaaccagcccttagtgagtgagatggtgtatagcatgaataattttccctttggttgacaaaaaatgtgggtgcctattgtacttacacatcagtaatttcattgtataagaatataagatattgtagaatcttgggt

SEQ ID NO: 66614 - DNA, 2021 bp, Zea Mays
ccccttcccaccgttctcttgacgactcctcgtctcctcgtcgtagtagttgcagccaccggtcttgagagctgccacctatttgccttgacgcggagaaaagtatacctggggggttggggcttgccgccgcaactatccccggcctcggctcgcctgcactgcacctctctccttggtttcttcccgttacccgtctcggcagatgcctctcttcctgcagcttcaacttcagggtgcctgtccacttagtcagtactgcagcggcgatatctgaaggtccgactaatgtgatgtcaatcacatgctgcttgcctgtcgtcgagtgcgtgtactgcctggcgtgtgcgcggtgggtgtggcagcgctgcctccactccggaggctacgacagtgagacctggggtgttgcatcggctgaagagtttgagcctgtgccgcgcttgtgtcggatcatcctctcggtctatgaggatgaccttgagaacccccaatgggcgcctccaggtggttatggcatggagccacgttgggtggtgcagcggagaatatatgaagacactcatggtcatgcaccaacataccttctgtatgttgatcaccagcattcagatgttgtgcttgctgttcgaggaatgaacatggcgaaggagagtgactatgctgtccttctggataacaagcttgggcaaaggaggtttgacggcggctacgtgcacaatggcttgcttaaggccgccgagtgggtttttgatgctgagtgtgatgttctgaaggaccttctggagaggaatcctggctatacactcacatttgctgggcattctcttggctctggtgtggtgtcaatgctagctttgctggcagtgcacaacagggagctgctcggtggcatagacaggaagaggatacgatgttttgcaatggcaccagcccgatgtatgtcactgaatttggctgtccgttatgcagatgtcatcaatgcagttattcttcaggatgattttttgcctcgcacagacattcctttggaagacatcttcaagtcactattctgtcctctttgtacagcttaccatgccttctatgtggaagatgcctaatagacacatgtatacctgaaagtgtgatgttgagagatccaaggcgcctctatgcacctggtaggctttaccacattgttgaaagaaaacctttcagatgtggaagatacccccctattgtgagaacagcagttcctgtggatgggagatttgaacgcattgttctctcttgcaacgcaacatctgatcatgctattatatggatagaaagagaggcgcaaagggcattagatttattgctagagagtgagaaaaccatgcaagcacctgcggttgaaaggatgagcagtgagatcactgttacaagagatcacgacgaagagcagcaggaggctctgcggcgtgcgatcatgctaggggttgctgatgtaaacatgccatcaacatatggtacgttcaacgaaaatcctacttctgaaccagccgaggcctccccattactatcagacagcggaaggcgcagggcagtatgggaggagtggatcgcaaggatcttcgagaaggatgaatcagggcaaatggttccacggagatgatcgtggcgacagctcaaggcatgcttgcttgatgggtcggtttcttgatgctgcttccactctgtttcgagcctattttgaaacttcggaacggtaatgtaagatgagtaggggttagggattagatcatgtatttagggctagtttgacaaccctatttttctatgggatttttaatttcctaagggaaaacgaactaattttctataagaaaatgaaaaacccttggaaaattggggttaccaaaccagcccttagtgagtgagatggtgtatagcatgaataattttccctttggttgacaaaaaatgtgggtgcctattgtacttacacatcagtaatttcattgtataagaatataagatattgtagaatcttgggt

SEQ ID NO: 66615 - DNA, 1388 bp, Zea Mays
cttcccaccgttctcttgacgactcctcgtctcctcgtcgtagtagttgcagccaccggtcttgagagctgccacctatttgccttgacgcggagaaaagtatacctggggggttggggcttgccgccgcaactatccccggcctcggctcgcctgcactgcacctctctccttggtttcttcccgttacccgtctcggcagatgcctctcttcctgcagcttcaacttcagggtgctttgctggcagtgcacaacagggagctgctcggtggcatagacaggaagaggatacgatgttttgcaatggcaccagcccgatgtatgtcactgaatttggctgtccgttatgcagatgtcatcaatgcagttattcttcaggatgattttttgcctcgcacagacattcctttggaagacatcttcaagtcactattctgcttaccatgccttctatgtggaagatgcctaatagacacatgtatacctgaaagtgtgatgttgagagatccaaggcgcctctatgcacctggtaggctttaccacattgttgaaagaaaacctttcagatgtggaagatacccccctattgtgagaacagcagttcctgtggatgggagatttgaacgcattgttctctcttgcaacgcaacatctgatcatgctattatatggatagaaagagaggcgcaaagggcattagatttattgctagagagtgagaaaaccatgcaagcacctgcggttgaaaggatgagcagtgagatcactgttacaagagatcacgacgaagagcagcaggaggctctgcggcgtgcgatcatgctaggggttgctgatgtaaacatgccatcaacatatggtacgttcaacgaaaatcctacttctgaaccagccgaggcctccccattactatcagacagcggaaggcgcagggcagtatgggaggagtggatcgcaaggatcttcgagaaggatgaatcagggcaaatggttccacggagatgatcgtggcgacagctcaaggcatgcttgcttgatgggtcggtttcttgatgctgcttccactctgtttcgagcctattttgaaacttcggaacggtaatgtaagatgagtaggggttagggattagatcatgtatttagggctagtttgacaaccctatttttctatgggatttttaatttcctaagggaaaacgaactaattttctataagaaaatgaaaaacccttggaaaattggggttaccaaaccagcccttagtgagtgagatggtgtatagcatgaataattttccctttggttgacaaaaaatgtgggtgcctattgtacttacacatcagtaatttcattgtataagaatataagatattgtagaatcttgggt

SEQ ID NO: 66616 - DNA, 1944 bp, Zea Mays
cttcccaccgttctcttgacgactcctcgtctcctcgtcgtagtagttgcagccaccggtcttgagagctgccacctatttgccttgacgcggagaaaagtatacctggggggttggggcttgccgccgcaactatccccggcctcggctcgcctgcactgcacctctctccttggtttcttcccgttacccgtctcggcagatgcctctcttcctgcagcttcaacttcagggtgcctgtccacttagtcagtactgcagcggcgatatctgaaggtccgactaatgtgatgtcaatcacatgctgcttgcctgtcgtcgagtgcgtgtactgcctggcgtgtgcgcggtgggtgtggcagcgctgcctccactccggaggctacgacagtgagacctggggtgttgcatcggctgaagagtttgagcctgtgccgcgcttgtgtcggatcatcctctcggtctatgaggatgaccttgagaacccccaatgggcgcctccaggtggttatggcatggagccacgttgggtggtgcagcggagaatatatgaagacactcatggtcatgcaccaacataccttctgtatgttgatcaccagcattcagatgttgtgcttgctgttcgaggaatgaacatggcgaaggagagtgactatgctgtccttctggataacaagcttgggcaaaggaggtttgacggcggctacgtgcacaatggcttgcttaaggccgccgagtgggtttttgatgctgagtgtgatgttctgaaggaccttctggagaggaatcctggctatacactcacatttgctgggcattctcttggctctggtgtggtgtcaatgctagctttgctggcagtgcacaacagggagctgctcggtggcatagacaggaagaggatacgatgttttgcaatggcaccagcccgatgtatgtcactgaatttggctgtccgttatgcagatgtcatcaatgcagttattcttcaggatgattttttgcctcgcacagacattcctttggaagacatcttcaagtcactattctgggtacctgatgtagtcctctttgtacagcttaccatgccttctatgtggaagatgcctaatagacacatatgtggaagatacccccctattgtgagaacagcagttcctgtggatgggagatttgaacgcattgttctctcttgcaacgcaacatctgatcatgctattatatggatagaaagagaggcgcaaagggcattagatttattgctagagagtgagaaaaccatgcaagcacctgcggttgaaaggatgagcagtgagatcactgttacaagagatcacgacgaagagcagcaggaggctctgcggcgtgcgatcatgctaggggttgctgatgtaaacatgccatcaacatatggtacgttcaacgaaaatcctacttctgaaccagccgaggcctccccattactatcagacagcggaaggcgcagggcagtatgggaggagtggatcgcaaggatcttcgagaaggatgaatcagggcaaatggttccacggagatgatcgtggcgacagctcaaggcatgcttgcttgatgggtcggtttcttgatgctgcttccactctgtttcgagcctattttgaaacttcggaacggtaatgtaagatgagtaggggttagggattagatcatgtatttagggctagtttgacaaccctatttttctatgggatttttaatttcctaagggaaaacgaactaattttctataagaaaatgaaaaacccttggaaaattggggttaccaaaccagcccttagtgagtgagatggtgtatagcatgaataattttccctttggttgacaaaaaatgtgggtgcctattgtacttacacatcagtaatttcattgtataagaatataagatattgtagaatcttgggt

SEQ ID NO: 66617 - DNA, 3500 bp, Zea Mays
gaccttactgccgcgatcgtgttctcgtcccctccgaggcgctgcagtgccgacgtcgccacagccatgatgatcgcgaccgctgcgctgctggcctcgtccgattcagtggaggcgctcctcgcgggcaaaggcggggtgcccgcacccgcagacgagctgtggcagctgaagcagaagctcgacgaggcgcggggcctggcagcggacgccgaggcgaaggagggccgcgacgccggcgccagggcgtggctgcgtgacctgcggtacgcgctctacgtgctcggagactcggtcgacgacttccgccgcgccgccgctcggcggcaccagcagggccggagatcgttacgccattggtttacactaccatcaaacattgacagaaaccagtacaagactttcaagaccagcatcagtagcctcaataaacaaatggatgatattctacagaaaggttccgaactaggacttcaagcaatcaaccaggaagcccagagtgggagctctgaattttcatggggggtgatgcccgatgatggtactctgggtgacattcacaatgagaaaaataaattgattgacgtattgacagagaggaagagtccaaacaaagtcgtgataattgttggggatagtggaatcggaaaaactacactggcaaggaaaattcatgacgatcatcgcaccagaaatgcattcaccattgttttatgggtgagtgttttcagtgacttggatgatattggattactctctgcgattgtgaaggctgctggcggaaatcccagtggagaagaaaacagggtacaacttgaggccatgttggcagccattctcaaaggaaagagattctttatggtgcttgataacgttcgcagcgatcaaatttatgagaattccctagaggctcacttgcatgtgtgtggtcatggaagccggattttgatcaccactcgtgatgggagtatttcgacacagatgacggatgcttacatctaccgcgttaagaaactgacctttgaggattgttggtccttgctttgccgggcttcttgtctaaatgagagcctacatggcgacattttaaggaatatcggaatagcgattatccaaaaatgtaacaagcttccaatggctgtcaagattataggggctgtcctaagaacaaaagaaccgacctgcaaggcctggcagaaagtgtatgaaagcgaaggatggtccttctccttcggggagcttcgagactatgtccatggcttaactggggccatgtatttgggctaccatgatttgcccttgcatctgaagcagtgctttatttatttgtcactgttccctgaaggctttgtcatcagacagcagtttgccagtcaactgtggatttcggagggtttaattgatgcaagagactactgcagtcttgaaaagactgcagagcgttattacagggagttgttatcaaggagccttctgcagcctgaaattgggaacgacgatatgacaagatgcacagtgcatgatcaaattcgatcctttttgcagttctttgtcgatgataaaatttttactggcgatctgaagacgcccagggaaggactgcgacatgtgtggattagaagcaacctactaagaactactgtgggaaaaatattaggagtgaaaagcttgaagacagttattctatacaaaaacccatcggggaatcgcagcttagacgagctgtttaaggagctcagatatttgcaggtgttggaccttagtggtactgaaattaagtatattccaaggacattagattttctatgtcatcttagactgctaaatctttcactaacacgaattacagagcttccagagtccattgagtacctaacaaatctacaattcttgggtcttcgatactgcaattggctacataaccttccaaatggaataggtaaactgcaatatttgcgatatctggatcttcgaggaaccaaattgcatcaggtcctaccaagtttggtcaacctgaagcagctctccacgctacatggtttcgtagtaaaccgtagacccaagcgtgaggatgatccaactgggtggcctttggaagacctaaaatctctagaagcattgagaagcctgcagattctgaagttggaaagagtctcagatcctttgagggtgcaagaagccatgctggaaacgaagtcacacctcaaggaacttgaactatgttggagcaatgatgatagacagtccgaagtacaagaagaaaatgctggaacacttaagaacgtatctgattccctttctcctccacactgcttggaatctctcaaaatagtgagctattacggaaaagttttccctgattggctacctaatctctcaaacctccagcgccttgttcttactgattgcaaattctgtgagcatcttcccaacctgggccagctaaccgaactcaagttcctgactataacagcctgttccaagttagttacaatcaagcaagagcaaacaggtcaggcgtttccaaggctagagcagctgcaccttcgagacatgcccaatcttgaatcatggataggattttcacctggtgatatgccttcccttgtgaaattccgtctggagaattgtcctaagctgtgtaacctgccatctggcatcaagcactcgaaattcctgacaagcatgcaactacaccatattgatagcctgcgaatcattgaggacttgcctgcgctcaaagaattggttatccaagcctgcaatgaacttcaaaaaatctcaaatattccattgcttgaagttttgatagtccttggttgctcgcggttgaaggatgtcactgaagtccaccttagtcatgcccgcattgtagatagagacataagagaacttccagattgggttgctactaatgcatacatgctgcagacattcactatagttggcagagcagaactgcttcaaagattacttcccaaccatgaagactgggaaatcatccgtcacataagcaaagtttatgcaaacctacctgatgaatctccattcttcacctacacaaaaagctctgctgatttccatgtcgatcaaataatcggtgaacgagggaacccatctgtcctattaccagctgatgttccacaccaatcgctgaacatttcacttgctaattctgttgtgagaacctttcgagttggtgtgcccagagtaccactcagacggatttccacgatgaagagggctaataggacaaacagagagattcggcttgtccagactctcttcattttcttcacaacagtgatcttgctgttgcttgtgtttcttgagtgaggcttgtctcataacaagttgtgatcagatgaagaaaccacaataaaatttcgaaagtttaacattctcggcagatgttcatgtcagcacaactgtacatccacaaatagtttttgaaactatatcattctcggcagaattctcattctcggcagaattctaat

SEQ ID NO: 66618 - DNA, 307 bp, Zea Mays
ctattttatgcaccacatagaccttttcttgcttctcctcctcaaccgtatccaccacacgccgatgtcttctccgcgggcggccaccggcgccgccgtagggctagccggaacaacgccctcgtcactggagaacgtcgctgcggcacggtttcccaatgaccaccgctctctggtcttcacccgttccaataatcacgtgcaccagctttggggaaacgaaagtataaggctattatacaacgatatatgagtgacagaaacaggtagcctcctgaagaagtttgctggtgctgatggcaccttg

SEQ ID NO: 66619 - DNA, 1199 bp, Zea Mays
ctctaaatgacatattcatatacgaggatggtacttctttggactatatagggacggaggtcgggagggaattcgcgagagcaagaaagcagctacggtagccatgcatgaccatatgaaagcgacgacgcgagaggatgacatatttccttatcaataattcctacgcccaaattaaagaagccctggaatcaggaactaggaaggggcaccgatgtgattttgtgagccaacgacatggggagcatgagcgtgagcaatgcatgtttgccgagtcaaacgttgccccaccaacaagcaagtgcgtcgtgcgtggatcctctccttcctctctcttggttcctgttatctctctcggctgtccactcccccgtgatgcgaactcgtcgtccggccttgcggtgaacgacgagtgcaaggtgaagttccgggagctgaagtcgcggcggagcttccggttcatcgtgttcaggatcgacgacacggacatggagatcaaggtggaccgcctcggcggaccgaaccagggctacggcgacttcaccgacagcctccccgccaacgagtgccgctacgcgatctacgacctcgacttcaccaccatcgagaactgccagaagagcaagatcttcttcttctcctggtcccctgacactgcacgcaccaggagcaagatgctgtacgccagctccaaggacaggttcaggagggagctggacggcatccagtgcgagatccaggccaccgaccccagcgagatgagcctcgacatcgtcaggagccggaccaactgaccgtcatcgtccatcaacgaccaagcaacaacacatccacactatatactcaattcacattgcatgcatcgttattattacatcatttatttcagaccccccgcccactgctaaccgtagtccataagagattcatcatccgtggactatgctcgatctcttccgtacgatacaattctcaaatatttctatttatttcctaagtgaattattatatatgtactatttcattccaggttcattttacttgtgaccattcttcagttcttttttctgtaaggatcggtatatcggagcatatgtgcatggctatgccagttgttgggcgtaagaatgtatttttttctgtaatatagaaaaaaactattttaagcaacaggttattgtcaagttactttgcttgtg

SEQ ID NO: 66620 - DNA, 1351 bp, Zea Mays
ctctaaatgacatattcatatacgaggatggtacttctttggactatatagggacggaggtcgggagggaattcgcgagagcaagaaagcagctacggtagccatgcatgaccatatgaaagcgacgacgcgagaggatgacatatttccttatcaataattcctacgcccaaattaaagaagccctggaatcaggaactaggaaggggcaccgatgtgattttgtgagccaacgacatggggagcatgagcgtgagcaatgcatgtttgccgagtcaaacgttgccccaccaacaagcaagtgcgtcgtgcgtggatcctctccttcctctctcttggttcctgttatctctctcggctgtccactcccccgtgatgtgagcgcgtttctctcccgtcctctcctctcctcccccgcaacaaacacctgcaagctgctctcgatctctctctccgtcgccatctctctcgcgcgcgcattacttgcacgtacgagctcagaaggaaggcagaggcaaaagcagccatggcgaactcgtcgtccggccttgcggtgaacgacgagtgcaaggtgaagttccgggagctgaagtcgcggcggagcttccggttcatcgtgttcaggatcgacgacacggacatggagatcaaggtggaccgcctcggcggaccgaaccagggctacggcgacttcaccgacagcctccccgccaacgagtgccgctacgcgatctacgacctcgacttcaccaccatcgagaactgccagaagagcaagatcttcttcttctcctggtcccctgacactgcacgcaccaggagcaagatgctgtacgccagctccaaggacaggttcaggagggagctggacggcatccagtgcgagatccaggccaccgaccccagcgagatgagcctcgacatcgtcaggagccggaccaactgaccgtcatcgtccatcaacgaccaagcaacaacacatccacactatatactcaattcacattgcatgcatcgttattattacatcatttatttcagaccccccgcccactgctaaccgtagtccataagagattcatcatccgtggactatgctcgatctcttccgtacgatacaattctcaaatatttctatttatttcctaagtgaattattatatatgtactatttcattccaggttcattttacttgtgaccattcttcagttcttttttctgtaaggatcggtatatcggagcatatgtgcatggctatgccagttgttgggcgtaagaatgtatttttttctgtaatatagaaaaaaactattttaagcaacaggttattgtcaagttactttgcttgtg

SEQ ID NO: 66621 - DNA, 776 bp, Zea Mays
aacgaaaaccagctctcatattggcataattccaaatttctctcgtccgcaccgccgccactcgccttttcattccgcaccgccgccaacccgccgcctcttctttccatggaagtggacgacggtagccgcgccaccccgccactggacgccgtggccgccgccttcaagtcccaagtcatggagttgcaggacctcgtcctcgcccgcagcatgttcccggccacggcgctgcccgacctcgccaacgtggacgcgttggtgacggcgatggagtcgcaggtggaaaccatcagccgccgccttcaggaggagcttgacgccatccctaaggccaagaagctagtccagcggtccttgaaggaggaagagaagctgcagcatatgcttgcgaacttaccttctggaatgcgcaagaatgattttgctaatcagcacgaacagagctcatcaaggatgctgcctcattttaactcttcttttactgaagctaatgaatgtgaactgaagattaaggatgaaccagttgcagctcctaggaagggaagagcacctgcacctcgttggtatatctcaaccgaggagcttgattcactctcatcgtacatgaggggaagactgactttggaaaaggttaatatcgcaataaatgaagtggcttcatatgcagatgccaatgctcatcttgttacatgccctaagaaaaagttgtcagaagatacatgggaaaaagctttggttcttcgccaccttgggcgcttccatgaagttcggat

SEQ ID NO: 66622 - DNA, 168 bp, Zea Mays
gggatttctccactatacccgtggatccagttgcttttgcaagggaaagagatatgccttctgattcagataggaccttaaatgaagacaagctttcatatcttgtagtatgccacgggagcatcaaaagatctttgaattgggttgaagaaaacgtagaacatagtg

SEQ ID NO: 66623 - DNA, 658 bp, Zea Mays
gttccgctgcagccacgacctctctcccgaacgcgcacgagaagaccaggtggaacatatgcaagcaggttctagagcaataaccccatgaatccagatcgggggtttgcatctacatgggcgtgtactccgcaccgctccctccggccccgaccgccgtgcgctcgttgtagccggggtcgacctcaaccacgacgacgatgcggtctcctcgccccacgctcgacctcctcactgacctcgccctgctccacctcaactcgtgatgaggattgtcggcatgttcacaccgcgccgttgcagaacgttggagcctctcagaactctagaagctgcctaccaccacgcaccctaagataggggcatatctgtaaatattgtactctcaaatggtgggttgctgcgtcacgggagtttgggtgaaggcctgaaggatgtgatgcaaaacgtctatgcaggtctgggatgtccgcctcattatggatcaaaattcatgatttctaaaggtgtcagatgagtacctatatactccctccatcccagaaaacaaggcgcctcattagactattggaagctggacgacatggatgactctggcaagatgcggtgggagcacgacgacatggatgactccgaccacgagttcgacaggaagcct

SEQ ID NO: 66624 - DNA, 1685 bp, Zea Mays
ctaaaacttcaacttttaggtcaatgatggctcttgcttgtccaatatgcaatgtgtgttgactcctgaaacagaaggctatgaccagatagactctgtcactactggagcatctgtactagttgagggagttgttgcaagcagccaaggcggtaagcaaaaagtggagttgaaggtttcaaagatcactgtgattggtaagagtgaccccacatcttttcctatacagaagaaacgggcatcaagagagttccttagaactgtagcccatctccgtcctcggacaaacacttttggtgcagtggcaagagtgagaaatgctctggcatacgcaactcataaattctttcaagacaatggatttgtttgggtttcaagcccaattattactgcctcagattgtgaaggagctggggagcagttttacgtgactactttgctttcgaatagcaccgaaggtggttccctactcaaagatattcctgcgaccaaggatggaagggttgattggtcacaggatttcttctgcaaaccagcatttctgacagtatctggacagctcaatggtgaaacatatgcttcagctctatctgatatttacacatttggtccaacgtttagggctgaaaattcaaacactgcaaggcatctggctgaattttggatgattgaacctgagcttgcctttgcggatctaaatgatgacatggcttgtgcaactgcatatctccagtaaagtatattctagagaactgcaaagaggatatggatttcttcaatacatgggttgagaaaggcatcatagatcgattaaatgatgtagtagagaagaactttgttcacttgtcttacactgatgctgtcgagctactacttgggtccaagaagaaatttgagtttccggtaaagtggggtttggatcttcaaagtgagcacgagcgatatatcacagaagttgcctttgatgggcgccctgtaataatcagagattacccaaaggaaatcaaagctttctatatgagagaaaatgatgatgggaagacagttgctgcaatggatttgttggttcctcgggttggtgagcttattgggggaagccagagggaagagcgtcttgattaccttgaagcccgactagacgagcaaaatctgaacaaggagagctactggtggtatctggacctacggcgatatggatcagttccccacgccggtttcggtcttggatttgagcggcttgtacagtttgctactggaatagacaacatcagagacgccatcccatttccccgagttcctggctcagccgagttttaggcttcctttcgaatgtaggaattttatggggatggtatatgaatttcacaggaaatggttcaaaaacacatgaattatcttttaatccaaaggaggccttagcgccccgaaagtgttgtcatttgtttcatcattgtacagagttgagctgagactcgtggttaatcgagccaaccagtgttgtggcatgcttctccaaatatatatccagcaggtgctcctgactcactccatcttgcttgcagtcgttgacgaaggcttgcttcactcacccgacgatcctaaaccatgctatctccagcagtcttactatctcatcccctaaaacagtgtaatctacatattttgtgagtctatatatacgctct

SEQ ID NO: 66625 - DNA, 1673 bp, Zea Mays
ttaggtcaatgatggctcttgcttgtccaatatgcaatgtgtgttgactcctgaaacagaaggctatgaccagactctgtcactactggagcatctgtactagttgagggagttgttgcaagcagccaaggcggtaagcaaaaagtggagttgaaggtttcaaagatcactgtgattggtaagagtgaccccacatcttttcctatacagaagaaacgggcatcaagagagttccttagaactgtagcccatctccgtcctcggacaaacacttttggtgcagtggcaagagtgagaaatgctctggcatacgcaactcataaattctttcaagacaatggatttgtttgggtttcaagcccaattattactgcctcagattgtgaaggagctggggagcagttttacgtgactactttgctttcgaatagcaccgaaggtggttccctactcaaagatattcctgcgaccaaggatggaagggttgattggtcacaggatttcttctgcaaaccagcatttctgacagtatctggacagctcaatggtgaaacatatgcttcagctctatctgatatttacacatttggtccaacgtttagggctgaaaattcaaacactgcaaggcatctggctgaattttggatgattgaacctgagcttgcctttgcggatctaaatgatgacatggcttgtgcaactgcatatctccagtatgtagtaaagtatattctagagaactgcaaagaggatatggatttcttcaatacatgggttgagaaaggcatcatagatcgattaaatgatgtagtagagaagaactttgttcacttgtcttacactgatgctgtcgagctactacttgggtccaagaagaaatttgagtttccggtaaagtggggtttggatcttcaaagtgagcacgagcgatatatcacagaagttgcctttgatgggcgccctgtaataatcagagattacccaaaggaaatcaaagctttctatatgagagaaaatgatgatgggaagacagttgctgcaatggatttgttggttcctcgggttggtgagcttattgggggaagccagagggaagagcgtcttgattaccttgaagcccgactagacgagcaaaatctgaacaaggagagctactggtggtatctggacctacggcgatatggatcagttccccacgccggtttcggtcttggatttgagcggcttgtacagtttgctactggaatagacaacatcagagacgccatcccatttccccgagttcctggctcagccgagttttaggcttcctttcgaatgtaggaattttatggggatggtatatgaatttcacaggaaatggttcaaaaacacatgaattatcttttaatccaaaggaggccttagcgccccgaaagtgttgtcatttgtttcatcattgtacagagttgagctgagactcgtggttaatcgagccaaccagtgttgtggcatgcttctccaaatatatatccagcaggtgctcctgactcactccatcttgcttgcagtcgttgacgaaggcttgcttcactcacccgacgatcctaaaccatgctatctccagcagtcttactatctcatcccctaaaacagtgtaatctacatattttgtgagtctatatatacgctct

SEQ ID NO: 66626 - DNA, 1664 bp, Zea Mays
aggtcaatgatggctcttgcttgtccaatatgcaatgtgtgttgactcctgaaacagaaggctatgaccagactctgtcactactggagcatctgtactagttgagggagttgttgcaagcagccaaggcggtaagcaaaaagtggagttgaaggtttcaaagatcactgtgattggtaagagtgaccccacatcttttcctatacagaagaaacgggcatcaagagagttccttagaactgtagcccatctccgtcctcggacaaacacttttggtgcagtggcaagagtgagaaatgctctggcatacgcaactcataaattctttcaagacaatggatttgtttgggtttcaagcccaattattactgcctcagattgtgaaggagctggggagcagttttacgtgactactttgctttcgaatagcaccgaaggtggttccctactcaaagatattcctgcgaccaaggatggaagggttgattggtcacaggatttcttctgcaaaccagcatttctgacagtatctggacagctcaatggtgaaacatatgcttcagctctatctgatatttacacatttggtccaacgtttagggctgaaaattcaaacactgcaaggcatctggctgaattttggatgattgaacctgagcttgcctttgcggatctaaatgatgacatggcttgtgcaactgcatatctccagtaaagtatattctagagaactgcaaagaggatatggatttcttcaatacatgggttgagaaaggcatcatagatcgattaaatgatgtagtagagaagaactttgttcacttgtcttacactgatgctgtcgagctactacttgggtccaagaagaaatttgagtttccggtaaagtggggtttggatcttcaaagtgagcacgagcgatatatcacagaagttgcctttgatgggcgccctgtaataatcagagattacccaaaggaaatcaaagctttctatatgagagaaaatgatgatgggaagacagttgctgcaatggatttgttggttcctcgggttggtgagcttattgggggaagccagagggaagagcgtcttgattaccttgaagcccgactagacgagcaaaatctgaacaaggagagctactggtggtatctggacctacggcgatatggatcagttccccacgccggtttcggtcttggatttgagcggcttgtacagtttgctactggaatagacaacatcagagacgccatcccatttccccgagttcctggctcagccgagttttaggcttcctttcgaatgtaggaattttatggggatggtatatgaatttcacaggaaatggttcaaaaacacatgaattatcttttaatccaaaggaggccttagcgccccgaaagtgttgtcatttgtttcatcattgtacagagttgagctgagactcgtggttaatcgagccaaccagtgttgtggcatgcttctccaaatatatatccagcaggtgctcctgactcactccatcttgcttgcagtcgttgacgaaggcttgcttcactcacccgacgatcctaaaccatgctatctccagcagtcttactatctcatcccctaaaacagtgtaatctacatattttgtgagtctatatatacgctct

SEQ ID NO: 66627 - DNA, 1705 bp, Zea Mays
gtcaatgatggctcttgcttgtccaatatgcaatgtgtgttgactcctgaaacagaaggctatgaccagactctgtcactactggagcatctgtactagttgagggagttgttgcaagcagccaaggcggtaagcaaaaagtggagttgaaggtttcaaagatcactgtgattggtaagagtgaccccacatcttttcctatacagaagaaacgggcatcaagagagttccttagaactgtagcccatctccgtcctcggacaaacacttttggtgcagtggcaagagtgagaaatgctctggcatacgcaactcataaattctttcaagacaatggatttgtttgggtttcaagcccaattattactgcctcagattgtgaaggagctggggagcagttttacgtgactactttgctttcgaatagcaccgaaggtggttccctactcaaagatattcctgcgaccaaggatggaagggttgattggtcacaggatttcttctgcaaaccagcatttctgacagtatctggacagctcaatggtgaaacatatgcttcagctctatctgatatttacacatttggtccaacgtttagggctgaaaattcaaacactgcaaggcatctggctgaattttggatgattgaacctgagcttgcctttgcggatctaaatgatgacatggcttgtgcaactgcatatctccagtaaagtatattctagagaactgcaaagaggatatggatttcttcaatacatgggttgagaaaggcatcatagatcgattaaatgatgtagtagagaagaactttgttcacttgtcttacactgatgctgtcgagctactacttgggtccaagaagaaatttgagtttccggtaaagtggggtttggatcttcaaagtgagcacgagcgatatatcacagaagttgcctttgatgggcgccctgtaataatcagagattacccaaaggaaatcaaagctttctatatgagagaaaatgatgatgggaagacagttgctgcaatggatttgttggttcctcgggtaaaagcacagagtaacagaccatatataaaattcttagcatgttggtgagcttattgggggaagccagagggaagagcgtcttgattaccttgaagcccgactagacgagcaaaatctgaacaaggagagctactggtggtatctggacctacggcgatatggatcagttccccacgccggtttcggtcttggatttgagcggcttgtacagtttgctactggaatagacaacatcagagacgccatcccatttccccgagttcctggctcagccgagttttaggcttcctttcgaatgtaggaattttatggggatggtatatgaatttcacaggaaatggttcaaaaacacatgaattatcttttaatccaaaggaggccttagcgccccgaaagtgttgtcatttgtttcatcattgtacagagttgagctgagactcgtggttaatcgagccaaccagtgttgtggcatgcttctccaaatatatatccagcaggtgctcctgactcactccatcttgcttgcagtcgttgacgaaggcttgcttcactcacccgacgatcctaaaccatgctatctccagcagtcttactatctcatcccctaaaacagtgtaatctacatattttgtgagtctatatatacgctct

SEQ ID NO: 66628 - DNA, 1686 bp, Zea Mays
gtcaatgatggctcttgcttgtccaatatgcaatgtgtgttgactcctgaaacagaaggctatgaccagatagactctgtcactactggagcatctgtactagttgagggagttgttgcaagcagccaaggcggtaagcaaaaagtggagttgaaggtttcaaagatcactgtgattggtaagagtgaccccacatcttttcctatacagaagaaacgggcatcaagagagttccttagaactgtagcccatctccgtcctcggacaaacacttttggtgcagtggcaagagtgagaaatgctctggcatacgcaactcataaattctttcaagacaatggatttgtttgggtttcaagcccaattattactgcctcagattgtgaaggagctggggagcagttttacgtgactactttgctttcgaatagcaccgaaggtggttccctactcaaagatattcctgcgaccaaggatggaagggttgattggtcacaggatttcttctgcaaaccagcatttctgacagtatctggacagctcaatggtgaaacatatgcttcagctctatctgatatttacacatttggtccaacgtttagggctgaaaattcaaacactgcaaggcatctggctgaattttggatgattgaacctgagcttgcctttgcggatctaaatgatgacatggcttgtgcaactgcatatctccagtatgtagtaaagtatattctagagaactgcaaagaggatatggatttcttcaatacatgggttgagaaaggcatcatagatcgattaaatgatgtagtagagaagaactttgttcacttgtcttacactgatgctgtcgagctactacttgggtccaagaagaaatttgagtttccggtaaagtggggtttggatcttcaaagtgagcacgagcgatatatcacagaagttgcctttgatgggcgccctgtaataatcagagattacccaaaggaaatcaaagctttctatatgagagaaaatgatgatgggaagacagttgctgcaatggatttgttggttcctcgggtaaaagcacagagttggtgagcttattgggggaagccagagggaagagcgtcttgattaccttgaagcccgactagacgagcaaaatctgaacaaggagagctactggtggtatctggacctacggcgatatggatcagttccccacgccggtttcggtcttggatttgagcggcttgtacagtttgctactggaatagacaacatcagagacgccatcccatttccccgagttcctggctcagccgagttttaggcttcctttcgaatgtaggaattttatggggatggtatatgaatttcacaggaaatggttcaaaaacacatgaattatcttttaatccaaaggaggccttagcgccccgaaagtgttgtcatttgtttcatcattgtacagagttgagctgagactcgtggttaatcgagccaaccagtgttgtggcatgcttctccaaatatatatccagcaggtgctcctgactcactccatcttgcttgcagtcgttgacgaaggcttgcttcactcacccgacgatcctaaaccatgctatctccagcagtcttactatctcatcccctaaaacagtgtaatctacatattttgtgagtctatatatacgctct

SEQ ID NO: 66629 - DNA, 1647 bp, Zea Mays
gtcaatgatggctcttgcttgtccaatatgcaatgtgtgttgactcctgaaacagaaggctatgaccagatagactctgtcactactggagcatctgtactagttgagggagttgttgcaagcagccaaggcggtaagcaaaaagtggagttgaaggtttcaaagatcactgtgattggtaagagtgaccccacatcttttcctatacagaagaaacgggcatcaagagagttccttagaactgtagcccatctccgtcctcggacaaacacttttggtgcagtggcaagagtgagaaatgctctggcatacgcaactcataaattctttcaagacaatggatttgtttgggtttcaagcccaattattactgcctcagattgtgaaggagctggggagcagttttacgtgactactttgctttcgaatagcaccgaaggtggttccctactcaaagatattcctgcgaccaaggatggaagggttgattggtcacaggatttcttctgcaaaccagcatttctgacagtatctggacagctcaatggtgaaacatatgcttcagctctatctgatggctgaaaattcaaacactgcaaggcatctggctgaattttggatgattgaacctgagcttgcctttgcggatctaaatgatgacatggcttgtgcaactgcatatctccagtatgtagtaaagtatattctagagaactgcaaagaggatatggatttcttcaatacatgggttgagaaaggcatcatagatcgattaaatgatgtagtagagaagaactttgttcacttgtcttacactgatgctgtcgagctactacttgggtccaagaagaaatttgagtttccggtaaagtggggtttggatcttcaaagtgagcacgagcgatatatcacagaagttgcctttgatgggcgccctgtaataatcagagattacccaaaggaaatcaaagctttctatatgagagaaaatgatgatgggaagacagttgctgcaatggatttgttggttcctcgggttggtgagcttattgggggaagccagagggaagagcgtcttgattaccttgaagcccgactagacgagcaaaatctgaacaaggagagctactggtggtatctggacctacggcgatatggatcagttccccacgccggtttcggtcttggatttgagcggcttgtacagtttgctactggaatagacaacatcagagacgccatcccatttccccgagttcctggctcagccgagttttaggcttcctttcgaatgtaggaattttatggggatggtatatgaatttcacaggaaatggttcaaaaacacatgaattatcttttaatccaaaggaggccttagcgccccgaaagtgttgtcatttgtttcatcattgtacagagttgagctgagactcgtggttaatcgagccaaccagtgttgtggcatgcttctccaaatatatatccagcaggtgctcctgactcactccatcttgcttgcagtcgttgacgaaggcttgcttcactcacccgacgatcctaaaccatgctatctccagcagtcttactatctcatcccctaaaacagtgtaatctacatattttgtgagtctatatatacgctct

SEQ ID NO: 66630 - DNA, 16003 bp, Zea Mays
gtcactcgcgaggtgctcgaggtaatggcagaattgaaaatcgtagctgtgctcatggccttcaagacatattaagttattggtacgataattgatcgtgtgatgcggaagacgagccaagtcgaccccaagcgcggactactccgcatggagatgctgataaacgaacctacctgatcaagtgctaggacaaggatgatcgtcaagtggacgtcacctaacaacactaacgtagtgtttattccaggcaagccccggtgcatgcaaccccttccttgtgtttttaaataatttttgcacactttaagtctagtgaaatgtgcattaggtttataggagttgcttggaaaccctttgatgcattgccttccttgaaatccatacctttatagatacttctggtgaagtatcaaaatatgatttacaaaaatgcttagccctgctcagatcttgtggatagaggttgtcttttgcgttaaggccttgctcaggggttatcctgaggaaagatggcttctacctgcaagaatattttcattgagaccgtggtgggatcttactgcaaagttccctataatgctcttttcatcctagggagcacaaacactcctaaggatggaagtacttaaatcgggacttgggctaggaacaggtgatgctccgcccgggtcaattaaggattggatgtgtatgtaggcctgatagatcaaggactatcttaactggccacatgccctggaaatgggacagggtaagcttgaacccggctattccatacgtgaaaagacaaccgcgcactgggcgtgggagatggtgggagtagcgtgtgccctcctggctagaggctggatggaggagtactgtgctcccgggtagcgcggaccggttcacgttgtggaggatctgtgggaacggttgacatatgcaagggttaagtgctacatatgtcgtgtggttagagatcctcagctgagtaaatcgattcggatcgccgttatatccccgaagagtggagacttgatcactgacctgcaacctaagtcaggatgtgaacctcatgaataaaaatgatgttgtattgatgagatgatgaaattagaccagatgcaaatagagtctattaatatttaatctggcattaaaatattgaaagtaagaactcactttagtaagctatttctgcaaaagtatctaagttgattcttgctaaagcctctccttgattcctaaatccagcatacccttgagagtcttttctttagtcgggtaagtcttgctgagtaattccatactcagggttttattccctgttgtttttcaggttctaactttgtgctgcttttgatggtgttaagtgccggtgggctcgaccttcttatataagtataacccgtctttatcttcttactgatgatggtcatttgagctagcatatatttcaaacttatacttttgtaatcactccgataaaataatataaaatttttgtaacttgtaaaatttggtaataagatttccgctgcaaaaatattggtgtgtgtgatttgtgttacttaatctcgcggttctggttgtaagtggtttatccggtgtccttggggcaatcggacggatcctgttaagttatctggtgcacatgcacgaccgtctgaggtctttgagacaaggacaggtgcatgtgggcccgataacttggaggttctgccacatcggtgaagacaaaggcttccactccgtaactcatccttcgctgtcgctccgagcaactcttcatctttggtataatcttcactcacatgttatttaccaaagggtgcaaaagtagtttaaaaagggctctaatgatttcgtttttggcgatttatgccaaagggggagagagcatgagcccaaagcaaaaggaccgcaccaccaccaatttcaaaaattttagtctttcaatttggttttaaagaagtattttcaaattggtattttatgtgttatataatttcaaattggtataccctcttcaaaattaacatcaaaaccctcttgaacactaagaggaggatttcattaagggggagttttgtttagtcaaagtaaaagcatttgaaacagggggagaaaatttcaaatcttgaaaatgcttcgcaaaatcttattcatttacctttgactatttgcaaaaggaccttgaaaaggatttacaaaagaatttgcaaaaacaaaacaagtggtgcaagcgtggtccaaaatgttaaaactaaagaaacaatccatgtgtatcttataagtatttatattggctcaattctaagtaacctttgcacttacattatgcaaactagttcaattatgtgcttctatacttgctttggtttgtgttggcatcaatcaccaaaaagggggagattgaaagggaattaggcttacacctattttcctaattgattttggtggttgaattgcccaacacaaataattggactaactagtttactctagtctataagttatacaggtgccaaaggttcacaaaaagccaataaaaagacaaagaaaagggttcaacaaaaagagcaagggacaaccgaagtgtgccctggtctggcgcaccggactgtccggtgtgccaccggatagtgtccggtgcaccagggaactccaagcccaactcaacaccttcgggaattctcagaggcgctccgctataattcaccggactatccggtgcaccaccggacagtgtccggtgctccaaggaagagcgactctgaagtcaccagcttcgggaatccgctccgctataattcaccagacatgtctggtgcacaccggactgtccggtgagccagcggtgcaacggctacttcgcgcgcaacggtcgactgcaacgcattaaatgcgtgcctgcgcgcgcagaggacagagcacacgcgagtggcacaccggacagtctacaggacttgtccggtgcgccaccggacagccatgtgggcccataagacagagctccaacggtcgaaacccaacgacctggtgacgtggctggcgcaccggacagtgtccggtggcgcaccggactgtccggtgcgccatgcgacagcagcctccaccaaacggctagtttggtggttggggttataaatacccccaaccaccccacattcaagtcatccaagttttccaccttccaactacttacaagagctcttgcattcaattctagacacacccaagtgatcaaatcctctcccaattcgacaaaagctttagtgttaagtgagagagatttgttgtgttcttttgagctcttgcgcttggattgcttctttctttcactctttcttgcgaacaactcaattgtaaccgaggcaagagacaccaattgtgtggtggtccttgcggggaagttcgttcccgtttgattgagaagaagaagctcactcggtccgagggaccgtttgcgagagggaaagggttgaaagagacccggtctctgtgaccacctcaacggggagtaggtttgcgagaaccgaacctcggtaaaacaaatccgcgtgtcacactctctattcgcttgcgatttgttttgcaccctctctctcggactcgattatatttctaacgctaacccggcttgtagttgtgattaagtttgtaaatttcagattcgccctattcacccccccctctaggcgactttcacacacgctgtcagtttgctactggtcaccccaaccgttgcgcccgtctttgcggtaaactggtgtgtggccccccacgcatggcggttcggtcgtgccccgcgcgcgtggggcgccctgttggcaccgcccatgttgagaatacttttcagcagcggccccaaggcggcatgggagcgcacggcggtttgttcttcctgcgcatggagaccagcgccccagccatgtgacttgcaggctcgggttcctctgtcagcgactgagttgctcgggcgctaggtacgcgccacgcggatttttccggagcgtgtgaggagccatctcttgaaggagggtctcttgtgcgcagtggttttgcctccgcattctttcctaactgctctgccttttcgcctccgagctttcctcgcttctccgtgttcgtgctcctcagtttccggccgccgcggttgccatggcctcgctggttcgccctgatcactaccagactgaggaggcgctcgactcggtgcgccgtatgctcggatggggttcgcctgcgctcgccgggaggatccaggccagcactattcccctcggcaatcttgtcgtgggggagtttgtgctcttcgtctcctatctcttctgcggattggcgctgccgatttcgccgttctttctgttgttgttggaggagttcgggctccaactccagcatctcacgccccactccattctccatgtagccatctttgttcatttttgtgagatgttcgtgggagtggcagcttgtacttccctctttcgccagttttttgtgttggtgaggtctgggaagggcaaagaccacgttggggcctactatttccagacaaggtcagatccgacagtgacctacatcgcctctcttggcaacacgaggtgggagaactggcgacacaactgggtgattgcccatactgaggtcagcgaccgtcttgcccttccgagtgacgggcccaatctcagccggaagcagtggagggaaaaaccacgcttggtgctagagtttgtgcccatcctggataggatcaaggaactagcggttggcggcctaacctcaatgcacgtactcggtgatttcctgaggcgccgagtcatgtcactgcagggaaggccgcgtctgtgatgttggttcaccggctccagtgacattggtaggatcctgcgcgggcctaggactgacctgacctgggaggagttggaaattttcgtgagggggattaccggtgaggctttcatccccaaatccttgatgcctccccagggcatttcaccactctgcgacgacccagggttgcggtcagcggtgctggtccggctgccgacccttgatgagagtggtgtggcggttctccagaccggcggccgggacccccattgggggatccatattcctggtacaccagccggaggcccccagcctgttgatgtggccctcagggtccccctgtggggcccagcttctcgggcaaaggcaaggagcctgcatgcagctcctttaccccggacgtcgccgagaggcagggggaagaggggcgacctcgactacatcgcgccgatgggtcctttgtttcggacccaccccttgattcggccaccgggaggtcggggggaagaaagacgacatcgactgcgtcgcgccgatgggtcttttgtctcggacccaccccttgatcgggctcctcccagaagcgccagaaaacggttggtggggcaaaggaggccgaacctcaggcccaggacaggcagaggggcgtgagccctccaacgctacctcctttggatttgactccaccaccgccgccgcccatgacggaccaatcgtcaccatcgcaggggcagcggcagcaacgacaacgggtgccccgcttccaaggccactgggaagttcatggcaccaagtaagcttaagctcttcctaatgtcatatttcgagcatagtttttagctgacgggtcatggaccgcccttttcctgtcagggcccctccttcttcaacttccacaggcgctcgtaccccttcggtcgtcgtgcccgccggtgggtctggttcccagcagcgtacacccgccgaggacgttgtcggcgatctgtcagcggctaccgcatcttcagcatcagcgtcggtgccaaatcctccattgacagtggtcgaagaggttcccattatacttacctccaccgcgctgggtggcactggtgctggggtggcgccgttgaacccccaggatccgcctgtcactgtcgaggcggcaccttcgggtccccgagttccagctgagggtccagaggtaacgctgttgccaacagccgctgagggcctagcggcggggataccgttggatgcaccgtcggcgacaggcgtgggaggcgcgcccagctctgttccaccaccaactacggggtctctggaggttatccttgggcaaccgctccggtctggcaccgaatctgaagcaacgctgactcccctccctcgggtgctgtcccgcgctcaccaggctctccgggaaaccgaggtggctatccggcgggagtgggaggcgctcgagaccgagcaccagcgccttggcgactggtgcacccaactggaggagcgcactaaggcggtgtcctgccattttgcctcagaacgggccgagtttgagcaggagcgtgaggacttcaaggaggacatccggaaggtgtctgaccaggaggacgaggtgatccagaagaagaaaagcctggctaggaaggagatacgcttagaccaaagggaggagaccgtcacagcgctccaagctaagctgaaagcttataatacggtgctggagaaacagcgggtcaagcaggctgcggttgaggtgaagctgcagaagctgcagcaggagctcgccgacagggccagcgacattgctcgtgccgagggaagcctcgggggaagcttcccttgtgaaacgggcagctggtcttacccggcaggaggaggacctcgccttcagggaggagatgtgggcaaggcagaacaagctgctggatgagcttgagctcgaggacgaggagaggaggaagcgtttggaggagaaagtgtgggctctggaggagcaggtccgccagtttcgggcagcgcaagttgctcaggcgacgcagacagcctcgggcccctaggcagtggaggcgatgcagaagatactcgacgacctgcgggctgagcaacgtgccggggcccagcgcatcgctgcctgggccggcgaggcaagcacgacgctagtgccgttgggggtgagccccatcccggcactggtgcggccggcgtctatctccgacgcgctcccggtactggattctactgttgatcgccttcgacgtctggatcggattcttggcgcccgcttggaggccgagggcagcagactttgccggtcggcaatagaatacgtcttgacatgcttccggagccatgatccggctgtctccttggggccagtcatcgcaggtccggtggccaacgctgaagatgctgctcgtgagggcgtgcaggacgttgtggacgcggtggccgagcgctttcagcgggatcctactggtgatgagtagctaggcctgcgtggagaaaacgaggtttccgctggggagcgggttgtaatataccattgatttcacaagatactcttcaggtactacttactgggcaatattataacttatctgcacaccacttttcctttgctgcgtgcaccgttaccaacttcttccttggtacttggcccccctgggatatggcctcgacgcgtcggggctggataccaggattcgtaattggcaactgatgtcgtgaccctcaaggggagctcccaactgggacttgacctgcacacagtcttggcaaggtatttttagtagtgcgcccatagggtccgccggctggtatttcttatcctttgatttacgcaataggaccgatcgtggggcggtggggcgtgtaggcttacggtacttgaccataccaagcgacttcacgacccctaaccatcccaccgcctggttaccgggtctggctactcagctcggatgtcacaataccagccagggaataaaactgcatgagtggtgagatagcaataatggtcgcaaactgtatgattaaaatccacataagaacagttatgtgggtcgaaccccttccttataactcgatatacacaggcgcaggccaacaggccgggtttatttgagggcggacctccccgggctggcgcttataagtgtgcttcttggttacagggaaagggaccgaacccccaattatgtctttatgggaaaaacttatggagatgttctatgttccaaggtttgggaagaggtactccgttggctgtggcaaggcggacgcatccggggcagcatatttctgtcactttgaaggatccttcccaactgggagagagcttatggagcccttctcggttcagtatttgcctcaggaccagatccccgaccccaagcttcctactatgcacgaaccgctggtggtagcacctgagcgcctggttgtatcgtgcatttcggattgacgcttgtcacctgtgttcgtcgatgaagtccacatcttcacgtcgcagctgttcctacgcagactcatcaaaagactggactcgtggggagcccataatgatttccggaggaaggcaagctttagccccgtataccaggaagaatggggtctccccggtggctcggctgggcgtggtccggttcccccataacacggatgggagctcactgacccaatttgcgccatgcttttttaagcagtcataggtgcgcgtcttgagtcccttgaggatttctgcatttgccctctccacctgcctgttacttctggggtgggccacagatgcgaagcagagctgggtgtcgatgtcctcgcagtattcctgaaagatccgacttgtaaactgggtcccgttgtctataatgatatggcatgggacctcgaatctacatacgatcgacttgaggaaggcgacagcagcactctgggtaatgttgaccacaggggtggcctctggccacttggtgaacttgtcgatggcgacaaagaggtaccggtagccaccgatggccctgggaaatggtcccaggatatccaccccccatacggcgaacgaccaggagggcagaatcatttgcagagcctgagccggtgtgtgtatcagctttgcgtggtactggcacgcttcgcaggactttactagctcggctgcatcctggagggcggttggccagtaaaaaccatgctggaaggccttaccgaccagcgtgcgggatgaagaatgacttctgcactcccctccatggatctccgtgagtaactcacagccctcctcctgggtgatgcaccgcataagaataccattggcgccgtggtggtagagatccccttctaccgtcgtgtaccgtttagccaaccgtactatgcgttctgcggagacatggtcttcaggaaggatattttccttcaggtagtcccggatctcggagatccatgcatcgggaccactctgagttgttggttgcggagctaggggctggtgaatccccccagtgcacacaccacctttggtgggtcctgggacgccatcgggaccgtcggcttcgaggtgccggtctcgcccccctcgctcagtttggctggccgggcggtgggtctcagtaaccgccttttgaaggcgccctcgggcgcgggtgctcgagttgatgctctctgggagaggtcatctgtcgttgagttgtcggccctgggaacatgttgtagttccaaggccgcaaagtccttctctagcttctttacatgaaggaggtaagctgcgagcctgggctcattgcagctgcattccccacgggtctgcttgatgattagctgagagtcccccttcacaaggagctggcggacccccagggatagggccgtagataggccgaagatcagtgcctcatattcttccatgttgttggtggctttgaactcgaggcgtaccacatacttcaactggtccccgtctgggccgacgaggaccactcctgcgccagcactctcttggcgggtagacccgtcgaagaagagtgtccagtggtgttcggtgaagactgggcccccgcgccccgcaggtgtggggcctggctcggggtccgggcccccaggggcgtacgggggtggagtccactccacaatgaagtcggctaggacctgactcttgatagcgtggcggggctggaattcggcgagctccgctgcccatttggtgatgttgccagtggcgtttgagttgtggaggatggccctcaatggaaaggaggtcaccaccacaactctttgcgcctggaagtagtggcgtaacttcctggacgcgaccaggacagcatagaggagcttatgtgtctcgaggtacctgaccttcgcttcatggaggacctcgctgacgtaataaactggtttctggacggtccgggcgccggatgctggttctgagttctcaggtctctgtccttctagtgtcgccctttcggcgactaacaccatgctcactgcttctgcagccgccgcaatgtacaagtacagcatttctcctggatctggggcaaccaggattggcagggaggttaggtgttgtttcaattcccggaaggcttgttccgcctctccggtccaagcaaaagggccagatttccgtaggagcttgaagaagggcagagccctctcagtcagccttgaaatgaagcggctcagagcagccaaagatcctgtaagcttctggatgtccttgacacgggcgggaggcctcattatcttgatagccttgattttttctgggttaatgccccggtatgaaaccaggaaacccagcagctttcctgcgaaaacgccgaagatgcatttctccgggttcagtttggtgcgggttgcccgcagcttgtcgaagaccagggttagatcttctactacagtcgacccccttctagtcttgaccacgatgtcatcgacgtaaacttccaccttgtcccggatcaggtccccaaaggtcttactcatcgcccgaacaaatgttggcagggcatttttcagaccataaggcatcacaacataacagtacaacccatctaccgttacaaaagcagtgtgcttcctatcttccctagacatccggatttgatgaaaaccggagtaggcatctaggaaagacaaaaagtcacaccctgaggtagagtccacgatctgatctatacgtggaagtgggtacgggtccttggggcatgccttattcaggctggtgtagtcgatgcacatccgaagtttcccgtttgcttttggcacgatgactgggttggtcagccacacggggtggtgaacatcttcaatgaagccagcgtgcaacagtttttgaacctcctcacggatgaagtcatgtcgttccacggactgtctccgaggcttctggcttactggcttggcgttcggatatatcttcaaatggtgctcaatcacctccccggggatcccaggcatctgcgatggctcccaagcgaatacgtcggaatttgcccggaggaaggtgacgagcgcgagttcctatttctctcccagatctcccgcgatgcgggtggtcccgggatgggtctgcgccgacctggatggtcttcgcagtcacctttgagtgcccgtcgtctgcttcggttggttgcaccttcggtgctttggcgccgggggctaaggagcttcttcctccgtcgtttggccgagcggtctcagccgctagggtgtgtagtttttcaacagccgccagagcggcggtgcggtcaccccgcacggtgaggactcctgcgggggatggcattgttggggacttgttctcaaatgctatgattcaagaacaaggcaacataaaatattaaacattaatgcccttcgtccgctgaagcattatctccccaaggatttaatgaacttcggacgaagaccatgagtaaaatattacgaaggccataccttcgtgaacagacttataaaaaatgtgaaataaaatataaaacatgaagtattagaaagagatatgccatagatagataacattattcacatattttattatatgaattcaaatatcaaaacataatacttaggcatattgataccttagccttgacaggagacaataattccaaagcaatgtgtttgcaagtacagaaaaaataacgtgaacagtaaaggaatactgttcactatttataggcacaggacacagcctgtaaggaattacaatcgtaccccttataaaagtttacaacaatgactcagacccttatggactaaaaggtcattccatctttaagtcggttcgatccttcatcttcggatacgctataacaccgaagcttcatgagtggtagcttcggcattacatataagcagctttttgccgaagctgtttctccttgcaggaccttcggcgatgaagcatggtcccaacagtagccccttcgcggtgctagatcgtttttcgtaacgagcttgatccgtgaaaaaagtctcttaggcttcgggaagccgaaggtccgaaaaacaccttccctgagctcgttgctgagaaacgatacagtttctgagcgtggagcggtcccaccatgcaggttcacttgatttttgcggcccaccgttcagtgggtgcgagcgactatttgtccggtgtaaaaatcttgacgattcaccttcttacctgcaacactgtataaacagacaggtaggtgtgaagttaccacagcattcattgctattgcactgttttgctgccaaaaaattaaccatagccgaagcttgacttttgcattcaaacgaagctccagtttttaattttgcttcgtcacgagaagagcttcggaaagaaggttattaatttccaaaggattctcaagaagtttaaattcaaatggccagagtacgctccactgctagggttgagcgtgatggagatgagaccgaagccgctgaaactattccgatctccgaagcaatgaggcgttctgggctggtttcatcagaggacacacctgctgccgaagcaacacaagctgatgttgaagaagttggttccaaagatgagtacagctgcgggatgccaagtaaacctagtcacttggagtttggaaagtccaccatctttgaagctgatcttcccaaaatggtgaagctgggctacttcagtgaagcaaaaaaggagctgattcgttttggcgaagaggaaattactccgaagccggaaaagaatgaggttgtagtgttcaaaagcttctttaaagcaggattaagatttcctttgaatgagatgattgctgatgttttgaagaagtttggggtttaccttcatcagctgacccctaatgctatcgttagattaagtgtttatatttgggcccttcgtagccagggagtggaaccgttcggtgagggtttctgccgagttcatgaattacactaccagactaaagccagaggagatggtctgcatgagaattttggctgttacaactttgcttatcgcaagactacgaagtttccagtgataagctaccgaagcaaatggccagccggatggaagtctgaatggttttatgttaaagttgataaagatgaagataagttggtccagagtccgctagagctaaccttcggagagacgagaccccgatgcaacatgataagggggagcccaagccagcttgctttggctgaatttcgcgtgatttcagatcatattggcactagagacttggtgcaggaatttctggcttttaaagtgttcccaacaatgagggagtgggagatgccgaagctggagggtgagaagaaaaagggagaacttgttcgattgccttattactacaagtttaagaaacactttaaaaaaccctgccaggagtggttggacacaatcgagattatgtgcaacgatatcctcggaaattattctaagaaagaagatcagttgatgactgcagctttcggcacccgtccgaagcgaagattgaatcgtgtgctagatgctttgaattttgattaccctgattatgaacaactgggcagagatgccgaaggcccgaagagaaagaggattgccagcgccctgggcaaagaaagcaccaaattggctaaaaaggaaaaagaaatttctgaaaaacagagccctgagccaaagatggctgctccaaggaaaagaaaagttgcatctccaaaacctgcatctccaaaatcaaagacatcggcccgagaggaggaagctcctgcaacaccttctgctgccgaagtggaagagattctgaaggtaatgactgaacttttgcctgtcaagctaagtccgctggcgccagaactgacgaagttttttcagaaggacaaagaagcttcgacagcagaaagtcccgcaaagccgaaaaagcgaagaattatccaagtggctgatgtgattcatcagacaccgccaccgacatcggcgtcaaaaattgtcatggccgaaaccacagccatcggagccgaaaccaccggagccgaaaccggcggagccgaagccaccggagccgaagccggggccaccgaagatcctaacctggaaaccacgcttgatgatattgacaatatacttttgaaaatggctgaagaagaagctgttgtggttgcggtgaacatgacaactgaaaaaggaaaagagcagattgaggacactttggaagaaggaaattttaattttcaagatatacttggacaagagttaacagacgctgaaaaggaagagctaaagaaatatgctatatcctgtggatacaaaccagggtctctgctatttggtggggtcaatgaagggaagctgagatgccttcgcaaccgaaccgaggccaaagttgttaggaccttctcaaaaagcgttggcctgccgaagatagaagcggacctctgcaggtaccagcgacaacatattgccagtagcttgctctatgctaatttcaaggtaaaaactcgactttttattgttttttgaattaatatattttctaacgaaagttgttttggcagagtatacttctaagtatagtgctgagaatgcaacaagatcttgaagatgagaaaaacgaagctaccatcaaagatctagaaaacaaagttagaaattacgaagctgctctgaaacaaaaagactccgtcattcaaggccttgaaatcaaagttaaagatcacgaagctgccttggaaaagaaagacttcgtcattggttctatggaaggttcactggctgaagcccaagccgaaaataacaaattaaataatgaattacttatgaagtcagaaaaatctgagcaggaaaagaagaatatctaaacaaatctcaagaccaaaatcgagaagaattcaaatttgcaaaaatcattgaaggagcttcaggagaaatgcttagatttcgggagccgatgtgtgcagcggctgaaggatgtgtttcacttaattggagccagctctgataagtttacaccttcagctgaaaacctgccaagcaccttggaattcattgagggcgaagttgatgcacttgacgaagttattgttgggcatgctgatttctgcaccctgctagcttctcgaggcacggctaccgctttcctgaaggctggctgcacacacggaaagattgtaaataggccaaacttcagtttgtcgccggcagatttggttgacatcccaagcctagcccgaagcataggaaacaggtttatgacccagatttgggtaaacggcgggcgaaaaatagctggtgacgaagctcggagccaccttaagccagtgagaaacttatacttgttacttttaccttctccttgaactctgcacatttcttatttcattttaatatgtgcaggatgatgaaactgaagaatgacaagctgaagcttaacagatgctccaaaggactttttctgcaaaagattctagaaaaattgttgtaatataattgtataaaaacttatgtaaatttgtgcgtaccttgtaatatatcttttcccctttattcgtgtacgatctgctttgctgtcgacgaaattttatttttgagccgaaggcgaaaaacaccttcccttcttttcgtacgcaacgaagcatgagaatttcctttttctccgaaatgttttcctcataaccgaagcatctgccttttctgtatgatatgatgataatgatcctatatatgtctaaatgaatgtttatg

SEQ ID NO: 66631 - DNA, 1754 bp, Zea Mays
cacgagaattccatcgccgcggtattaaaaagtccctcccacgccgccgccacctaaacctcctcactcctcagactcctctccgcacataccctccctacctcgccgtcgccgtcgcatctgccatgggggcgtacaagtacgtctcggagttatggagaaggaagcaatccgacgtgatgcggttcgttcaacgcgtgcgctgttgggagtacaggcagcagccggccatcgtccgcctcacaaggcccacccgccccgacaaggcccgccgcctcggcttcaaggccaagcaggaagaggcctgtgccgaagggtattgtctatggcaagcccaagcaccagggtatcacccagctcaagttccagaggaacaagagatctgttgctgaggaacgggctggacgaaagcttggtggactcagggttctcaactcctactgggtgaatgaggatagcacctacaagtactttgagatcatcctggttgatgtggcccacactgccatccgcaacgacccaagaatcaactggctatgcaatcctgtgcacaagcatcgtgagctccgtggtctcacctctgcaggcaagaagttccgtggcctgcgtggcaagggccacactcaccacaagaacaggccgtcgaggagggccacctggaagcgcaaccagaccctgtccctccgccgctaccgttgagcacacacatcttgaattcttgatgctctgctaccgtggaacccgccccatgcaggctctgatagtatttggtatttttgttgcattgttaaattttgctacccgtgttccttccgagccccttgaactgtgttgtcagtgtaccgtggagcaagtgtcgcgaactatatttgtggttctcagtcaatgaaaatgattgtttgtagtttattgctgtgtattctttctggcacgatggatttagttttgtggcggcagctgttttttttatctcatgctggttgatgtaaactgccttaacctttggtttgccatggtacatggatttagttttgcggtggtagtagatttctgcccggagcctgacattattctctgggtcgcgctggaattttgctctgacattatataaagaatttatgcttagttgttttattaaattttatccacattatataaataaatttatgactgtttgttcgtgttatttaagcattctttcgttaaatttcatccatattaaataaaccaaaaaaatgtcaacataagttttggtttatatatacgcgggtgcgatttaataagaagtttaaatagagcgtagtagttagcataagttatttttataatatcgagtaaaagtaataaatatttttatttttattttgaccaaaatgtcacagctaagcaccgaaacatgacccaatttgcgtacacgaaacagtgccccaggaggcacatgtgcatcttatcggtggtaatttggtcatttgggtgtccattaagggctggtttggtgaccattaatagcaagagattttctatttcataaatatctttcaaatttctggtcatcaaactaatcttaaagatgatagttcttaaaaataaagtttctggaatgaagtttgaaaacaatgtcaaataagggattctatagttttttttcaaggctagactttctctctagcatatattgctcatgtcttcatatccctcctttatatcacctagcaacatcatttatatatgtctctagcaacatcatctatatc

SEQ ID NO: 66632 - DNA, 1193 bp, Zea Mays
cacgagaattccatcgccgcggtattaaaaagtccctcccacgccgccgccacctaaacctcctcactcctcagactcctctccgcacataccctccctacctcgccgtcgccgtcgcatctgccatgggggcgtacaagtacgtctcggagttatggagaaggaagcaatccgacgtgatgcggttcgttcaacgcgtgcgctgttgggagtacaggcagcagccggccatcgtccgcctcacaaggcccacccgccccgacaaggcccgccgcctcggcttcaaggccaagcaggggtatgttgtttaccgcgtccgtgtgaggcgtggtggcaggaagaggcctgtgccgaagggtattgtctatggcaagcccaagcaccagggtatcacccagctcaagttccagaggaacaagagatctgttgctgaggaacgggctggacgaaagcttggtggactcagggttctcaactcctactgggtgaatgaggagagggctggacgaaagcttggtggactcagggttctcaactcctactgggtgaatgaggatagcacctacaagtacttcgagatcatcctggttgatgtggctcacaccgccatccgcaacgacccaagaatcaactggctatgcaatcctgtgcacaagcaccgtgagctccgtggtctcacctctgcaggcaagaagttccgtggtctgcgtggcaagggccacactcaccacaagaacaggccgtccaggagggccacctggaagcgcaaccagaccctttccctccgccgctaccgttgagcacacacatcttgatgctctgctactgtggaacccgccccatgcaggctctctgatagtatttggtatatttgtttcattgttaaattttgctacatgtgttacttttgagccccttgaactccgttgtctgtaccatggagcaagtgacgcgtacgagtcgatgaaaatgattgtttagtagtgcattgctgtgtattctgtctggcacgattgatttagggcatgtttgggaacacttctttcaaaaccacggtttatattaccatagtttaccgtatgttatgacatgaacatattgtattttacatcattctaattcaacatctgtttggagccgggaggagaaaggccaagacaaggaaggagaaaggggctagactgcgcctgcgg

SEQ ID NO: 66633 - DNA, 1244 bp, Zea Mays
cacgagaattccatcgccgcggtattaaaaagtccctcccacgccgccgccacctaaacctcctcactcctcagactcctctccgcacataccctccctacctcgccgtcgccgtcgcatctgccatgggggcgtacaagtacgtctcggagttatggagaaggaagcaatccgacgtgatgcggttcgttcaacgcgtgcgctgttgggagtacaggcagcagccggccatcgtccgcctcacaaggcccacccgccccgacaaggcccgccgcctcggcttcaaggccaagcaggggtatgttgtttaccgcgtccgtgtgaggcgtggtggcaggaagaggcctgtgccgaagggtattgtctatggcaagcccaagcaccagggtatcacccagctcaagttccagaggaacaagagatctgttgctgaggaacgggctggacgaaagcttggtggactcaggggtattgtctatggcaagcccaagcaccagggtatcacccagctcaagttccagaggaacaagaggtctgttgctgaggagagggctggacgaaagcttggtggactcagggttctcaactcctactgggtgaatgaggatagcacctacaagtacttcgagatcatcctggttgatgtggctcacaccgccatccgcaacgacccaagaatcaactggctatgcaatcctgtgcacaagcaccgtgagctccgtggtctcacctctgcaggcaagaagttccgtggtctgcgtggcaagggccacactcaccacaagaacaggccgtccaggagggccacctggaagcgcaaccagaccctttccctccgccgctaccgttgagcacacacatcttgatgctctgctactgtggaacccgccccatgcaggctctctgatagtatttggtatatttgtttcattgttaaattttgctacatgtgttacttttgagccccttgaactccgttgtctgtaccatggagcaagtgacgcgtacgagtcgatgaaaatgattgtttagtagtgcattgctgtgtattctgtctggcacgattgatttagggcatgtttgggaacacttctttcaaaaccacggtttatattaccatagtttaccgtatgttatgacatgaacatattgtattttacatcattctaattcaacatctgtttggagccgggaggagaaaggccaagacaaggaaggagaaaggggctagactgcgcctgcgg

SEQ ID NO: 66634 - DNA, 1337 bp, Zea Mays
cacgagaattccatcgccgcggtattaaaaagtccctcccacgccgccgccacctaaacctcctcactcctcagactcctctccgcacataccctccctacctcgccgtcgccgtcgcatctgccatgggggcgtacaagtacgtctcggagttatggagaaggaagcaatccgacgtgatgcggttcgttcaacgcgtgcgctgttgggagtacaggcagcagccggccatcgtccgcctcacaaggcccacccgccccgacaaggcccgccgcctcggcttcaaggccaagcaggggtatgttgtttaccgcgtccgtgtgaggcgtggtggcaggaagaggcctgtgccgaagggtattgtctatggcaagcccaagcaccagggtatcacccagctcaagttccagaggaacaagagatctgttgctgaggaacgggctggacgaaagcttggtggactcagggttctcaactcctactgggtgaatgaggatagcacctacaagtactttgagatcatcctggttgatgtggcccacactgccatccgcaacgacccaagaatcaactggctatgcaatcctgtgcacaagcatcgtgagctccgtggtctcacctctgcaggcaagaagttccgtggcctgcgtggcaagggccacactcaccacaagaacaggccgtcgaggagggccacctggaagcgcaaccagaccctgtccctccgccgctaccgttgagcacacaccgccatccgcaacgacccaagaatcaactggctatgcaatcctgtgcacaagcaccgtgagctccgtggtctcacctctgcaggcaagaagttccgtggtctgcgtggcaagggccacactcaccacaagaacaggccgtccaggagggccacctggaagcgcaaccagaccctttccctccgccgctaccgttgagcacacacatcttgatgctctgctactgtggaacccgccccatgcaggctctctgatagtatttggtatatttgtttcattgttaaattttgctacatgtgttacttttgagccccttgaactccgttgtctgtaccatggagcaagtgacgcgtacgagtcgatgaaaatgattgtttagtagtgcattgctgtgtattctgtctggcacgattgatttagggcatgtttgggaacacttctttcaaaaccacggtttatattaccatagtttaccgtatgttatgacatgaacatattgtattttacatcattctaattcaacatctgtttggagccgggaggagaaaggccaagacaaggaaggagaaaggggctagactgcgcctgcgg

SEQ ID NO: 66635 - DNA, 1238 bp, Zea Mays
ccggccaacacgagtgcggcgcgtcatgatgcatggctccacgagtgccgcagttggcacgctcaacggcgcccagcgatgttgacctcgatcgcctgccgctcgtcggccacctctccgccgtttcagaagtctccagttgaagaagcaccggaggaatttgaccacataatcttccctgtcaatcataaaccattccatttgtccagcagaaggcttggccctcaactaaaggggcgtacaagtatgtctcggagttatggaggaggaagcaatccgacgtgatgcggttcgtgcagcgcgtgcgctgctgggagtacaggcagcagccggccatcgtccgcctcacaaggcccacccgccccgacaaggcccgccgcctcggctacaaggccaagcaggggtatgttgtttaccgtgtccgtgtcaagcgtggcggcaggaagaggcctgtgccgaagggtattgtctatggcaagcccaagcaccagggtatcacccagctcaagttccagaggaacaagaggtctgttgctgaggagagggctggacgaaagcttggtggactcagggttctcaactcctactgggtgaatgaggatagcacctacaagtacttcgagatcatcctggttgatgtggctcacaccgccatccgcaacgacccaagaatcaactggctatgcaatcctgtgcacaagcaccgtgagctccgtggtctcacctctgcaggcaagaagttccgtggtctgcgtggcaagggccacactcaccacaagaacaggccgtccaggagggccacctggaagcgcaaccagaccctttccctccgccgctaccgttgagcacacacatcttgatgctctgctactgtggaacccgccccatgcaggctctctgatagtatttggtatatttgtttcattgttaaattttgctacatgtgttacttttgagccccttgaactccgttgtctgtaccatggagcaagtgacgcgtacgagtcgatgaaaatgattgtttagtagtgcattgctgtgtattctgtctggcacgattgatttagggcatgtttgggaacacttctttcaaaaccacggtttatattaccatagtttaccgtatgttatgacatgaacatattgtattttacatcattctaattcaacatctgtttggagccgggaggagaaaggccaagacaaggaaggagaaaggggctagactgcgcctgcgg

SEQ ID NO: 66636 - DNA, 1803 bp, Zea Mays
ccggccaacacgagtgcggcgcgtcatgatgcatggctccacgagtgccgcagttggcacgctcaacggcgcccagcgatgttgacctcgatcgcctgccgctcgtcggccacctctccgccgtttcagaagtctccagttgaagaagcaccggaggaatttgaccacataatcttccctgtcaatcataaaccattccatttgtccagcagaaggcttggccctcaactaaagagaaaaaatcattacgagcaggaaaccttttgtatttgaatattagtgatacctgtgtatggatacgaatccaccacatcccatgaactgaagtatcattgattggaatatcattgattggaaggagctgaacaagatggaatcctgaatcgactgcccgatcaacaagacgtttaggatttagaaattctccaacgccaaggtgatcgtgtgatctgattgaaaacatgggtacaacaacacctgcagtcctgcacccctccatgatgcatcttgggtgcgagtaatttactagtatgataaaagtcataccttccaaacgaaaatccacgcaagagaccaaaaccaacaaggcctatgtacatcagcagcgggcggcccatgtttcgcgccatccgtcctggacaattccgaaaccctagcaccatccgacggccatgataatttcatcgcctcggtataaggtcactcctacgccgccgccacctaaacctcaggctcctctccgcacaccccaccttccctacaccgccgccgccgtcgcacgcagccgcatccgccatgggggcgtacaagtatgtctcggagttatggaggaggaagcaatccgacgtgatgcggttcgtgcagcgcgtgcgctgctgggagtacaggcagcagccggccatcgtccgcctcacaaggcccacccgccccgacaaggcccgccgcctcggctacaaggccaagcaggggtatgttgtttaccgtgtccgtgtcaagcgtggcggcaggaagaggcctgtgccgaagggtattgtctatggcaagcccaagcaccagggtatcacccagctcaagttccagaggaacaagaggtctgttgctgaggagagggctggacgaaagcttggtggactcagggttctcaactcctactgggtgaatgaggatagcacctacaagtacttcgagatcatcctggttgatgtggctcacaccgccatccgcaacgacccaagaatcaactggctatgcaatcctgtgcacaagcaccgtgagctccgtggtctcacctctgcaggcaagaagttccgtggtctgcgtggcaagggccacactcaccacaagaacaggccgtccaggagggccacctggaagcgcaaccagaccctttccctccgccgctaccgttgagcacacacatcttgatgctctgctactgtggaacccgccccatgcaggctctctgatagtatttggtatatttgtttcattgttaaattttgctacatgtgttacttttgagccccttgaactccgttgtctgtaccatggagcaagtgacgcgtacgagtcgatgaaaatgattgtttagtagtgcattgctgtgtattctgtctggcacgattgatttagggcatgtttgggaacacttctttcaaaaccacggtttatattaccatagtttaccgtatgttatgacatgaacatattgtattttacatcattctaattcaacatctgtttggagccgggaggagaaaggccaagacaaggaaggagaaaggggctagactgcgcctgcgg

SEQ ID NO: 66637 - DNA, 1932 bp, Zea Mays
atcaaaatttataagacactgtaaaaactatcctttgcatcttaatgcaaagaaattttcctctcatcccggcccacgtggaggtgagtgagcgagaggccgagcggcgtagcgcggcgcacgtcacgaccgggaaagggattcccaaatccctaccgcgtctcgctcgcctacgccaaccagaatggcagaatccaacaagcggcagagcgccccaaacaaaacccaactcatttttttttcccagctcgcggaacgggcggcctcgttgcaacttgcagagacccagtcctctcgctttctcaccgcgattcgcctcgcttccatccgattcgattcgggagctagaggagagagaggagaggagaggcagtgatgccgctggctgagtcgcccccgtggcgccgcaaggccacagatttcttctccacgtccagtgtcaagctgaagcaggcaggccaatcggccggggataatatagttgatgttgctgggaaggttgggtccgtggtgaagagtcggtgggctgtcttccaagaggctaggcagcagcagcagcagcagcaacgtccgccgcatgagacagtgcaagagcgtatcatcactgctgctgcctccactggtttgcttttcaggaaaggcatttcagagacaaaggagaaggttgcagtgggaaaggtcaaagttgaagaggctgctaaaaaaactgcagataaaagcaagagtatcttgaacaatattgaacgctggcagaagggagtcgcaagcactgatgtgtttggtgttcctattgaagctactgtacaacgagagcaatctgatagagcggtgcccctggtgcttgtgagatgtgcggactacctggttatatcaggtttgaataatgagtacttattcaaatctgaaggtgacaaaaaagttcttcagcagttagtttctctttacaatgaagactcgggtgcatctttacttgaaggtgtaaatcctattgatgtaggtgcactggtgaagtgctaccttgccagtatcccggagccacttactacattttcgctttatgatgagcttcgagctgcgagggttagcattcctgatcttaggaacatattgaagaagcttccaaatgtgaactacatgacgctagagtttgttacagcgttgctgctgcgagtcagccgtaaatcatcacttaacaagatggactcccgcagccttgctgtggaatttgcgcctttgatcatgtggcggcaaggtgacactggcacagatttgcgtaaccacctcaagtttaccctgaaaccgcctccaaaaattgtggatacaacatcaaatgctgccacatgggacctgttagatgaggatgacgaggatgcttcatcccagatccccttagacgatgcttcaccaccagactacagctccattgaggttatccagtgtctgatcgagcatcacaatgccatcttcaccgacgcaaatgaaaccgtgtggagatgatcggcatctcctctagatctctctggtgttagatcgtgctattgtacaagttccaggtaggaaggtgggaaggtggattagcgctcgctattgttagggataagcattttggccggaatatttttgaagtaggtttgtatatacactagtgttaactgttaattctccacgggactagaaccgggtcatgccatatcaataaaaatatatttggatggatgtaaacgaaatgtgttgtttccatcattgattgtattcagatcatataataataacaaagcctttgtccccagttgggctagactaaagttgaaatccaataaaagccacaaattatggtttagtcatatagataagtattttctatttgatataaggttaattttttggcatattttatcttttcaagtcttcttttattgtctttggtattct

SEQ ID NO: 66638 - DNA, 1773 bp, Zea Mays
atggcagaatccaacaagcggcagagcgccccaaacaaaacccaactcatttttttttcccagctcgcggaacgggcggcctcgttgcaacttgcagagacccagtcctctcgctttctcaccgcgattcgcctcgcttccatccgattcgattcgggagctagaggagagagaggagaggagaggtatggtaatcgccttgagcgtgctctgcttcctgcctcttcggtcgcctccagctcgctgttcattcccgctccgcccgctgattcgccggatcgggccgtggcagtgatgccgctggctgagtcgcccccgtggcgccgcaaggccacagatttcttctccacgtccagtgtcaagctgaagcaggcaggccaatcggccggggataatatagttgatgttgctgggaaggttgggtccgtggtgaagagtcggtgggctgtcttccaagaggctaggcagcagcagcagcagcagcaacgtccgccgcatgagacagtgcaagagcgtatcatcactgctgctgcctccactggtttgcttttcaggaaaggcatttcagagacaaaggagaaggttgcagtgggaaaggtcaaagttgaagaggctgctaaaaaaactgcagataaaagcaagagtatcttgaacaatattgaacgctggcagaagggagtcgcaagcactgatgtgtttggtgttcctattgaagctactgtacaacgagagcaatctgatagagcggtgcccctggtgcttgtgagatgtgcggactacctggttatatcagactcgggtgcatctttacttgaaggtgtaaatcctattgatgtaggtgcactggtgaagtgctaccttgccagtatcccggagccacttactacattttcgctttatgatgagcttcgagctgcgagggttagcattcctgatcttaggaacatattgaagaagcttccaaatgtgaactacatgacgctagagtttgttacagcgttgctgctgcgagtcagccgtaaatcatcacttaacaagatggactcccgcagccttgctgtggaatttgcgcctttgatcatgtggcggcaaggtgacactggcacagatttgcgtaaccacctcaagtttaccctgaaaccgcctccaaaaattgtggatacaacatcaaatgctgccacatgggacctgttagatgaggatgacgaggatgcttcatcccagatccccttagacgatgcttcaccaccagactacagctccattgaggttatccagtgtctgatcgagcatcacaatgccatcttcaccgacgcaaatgaaaccgtgtggagatgatcggcatctcctctagatctctctggtgttagatcgtgctattgtacaagttccaggtaggaaggtgggaaggtggattagcgctcgctattgttagggataagcattttggccggaatatttttgaagtaggtttgtatatacactagtgttaactgttaattctccacgggactagaaccgggtcatgccatatcaataaaaatatatttggatggatgtaaacgaaatgtgttgtttccatcattgattgtattcagatcatataataataacaaagcctttgtccccagttgggctagactaaagttgaaatccaataaaagccacaaattatggtttagtcatatagataagtattttctatttgatataaggttaattttttggcatattttatcttttcaagtcttcttttattgtctttggtattct

SEQ ID NO: 66639 - DNA, 1830 bp, Zea Mays
atggcagaatccaacaagcggcagagcgccccaaacaaaacccaactcatttttttttcccagctcgcggaacgggcggcctcgttgcaacttgcagagacccagtcctctcgctttctcaccgcgattcgcctcgcttccatccgattcgattcgggagctagaggagagagaggagaggagaggtatggtaatcgccttgagcgtgctctgcttcctgcctcttcggtcgcctccagctcgctgttcattcccgctccgcccgctgattcgccggatcgggccgtggcagtgatgccgctggctgagtcgcccccgtggcgccgcaaggccacagatttcttctccacgtccagtgtcaagctgaagcaggcaggccaatcggccggggataatatagttgatgttgctgggaaggttgggtccgtggtgaagagtcggtgggctgtcttccaagaggctaggcagcagcagcagcagcagcaacgtccgccgcatgagacagtgcaagagcgtatcatcactgctgctgcctccactggtttgcttttcaggaaaggcatttcagagacaaaggagaaggttgcagtgggaaaggtcaaagttgaagaggctgctaaaaaaactgcagataaaagcaagagtatcttgaacaatattgaacgctggcagaagggagtcgcaagcactgatgctactgtacaacgagagcaatctgatagagcggtgcccctggtgcttgtgagatgtgcggactacctggttatatcaggtttgaataatgagtacttattcaaatctgaaggtgacaaaaaagttcttcagcagttagtttctctttacaatgaagactcgggtgcatctttacttgaaggtgtaaatcctattgatgtaggtgcactggtgaagtgctaccttgccagtatcccggagccacttactacattttcgctttatgatgagcttcgagctgcgagggttagcattcctgatcttaggaacatattgaagaagcttccaaatgtgaactacatgacgctagagtttgttacagcgttgctgctgcgagtcagccgtaaatcatcacttaacaagatggactcccgcagccttgctgtggaatttgcgcctttgatcatgtggcggcaaggtgacactggcacagatttgcgtaaccacctcaagtttaccctgaaaccgcctccaaaaattgtggatacaacatcaaatgctgccacatgggacctgttagatgaggatgacgaggatgcttcatcccagatccccttagacgatgcttcaccaccagactacagctccattgaggttatccagtgtctgatcgagcatcacaatgccatcttcaccgacgcaaatgaaaccgtgtggagatgatcggcatctcctctagatctctctggtgttagatcgtgctattgtacaagttccaggtaggaaggtgggaaggtggattagcgctcgctattgttagggataagcattttggccggaatatttttgaagtaggtttgtatatacactagtgttaactgttaattctccacgggactagaaccgggtcatgccatatcaataaaaatatatttggatggatgtaaacgaaatgtgttgtttccatcattgattgtattcagatcatataataataacaaagcctttgtccccagttgggctagactaaagttgaaatccaataaaagccacaaattatggtttagtcatatagataagtattttctatttgatataaggttaattttttggcatattttatcttttcaagtcttcttttattgtctttggtattct

SEQ ID NO: 66640 - DNA, 1149 bp, Zea Mays
gttgacaacacatatatatttacttgtagcatccagtgtttggtgttcctattgaagctactgtacaacgagagcaatctgatagagcggtgcccctggtgcttgtgagatgtgcggactacctggttatatcagactcgggtgcatctttacttgaaggtgtaaatcctattgatgtaggtgcactggtgaagtgctaccttgccagtatcccggagccacttactacattttcgctttatgatgagcttcgagctgcgagggttagcattcctgatcttaggaacatattgaagaagcttccaaatgtgaactacatgacgctagagtttgttacagcgttgctgctgcgagtcagccgtaaatcatcacttaacaagatggactcccgcagccttgctgtggaatttgcgcctttgatcatgtggcggcaaggtgacactggcacagatttgcgtaaccacctcaagtttaccctgaaaccgcctccaaaaattgtggatacaacatcaaatgctgccacatgggacctgttaggtgtgtaaattctactttgtttattaccttttagatgaggatgacgaggatgcttcatcccagatccccttagacgatgcttcaccaccagactacagctccattgaggttatccagtgtctgatcgagcatcacaatgccatcttcaccgacgcaaatgaaaccgtgtggagatgatcggcatctcctctagatctctctggtgttagatcgtgctattgtacaagttccaggtaggaaggtgggaaggtggattagcgctcgctattgttagggataagcattttggccggaatatttttgaagtaggtttgtatatacactagtgttaactgttaattctccacgggactagaaccgggtcatgccatatcaataaaaatatatttggatggatgtaaacgaaatgtgttgtttccatcattgattgtattcagatcatataataataacaaagcctttgtccccagttgggctagactaaagttgaaatccaataaaagccacaaattatggtttagtcatatagataagtattttctatttgatataaggttaattttttggcatattttatcttttcaagtcttcttttattgtctttggtattct

SEQ ID NO: 66641 - DNA, 1181 bp, Zea Mays
tatatatttacttgtagcatccagtgtttggtgttcctattgaagctactgtacaacgagagcaatctgatagagcggtgcccctggtgcttgtgagatgtgcggactacctggttatatcaggtttgaataatgagtacttattcaaatctgaaggtgacaaaaaagttcttcagcagttagtttctctttacaatgaagactcgggtgcatctttacttgaaggtgtaaatcctattgatgtaggtgcactggtgaagtgctaccttgccagtatcccggagccacttactacattttcgctttatgatgagcttcgagctgcgagggttagcattcctgatcttaggaacatattgaagaagcttccaaatgtgaactacatgacgctagagtttgttacagcgttgctgctgcgagtcagccgtaaatcatcacttaacaagatggactcccgcagccttgctgtggaatttgcgcctttgatcatgtggcggcaaggtgacactggcacagatttgcgtaaccacctcaagtttaccctgaaaccgcctccaaaaattgtggatacaacatcaaatgctgccacatgggacctgttagatgaggatgacgaggatgcttcatcccagatccccttagacgatgcttcaccaccagactacagctccattgaggttatccagtgtctgatcgagcatcacaatgccatcttcaccgacgcaaatgaaaccgtgtggagatgatcggcatctcctctagatctctctggtgttagatcgtgctattgtacaagttccaggtaggaaggtgggaaggtggattagcgctcgctattgttagggataagcattttggccggaatatttttgaagtaggtttgtatatacactagtgttaactgttaattctccacgggactagaaccgggtcatgccatatcaataaaaatatatttggatggatgtaaacgaaatgtgttgtttccatcattgattgtattcagatcatataataataacaaagcctttgtccccagttgggctagactaaagttgaaatccaataaaagccacaaattatggtttagtcatatagataagtattttctatttgatataaggttaattttttggcatattttatcttttcaagtcttcttttattgtctttggtattct

SEQ ID NO: 66642 - DNA, 670 bp, Zea Mays
cccagatactgttcctcttctccgaaggaaccgcctagtgcacccatgacgtgatttgctcgcaaccgcccacccgaggcccctgctaagatcctgcgcagatcgcccccacggacgcagcaaggcagggatgggcctctacgcacggcagccggccggctgcagcccctagctgtggccatggcggcggccatccccatcccagccgatctcggtcctccggtgatgcccttgcgtcggtcgagtgccagtcgcctgctctggatgacagcagagctgtctcgcccgcactcgacgtcgtccgccgaggagcctgcgtggagccgttgccgagatcgcgatttgtttccgcgctccgaggaatcgacgatcaagcgtcggcgaccaagtgatcaagctctctgagttttatgaggttgaagatcctgagcatctgtttggtgaaggcaggtgtcctctgacctattatgtcccatttactttataattcatcaacccgcataccatgatcaacaaggattgactagctttgtatttaccttgtccttgattaccttttggattattatggttaacttcattctattgctttactttaatcaatgaacatgatgtgaacatttatgatacgatgttgtctctatgattatgatgttggacgtgtggcatt

SEQ ID NO: 66643 - DNA, 1051 bp, Zea Mays
cctgtcgcgtgtgctgttccgcacgtggtggcattctcgttcgcgatggtcgcgcgtgttgtttcgtgtgtcgtcagcgtgctatgtcgtgcgtgtccgcgcgtcgtttgcacgctgtcgtgttgagttcgtcgtcgtcacgttgttcgcgcttgtcgcgcgtggtgcgcgcgctaggtctcgtgcagtcgtgttgtttcacgcgttacgtatttcgtctcactccactaattcgtcccgcttagagtcgttgatgttatttaaattacttatttaactaagaattgttagtgtggtcagctaattaaaactgtgcgatagctctagtttcgttttaaataaatatcgattaatataatcaggtcaaactaaatgttatgattaatactcgtttagtgtagacgcgataacctctcgatcatagctccgcctgtcgcgtttcttttccctcgtgtgaccatagtaacgcgctctatttcgttttgcatattttattatattttcatttgtatggtgtaatgttcttatgcatatatgtttgtttgttcgttcctgtttgtcttcgcttcgcgttgcgattagatcgcgatttgtttccgcgctccgaggaatcgacgatcaagcgtcggcgaccaagtgatcaagctctctgagttttatgaggttgaagatcctgagcatctgtttggtgaaggcaggtgtcctctgacctattatgtcccatttactttataattcatcaacccgcataccatgatcaacaaggattgactagctttgtatttaccttgtccttgattaccttttggattattatggttaacttcattctattgctttactttaatcaatgaacatgatgtgaacatttatgatacgatgttgtctctatgattatgatgttggacgtgtggcatttaggggactcgggcgggtttccccgagtacctctccgtaaggacctgttcgttgagagaccactcgggataacagtgcaaccatgagggtgaaaatgggatgtccttagctaattaattagaggaactagagg

SEQ ID NO: 66644 - DNA, 172 bp, Zea Mays
cttcgtatgaaatattgatgtaccacggcagttcatcgtggttgtacatttcgtagatgtactgtccaaacttaacaccatccttcccttcttccttcaagcggcgtagaacaagccacatatggagaacaagcaacgaaaatgttgtcttaaatgttttctccaactgaaa

SEQ ID NO: 66645 - DNA, 1298 bp, Zea Mays
gttcgctcctcgcaatgggagcggagcggagcggacccaaaaactcgaaaagtcgaaatccaaacccgctgatcagcttatccccttcgcaggagccaggacggacgaactgcgagtacacgagagaggacagaggagaggagacacaggcgacacgcgccatttgggagagggaaaggaatggagctgacgtcttcttcccgctccgtgctctcctcctgcaaccggccggtcgctcgagctctttgcaggacggcgtacccgggtgcaaggaggaaggagaagggaatagtatgtatcttgagcgaggagaaagaagtggtacaaaggacgatccggaggcgagctgccttttctttgttgctggcttcgccggtgctatcagtggcgttctcggcctatggaaagagtaaaaccatgaacccttacgatgaaaggcgtctgcttcagcagaataagaagattcaggaagccaaccgtgcccctgaggatttcccaaacttcatcagagaaggtcaaagtagtgacaccggacaactatattacacgggcctctggactaatgtatgaggacattaaagtcggtacaggcgactctccaaaggatgattatattccattatgtgggctacaatgaagcaggacgaagaatagatagcacctatattcagggttcccctgcaaaaattcggttagggaacggaacactagttccaggttttgaagaaggcatacgggacatgaaaccaggtggtaagagaagaattataatacctccagagcttggtcctcctgttgggccttcgacgttcttcagtgcgaagcagttcgaagtgttcgatgtggagctactggcggtgcaggactgccagcggaggacgatagcattttactctgatgtcgtgtgcagctgagcttcggtttgtctagtcttccgcctatggcacatcgcagcagcatcctgcacttttggctgctggtctgagttgccgtccaattgtgtatatatatagccagctgttgttactgcggctactgatgatgggcaatggtagtgtgttattagttcttcatttttgtcttgaatctcctgatggcgggatatgcgcatttggtgtgtctgtttagaagttggcatgtgtaccttgatgttgaggttactcctggtcctacctctaccaaggactccacaccatctgactctgcttcttgttcagtactaattcttgcgagtttggtggcggtttttgtaaactattttcaaatacctagtgatagtataaaaatttgttgaattg

SEQ ID NO: 66646 - DNA, 1306 bp, Zea Mays
gttcgctcctcgcaatgggagcggagcggagcggacccaaaaactcgaaaagtcgaaatccaaacccgctgatcagcttatccccttcgcaggagccaggacggacgaactgcgagtacacgagagaggacagaggagaggagacacaggcgacacgcgccatttgggagagggaaaggaatggagctgacgtcttcttcccgctccgtgctctcctcctgcaaccggccggtcgctcgagctctttgcaggacggcgtacccgggtgcaaggaggaaggagaagggaatagtatgtatcttgagcgaggagaaagaagtggtacaaaggacgatccggaggcgagctgccttttctttgttgctggcttcgccggtgctatcagtggcgttctcggcctatggaaagagtaaaaccatgaacccttacgatgaaaggcgtctgcttcagcagaataagaagattcaggaagccaaccgtgcccctgaggatttcccaaacttcatcagagaaggcttccaggtcaaagtagtgacaccggacaactatattacacgggcctctggactaatgtatgaggacattaaagtcggtacaggcgactctccaaaggatgattatattccattatgtgggctacaatgaagcaggacgaagaatagatagcacctatattcagggttcccctgcaaaaattcggttagggaacggaacactagttccaggttttgaagaaggcatacgggacatgaaaccaggtggtaagagaagaattataatacctccagagcttggtcctcctgttgggccttcgacgttcttcagtgcgaagcagttcgaagtgttcgatgtggagctactggcggtgcaggactgccagcggaggacgatagcattttactctgatgtcgtgtgcagctgagcttcggtttgtctagtcttccgcctatggcacatcgcagcagcatcctgcacttttggctgctggtctgagttgccgtccaattgtgtatatatatagccagctgttgttactgcggctactgatgatgggcaatggtagtgtgttattagttcttcatttttgtcttgaatctcctgatggcgggatatgcgcatttggtgtgtctgtttagaagttggcatgtgtaccttgatgttgaggttactcctggtcctacctctaccaaggactccacaccatctgactctgcttcttgttcagtactaattcttgcgagtttggtggcggtttttgtaaactattttcaaatacctagtgatagtataaaaatttgttgaattg

SEQ ID NO: 66647 - DNA, 1142 bp, Zea Mays
gtacgggtagctgccttcgcttcgcttccataccactccactccgctgctccgctcgctcagccccctcgagcgtgcagcgcggcggcgatgcccgagctcgcggcggaccacgggccgcgggggcgcaggcggaggcagcgcgggagcgggtgatgcaggaggcggcgacggcgaccgggtgccgccgttcatgggcaacaaccgcgaccacaacccgcgggagctgcgctcctgggcgcgccgcacggggttccacccctcggccttcttctcgggggagtccaactcctccttcgcctcctccgccgcgccgcaggccccgccgccgccgccgcctcccccggtctcctcgcgtcgcccgccgccggcacgggagcgggaacccgaaccggacacggaggacgaccttgttcccgcgccgccactggaattagagcgcggcgggcccgcccccgtccgcggacgcggcggacgcccgcgccgccgcatcgacctccgcggcgagctcgtgatcccaccgggcttcggccgcgaggaggcggaaccggacgcgggaaaggggcgcgcgcgcggggacgccaggaggaggaacttcggcgtcgagatggatcagacgccggccaatgcgggccggaacgggaacggagcgctcgcggacgcggagtcgaggaagaagtccgaggaggcggaggcggacgcgaagcggaaggcggaggaggccgaggcgaggaggaagaaggaggaggaggagagggacgccgagctggctgcgtactaccaggaacagtgggcgaacgaggatgagggagctgccgacgctgccgcggccgagacggccccgctgtatgaggcgtcgggactacggtgcggtgtaaccgataacccagggtgggcaaagtgtgtcggcatctgaaagctcttaggagtggcggtgaagattctatttattccattggtacctgctatatatatacccatgtaaagttatggtcatgttagagggaacacgttatacgagctatgctatgtaatgtaagtttgtagtaatactacgttcaaataacagttagagattattcgttttgctctcaatctacatggattgagtgggttttaattaaaaaagtcaaatttttttat

SEQ ID NO: 66648 - DNA, 874 bp, Zea Mays
aaagaagtcgcgccccactcgatgactaccgaagcccaaaggcctccgcggcgtctcggctagtcgcctttccatttttacccccttctctctcctctccggccgttgccgttgctccgcgccgctctcctgtcagtagccgctgccgccgacgctgcaagtgtgagtctgtcgccgcggccatgttcgcctggatcctccgcggctgccgcgacgagtgctccgcctccgaccagctcaagcagcatgtgctggctctgcaggctcacgatgtcttcaaggcgaaagaggtggtcctgcaaaagaagatctctcaagaggtggaacgggccaaggagttcacaaagtcgggaaacaagcaggcagcaatgcagtgcctgaagaggaagaggtactacgagagtcaaatgaaccaagttggaagcgttcagctgcgcattaacaccaaggagagaatgatcgctgatcacacgggcaacaaataacacaaagtgagaccgcatctctggaaccgtgtatcgaacacagctttgttctgttcagatatgaaatcttgtgagaatgagatgtcaaccattggtgtgttcttcgccaaacagcatatcacacttaacattagtgtgcctttaacataagcataagatattacattttggaccaaacttcttgtttcctaggcatgaccacttatttcctagcatactgcagtgtatagtgtgagccatacgtgttcttcatccacattctcaccgtattcaactgaatagcaattagtaagtcatttatgtttcaagtttttttggcactctgcacagaagggttacaatatggtattttcttgaattgagatagaggcagtgtattcctctctttg

SEQ ID NO: 66649 - DNA, 2497 bp, Zea Mays
aacacgtcaccgatcaccgtcacgcacctcgcctttattattcaaaccttcttctccttgtcctcactcacctacccttctctatcaatcttccattgtccaccaccctcacgcctcgccctcccgtcccggcgacggcgaggccccctccgcctccgactcccgcgcgactgccccggaccccagtctcgcccttgtccaccgtcatggccgcacccgcggttgcctccccgagccgggcgacccccaccgacatccccaccgccgcgccctctcccgcctccccgccgcgccgccttgcgtcggcgccgcccgccgtcgacgcgtccgggtcctcctccccggcctccgcccattcgggggaccagctctccgcccccgacgcctcgagcccgctgctcgcgagcaggagcgaggagtacaggcttctgttccggctgccgcccgacgaggttctcgtgcaagattttaactgcgctgtccaagaaaatattcttcttcagggacatatgtatttatttcttcaccatatatgtttctactctaacatatttggatatgagacaaagaaaacaatacctttgcaagaggtaactgatgttcgtaaagcaaagacagctgccatttttcataatgccattgaaattgttgctggtagtagaaggcatttttttggatctttcttgtcacgtgatgaagcctatcgaattatagtagatggctgggaacaacatgttagtgatgcaagattgctccttgaacgtcaggagacaaagtcagctagtagcagtgaagaaaatggttatgttgtattggaaggaacaaaggaatctaaacaagatggagatttatcactgccggacaggtctgtcaacagtacagctgtctcaagtagcaatgctgatggtggtgattcgaacatcaacatttccaaaaggttttcagaagttgaggagaacggacttgaagacaacatcgtcgcgctaaacccattcaatttggagccagttgatgctcctcctagtgtacctgaatcttacactatgatctcggagtcgaagtttcaggtgcctgtggaggttctctttaatttcttgttgtctgatggtgcttttggctttgtggatgatttccacacaaaatgtggtgacaaagaatttagttgctccaaatggcgtacagatgagcaagggggacttgtaagggatgtctcatttttgcatccaataaaaatttatcttggtgcaaaatttgggacttgtcaagaggttcagaaacttcgtctttacaaaaacaggcgtctagtcattcaaacctctcaatcaataggtgatgccccatatggggaccattttactgtagagggcatctgggatgttgaacaagatagcctagatgagaactgttgtgacctcaggatatacatcaatgtagccttctcaaagaaaacaatatttagagggaaaatagagcagtcaacaaaagatgaatgccgggaagttttcagtctctggattaagctcggtcatgatcttttgaagcaggagtatgatcgatcaaaaggcgcctccagcacacctgattctggtgttcaaccaggggctacaacaaacgaggaaagtgccgtggaagtagcagttccagtggtgagttcctcacatgatgaatctggtgcgagaagcctcattcctcctactcaagatcaccagcagaggacaggaagagatccttccatcacgtccacttcacaagaattgtggggttctctatcgtcatacatgaggtcaaggcaacttggtccagtactagcaatgtcactggtagctctcattatcctaatgcaggtgaccatcatagttctactaacaagacccccccaggtccaaatggatcctcatgggatctggacgggcagttcagggtacagcaaagaaagcatagagtgggtgcagaagcgcctcagcttactaagcgaggagatgcagctcgcggaggcacacatggagacgatgaggcgcgagtttgcctggctcaggtcttacctggagagactgcagaggacgcggggcagcacatgacggcggcgcgtgtacatggcacaggggcacgagttcgctacgcgaattcggaggtgtatacaaatacaatacaatacaacccggaggtggtgttcagtgtttcttctgttgttacagatggtacagatgcaaacagagagaggtggattgttgtttgcagaggtatttgccgtaaggcagaactgcaagatcccggtatagcgttcgatgtaaatagctggagcttccccattgcgctggggtgatgtacaatgtcagggacgagtcactgcgatcacgctacggcggtgacgcgttatgttatttataaatttctgactgaattttaacttctaaaagctacccggtccgtccgcggtccgtccaaaaatgataaacagtactacctccgtttcacaataatgttctttttacctctt

SEQ ID NO: 66650 - DNA, 2552 bp, Zea Mays
cgcctttattattcaaaccttcttctccttgtcctcactcacctacccttctctatcaatcttccattgtccaccaccctcacgcctcgccctcccgtcccggcgacggcgaggccccctccgcctccgactcccgcgcgactgccccggaccccagtctcgcccttgtccaccgtcatggccgcacccgcggttgcctccccgagccgggcgacccccaccgacatccccaccgccgcgccctctcccgcctccccgccgcgccgccttgcgtcggcgccgcccgccgtcgacgcgtccgggtcctcctccccggcctccgcccattcgggggaccagctctccgcccccgacgcctcgagcccgctgctcgcgagcaggagcgaggagtacaggcttctgttccggctgccgcccgacgaggttctcgtgcaagattttaactgcgctgtccaagaaaatattcttcttcagggacatatgtatttatttcttcaccatatatgtttctactctaacatatttggatatgagacaaagaagtgccctgacattgttcctgttttccagaaaacaatacctttgcaagaggtaactgatgttcgtaaagcaaagacagctgccatttttcataatgccattgaaattgttgctggtagtagaaggcatttttttggatctttcttgtcacgtgatgaagcctatcgaattatagtagatggctgggaacaacatgttagtgatgcaagattgctccttgaacgtcaggagacaaagtcagctagtagcagtgaagaaaatggttatgttgtattggaaggaacaaaggaatctaaacaagatggagatttatcactgccggacaggtctgtcaacagtacagctgtctcaagtagcaatgctgatggtggtgattcgaacatcaacatttccaaaaggttttcagaagttgaggagaacggacttgaagacaacatcgtcgcgctaaacccattcaatttggagccagttgatgctcctcctagtgtacctgaatcttacactatgatctcggagtcgaagtttcaggtgcctgtggaggttctctttaatttcttgttgtctgatggtgcttttggctttgtggatgatttccacacaaaatgtggtgacaaagaatttagttgctccaaatggcgtacagatgagcaagggggacttgtaagggatgtctcatttttgcatccaataaaaatttatcttggtgcaaaatttgggacttgtcaagaggttcagaaacttcgtctttacaaaaacaggcgtctagtcattcaaacctctcaatcaataggtgatgccccatatggggaccattttactgtagagggcatctgggatgttgaacaagatagcctagatgagaactgttgtgacctcaggatatacatcaatgtagccttctcaaagaaaacaatatttagagggaaaatagagcagtcaacaaaagatgaatgccgggaagttttcagtctctggattaagctcgtatgtctattctcatacttgaagatatttctcagtgctacttttcatctggagggtcatgatcttttgaagcaggagtatgatcgatcaaaaggcgcctccagcacacctgattctggtgttcaaccaggggctacaacaaacgaggaaagtgccgtggaagtagcagttccagtggtgagttcctcacatgatgaatctggtgcgagaagcctcattcctcctactcaagatcaccagcagaggacaggaagagatccttccatcacgtccacttcacaagaattgtggggttctctatcgtcatacatgaggtcaaggcaacttggtccagtactagcaatgtcactggtagctctcattatcctaatgcaggtgaccatcatagttctactaacaagacccccccaggtccaaatggatcctcatgggatctggacgggcagttcagggtacagcaaagaaagcatagagtgggtgcagaagcgcctcagcttactaagcgaggagatgcagctcgcggaggcacacatggagacgatgaggcgcgagtttgcctggctcaggtcttacctggagagactgcagaggacgcggggcagcacatgacggcggcgcgtgtacatggcacaggggcacgagttcgctacgcgaattcggaggtgtatacaaatacaatacaatacaacccggaggtggtgttcagtgtttcttctgttgttacagatggtacagatgcaaacagagagaggtggattgttgtttgcagaggtatttgccgtaaggcagaactgcaagatcccggtatagcgttcgatgtaaatagctggagcttccccattgcgctggggtgatgtacaatgtcagggacgagtcactgcgatcacgctacggcggtgacgcgttatgttatttataaatttctgactgaattttaacttctaaaagctacccggtccgtccgcggtccgtccaaaaatgataaacagtactacctccgtttcacaataatgttctttttacctctt

SEQ ID NO: 66651 - DNA, 2522 bp, Zea Mays
tctccttgtcctcactcacctacccttctctatcaatcttccattgtccaccaccctcacgcctcgccctcccgtcccggcgacggcgaggccccctccgcctccgactcccgcgcgactgccccggaccccagtctcgcccttgtccaccgtcatggccgcacccgcggttgcctccccgagccgggcgacccccaccgacatccccaccgccgcgccctctcccgcctccccgccgcgccgccttgcgtcggcgccgcccgccgtcgacgcgtccgggtcctcctccccggcctccgcccattcgggggaccagctctccgcccccgacgcctcgagcccgctgctcgcgagcaggagcgaggagtacaggcttctgttccggctgccgcccgacgaggttctcgtgcaagattttaactgcgctgtccaagaaaatattcttcttcagggacatatgtatttatttcttcaccatatatgtttctactctaacatatttggatatgagacaaagaagtgccctgacattgttcctgttttccagaaaacaatacctttgcaagaggtaactgatgttcgtaaagcaaagacagctgccatttttcataatgccattgaaattgttgctggtagtagaaggcatttttttggatctttcttgtcacgtgatgaagcctatcgaattatagtagatggctgggaacaacatgttagtgatgcaagattgctccttgaacgtcaggagacaaagtcagctagtagcagtgaagaaaatggttatgttgtattggaaggaacaaaggaatctaaacaagatggagatttatcactgccggacaggtctgtcaacagtacagctgtctcaagtagcaatgctgatggtggtgattcgaacatcaacatttccaaaaggttttcagaagttgaggagaacggacttgaagacaacatcgtcgcgctaaacccattcaatttggagccagttgatgctcctcctagtgtacctgaatcttacactatgatctcggagtcgaagtttcaggtgcctgtggaggttctctttaatttcttgttgtctgatggtgcttttggctttgtggatgatttccacacaaaatgtggtgacaaagttgctccaaatggcgtacagatgagcaagggggacttgtaagggatgtctcatttttgcatccaataaaaatttatcttggtgcaaaatttgggacttgtcaagaggttcagaaacttcgtctttacaaaaacaggcgtctagtcattcaaacctctcaatcaataggtgatgccccatatggggaccattttactgtagagggcatctgggatgttgaacaagatagcctagatgagaactgttgtgacctcaggatatacatcaatgtagccttctcaaagaaaacaatatttagagggaaaatagagcagtcaacaaaagatgaatgccgggaagttttcagtctctggattaagctcgtatgtctattctcatacttgaagatatttctcagtgctacttttcatctggagggtcatgatcttttgaagcaggagtatgatcgatcaaaaggcgcctccagcacacctgattctggtgttcaaccaggggctacaacaaacgaggaaagtgccgtggaagtagcagttccagtggtgagttcctcacatgatgaatctggtgcgagaagcctcattcctcctactcaagatcaccagcagaggacaggaagagatccttccatcacgtccacttcacaagaattgtggggttctctatcgtcatacatgaggtcaaggcaacttggtccagtactagcaatgtcactggtagctctcattatcctaatgcaggtgaccatcatagttctactaacaagacccccccaggtccaaatggatcctcatgggatctggacgggcagttcagggtacagcaaagaaagcatagagtgggtgcagaagcgcctcagcttactaagcgaggagatgcagctcgcggaggcacacatggagacgatgaggcgcgagtttgcctggctcaggtcttacctggagagactgcagaggacgcggggcagcacatgacggcggcgcgtgtacatggcacaggggcacgagttcgctacgcgaattcggaggtgtatacaaatacaatacaatacaacccggaggtggtgttcagtgtttcttctgttgttacagatggtacagatgcaaacagagagaggtggattgttgtttgcagaggtatttgccgtaaggcagaactgcaagatcccggtatagcgttcgatgtaaatagctggagcttccccattgcgctggggtgatgtacaatgtcagggacgagtcactgcgatcacgctacggcggtgacgcgttatgttatttataaatttctgactgaattttaacttctaaaagctacccggtccgtccgcggtccgtccaaaaatgataaacagtactacctccgtttcacaataatgttctttttacctctt

SEQ ID NO: 66652 - DNA, 2302 bp, Zea Mays
tctccttgtcctcactcacctacccttctctatcaatcttccattgtccaccaccctcacgcctcgccctcccgtcccggcgacggcgaggccccctccgcctccgactcccgcgcgactgccccggaccccagtctcgcccttgtccaccgtcatggccgcacccgcggttgcctccccgagccgggcgacccccaccgacatccccaccgccgcgccctctcccgcctccccgccgcgccgccttgcgtcggcgccgcccgccgtcgacgcgtccgggtcctcctccccggcctccgcccattcgggggaccagctctccgcccccgacgcctcgagcccgctgctcgcgagcaggagcgaggagtacaggcttctgttccggctgccgcccgacgaggttctcgtgcaagattttaactgcgctgtccaagaaaatattcttcttcagggacatatgtatttatttcttcaccatatatgtttctactctaacatatttggatatgagacaaagaaaacaatacctttgcaagaggtaactgatgttcgtaaagcaaagacagctgccatttttcataatgccattgaaattgttgctggtagtagaaggcatttttttggatctttcttgtcacgtgatgaagcctatcgaattatagtagatggctgggaacaacatgttagtgatgcaagattgctccttgaacgtcaggagacaaagtcagctagtagcagtgaagaaaatggttatgttgtattggaaggaacaaaggaatctaaacaagatggagatttatcactgccggacaggtctgtcaacagtacagctgtctcaagtagcaatgctgatggtggtgattcgaacatcaacatttccaaaaggttttcagaagttgaggagaacggacttgaagacaacatcgtcgcgctaaacccattcaatttggagccagttgatgctcctcctagtgtacctgaatcttacactatgatctcggagtcgaagtttcaggtgcctgtggaggttctctttaatttcttgttgtctgatggtgcttttggctttgtggatgatttccacacaaaatgtggtgacaaagaatttagttgctccaaatggcgtacagatgagcaagggggacttgtaagggatgtctcatttttgcatccaataaaaatttatcttggtgcaaaatttgggacttgtcaagaggttcagaaacttcgtctttacaaaaacaggcgtctagtcattcaaacctctcaatcaataggtgatgccccatatggggaccattttactgtagagggcatctgggatgttgaacaagatagcctagatgagaactgttgtgacctcaggatatacatcaatgtagccttctcaaagaaaacaatatttagagggaaaatagagcagtcaacaaaagatgaatgccgggaagttttcagtctctggattaagctcggtcatgatcttttgaagcaggagtatgatcgatcaaaaggcgcctccagcacacctgattctggtgttcaaccaggggctacaacaaacgaggaaagtgccgtggaagtagcagttccagtggcaagtattctggagactagatttggtcttcctgctggttcttgctcacctatttgtgaccatcatagttctactaacaagacccccccaggtccaaatggatcctcatgggatctggacgggcagttcagggtacagcaaagaaagcatagagtgggtgcagaagcgcctcagcttactaagcgaggagatgcagctcgcggaggcacacatggagacgatgaggcgcgagtttgcctggctcaggtcttacctggagagactgcagaggacgcggggcagcacatgacggcggcgcgtgtacatggcacaggggcacgagttcgctacgcgaattcggaggtgtatacaaatacaatacaatacaacccggaggtggtgttcagtgtttcttctgttgttacagatggtacagatgcaaacagagagaggtggattgttgtttgcagaggtatttgccgtaaggcagaactgcaagatcccggtatagcgttcgatgtaaatagctggagcttccccattgcgctggggtgatgtacaatgtcagggacgagtcactgcgatcacgctacggcggtgacgcgttatgttatttataaatttctgactgaattttaacttctaaaagctacccggtccgtccgcggtccgtccaaaaatgataaacagtactacctccgtttcacaataatgttctttttacctctt

SEQ ID NO: 66653 - DNA, 1580 bp, Zea Mays
gccctctggcccagcgccatggccacgcccgccgtgacgtcccgatgagcacccatgtcggcagcgccttcgttacaccgtcacaaagttcggaaaccacacgaaaaccaccggccgagaattctgcaccgaatcttgacaacgtcatctcgaggggcatgccctactcgtgtgcataaagcttgcgcaggccaggattcacctcgcccttgcgcagaactgcataaaaccccaccccatctgcggcgagggttttcctcgaagcctcggatctccgccgagaaagcatctccagggggatttctgggaagaagagggagtggttgagccatgggcaaccttcacgccaaaggtgctggaacgggcgccaaaggagcagcaaacacttccatctcgaattctcgggactcgatgtccaatgccgccacaccttctccagtagagcaggcaaccttcaagtgggtcattgatggcttttcctccctgcttgacaaggatcaaggatggacatactccaacgtatttgagctcatgggtgtagaatggtatctgaaactgaatccaaagtacgaagtcagtaatgaggagtgtgtctctctcaggcttgaactgtcgcagagttcagtgaaactcgacactatctttgaggcatctttcaagttcatgatatatgatcagttaatcggaaagcacaaggtgcatctaggtaaccacagcttccagactgcaagtacgagctctgccatcgcattcatgttacctctgaaagcactcagacaatcctctagatttattgtcaataacagctgcgtatttggcattggcttcatcaaagttgccactatcaaagttaacacgacgctagaaacactgtttgtcaggaagatgaacatcttcaacgaggccaaagtttacacttggaaaatcgaggatttctctgctctgaagaacccgtcccactcaccggagtttgagatcgctggatacacatggattatctctttgaatccatcctacgatggtaacagcctgtccttattcctgaaaatgaagaagacaaacgacgtccccaaaggctctgggagcctggtcgagttcgctttatccatcaaagaccaggaaaacggcaaggacaggaaatatccaggcaggtgccagttctcgagcaaacaccatcgctggggatggaagaagttcatctcgctggaggacttcaaggactcgtcaaagggttatctcatcaagggcaagtgctgcatcgaggctgaggtcgcaatcagtggctcttcgaagacggagtactctatgtaatttgatttgtgagagctcatgattagtgtttattctcgctagaaccaactatatagcgtgttccatatgtattagcatgccatcgagactctagcttgctctatagatatctcgacgtatccgctcttcaagcttcgttctgtcgagttgaatgtggtctaataagtgaatatatgcaaactgggatcttattattttaggctattctggcaatctatcttgattgcgacgaatgatttcacagcagttcttttttttctctatctaat

SEQ ID NO: 66654 - DNA, 1780 bp, Zea Mays
gccctctggcccagcgccatggccacgcccgccgtgacgtcccgatgagcacccatgtcggcagcgccttcgttacaccgtcacaaagttcggaaaccacacgaaaaccaccggccgagaattctgcaccgaatcttgacaacgtcatctcgaggggcatgccctactcgtgtgcataaagcttgcgcaggccaggattcacctcgcccttgcgcagaactgcataaaaccccaccccatctgcggcgagggttttcctcgaagcctcggatctccgccgagaaagcatctccaggtgagggggatttctgggaagaagagggagtggttgagccatgggcaaccttcacgccaaaggtgctggaacgggcgccaaaggtgctgcaaacacttccatctcgaattctcgggactcgatgtccaatgccgccacaccttctccagtagagcaggcaaccttcaagtgggtcattgatggcttttcctccctgcttgacaaggatcaaggatggacatactccaacgtatttgagctcatgggtgtagaatggtatctgaaactgaatccaaagtacgaagtcagtaatgaggagtgtgtctctctcaggcttgaactgtcgcagagttcagtgaaactcgacactatctttgaggcatctttcaagttcatgatatatgatcagttaatcggaaagcacaaggtgcatctaggtaaccacagcttccagactgcaagtacgagctctgccatcgcattcatgttacctctgaaagcactcagacaatcctctagatttattgtcaataacagctgcgtatttggcattggcttcatcaaagttgccactatcaaagttaacacgacgctagaaacactgtttgtcaggaagatgaacatcttcaacgaggccaaagtttacacttggaaaatcgaggatttctctgctctgaagaacccgtcccactcaccggagtttgagatcgctggatacacatggtgataaataatcttttcagcttgcagtacttgacatgtactccacatgactgaacgttgatatcataatctgaacttccttgcaatgctaagagtggttctgaaccacatcggttttgaaaattttacttgaaacacaattatagcagtcctgcacgtcgtcaacctgattgtgtgaccctgaccaatttgcaggattatctctttgaatccatcctacgatggtaacagcctgtccttattcctgaaaatgaagaagacaaacgacgtccccaaaggctctgggagcctggtcgagttcgctttatccatcaaagaccaggaaaacggcaaggacaggaaatatccaggcaggtgccagttctcgagcaaacaccatcgctggggatggaagaagttcatctcgctggaggacttcaaggactcgtcaaagggttatctcatcaagggcaagtgctgcatcgaggctgaggtcgcaatcagtggctcttcgaagacggagtactctatgtaatttgatttgtgagagctcatgattagtgtttattctcgctagaaccaactatatagcgtgttccatatgtattagcatgccatcgagactctagcttgctctatagatatctcgacgtatccgctcttcaagcttcgttctgtcgagttgaatgtggtctaataagtgaatatatgcaaactgggatcttattattttaggctattctggcaatctatcttgattgcgacgaatgatttcacagcagttcttttttttctctatctaat

SEQ ID NO: 66655 - DNA, 1591 bp, Zea Mays
gccctctggcccagcgccatggccacgcccgccgtgacgtcccgatgagcacccatgtcggcagcgccttcgttacaccgtcacaaagttcggaaaccacacgaaaaccaccggccgagaattctgcaccgaatcttgacaacgtcatctcgaggggcatgccctactcgtgtgcataaagcttgcgcaggccaggattcacctcgcccttgcgcagaactgcataaaaccccaccccatctgcggcgagggttttcctcgaagcctcggatctccgccgagaaagcatctccaggtgagggggatttctgggaagaagagggagtggttgagccatgggcaaccttcacgccaaaggtgctggaacgggcgccaaaggtgctggagcagcaaacacttccatctcgaattctcgggactcgatgtccaatgccgccacaccttctccagtagagcaggcaaccttcaagtgggtcattgatggcttttcctccctgcttgacaaggatcaaggatggacatactccaacgtatttgagctcatgggtgtagaatggtatctgaaactgaatccaaagtacgaagtcagtaatgaggagtgtgtctctctcaggcttgaactgtcgcagagttcagtgaaactcgacactatctttgaggcatctttcaagttcatgatatatgatcagttaatcggaaagcacaaggtgcatctaggtaaccacagcttccagactgcaagtacgagctctgccatcgcattcatgttacctctgaaagcactcagacaatcctctagatttattgtcaataacagctgcgtatttggcattggcttcatcaaagttgccactatcaaagttaacacgacgctagaaacactgtttgtcaggaagatgaacatcttcaacgaggccaaagtttacacttggaaaatcgaggatttctctgctctgaagaacccgtcccactcaccggagtttgagatcgctggatacacatggattatctctttgaatccatcctacgatggtaacagcctgtccttattcctgaaaatgaagaagacaaacgacgtccccaaaggctctgggagcctggtcgagttcgctttatccatcaaagaccaggaaaacggcaaggacaggaaatatccaggcaggtgccagttctcgagcaaacaccatcgctggggatggaagaagttcatctcgctggaggacttcaaggactcgtcaaagggttatctcatcaagggcaagtgctgcatcgaggctgaggtcgcaatcagtggctcttcgaagacggagtactctatgtaatttgatttgtgagagctcatgattagtgtttattctcgctagaaccaactatatagcgtgttccatatgtattagcatgccatcgagactctagcttgctctatagatatctcgacgtatccgctcttcaagcttcgttctgtcgagttgaatgtggtctaataagtgaatatatgcaaactgggatcttattattttaggctattctggcaatctatcttgattgcgacgaatgatttcacagcagttcttttttttctctatctaat

SEQ ID NO: 66656 - DNA, 1585 bp, Zea Mays
gccctctggcccagcgccatggccacgcccgccgtgacgtcccgatgagcacccatgtcggcagcgccttcgttacaccgtcacaaagttcggaaaccacacgaaaaccaccggccgagaattctgcaccgaatcttgacaacgtcatctcgaggggcatgccctactcgtgtgcataaagcttgcgcaggccaggattcacctcgcccttgcgcagaactgcataaaaccccaccccatctgcggcgagggttttcctcgaagcctcggatctccgccgagaaagcatctccaggtgagggggatttctgggaagaagagggagtggttgagccatgggcaaccttcacgccaaaggtgctggaacgggcgccaaaggagcagcaaacacttccatctcgaattctcgggactcgatgtccaatgccgccacaccttctccagtagagcaggcaaccttcaagtgggtcattgatggcttttcctccctgcttgacaaggatcaaggatggacatactccaacgtatttgagctcatgggtgtagaatggtatctgaaactgaatccaaagtacgaagtcagtaatgaggagtgtgtctctctcaggcttgaactgtcgcagagttcagtgaaactcgacactatctttgaggcatctttcaagttcatgatatatgatcagttaatcggaaagcacaaggtgcatctaggtaaccacagcttccagactgcaagtacgagctctgccatcgcattcatgttacctctgaaagcactcagacaatcctctagatttattgtcaataacagctgcgtatttggcattggcttcatcaaagttgccactatcaaagttaacacgacgctagaaacactgtttgtcaggaagatgaacatcttcaacgaggccaaagtttacacttggaaaatcgaggatttctctgctctgaagaacccgtcccactcaccggagtttgagatcgctggatacacatggattatctctttgaatccatcctacgatggtaacagcctgtccttattcctgaaaatgaagaagacaaacgacgtccccaaaggctctgggagcctggtcgagttcgctttatccatcaaagaccaggaaaacggcaaggacaggaaatatccaggcaggtgccagttctcgagcaaacaccatcgctggggatggaagaagttcatctcgctggaggacttcaaggactcgtcaaagggttatctcatcaagggcaagtgctgcatcgaggctgaggtcgcaatcagtggctcttcgaagacggagtactctatgtaatttgatttgtgagagctcatgattagtgtttattctcgctagaaccaactatatagcgtgttccatatgtattagcatgccatcgagactctagcttgctctatagatatctcgacgtatccgctcttcaagcttcgttctgtcgagttgaatgtggtctaataagtgaatatatgcaaactgggatcttattattttaggctattctggcaatctatcttgattgcgacgaatgatttcacagcagttcttttttttctctatctaat

SEQ ID NO: 66657 - DNA, 1355 bp, Zea Mays
gtggattttagaggggtttcgggcttttgcgaatccgtgttgttggctttcttgatgagttccgggggatttctgggaagaagagggagtggttgagccatgggcaaccttcacgccaaaggtgctggaacgggcgccaaaggtgctggagcagcaaacacttccatctcgaattctcgggactcgatgtccaatgccgccacaccttctccagtagagcaggcaaccttcaagtgggtcattgatggcttttcctccctgcttgacaaggatcaaggatggacatactccaacgtatttgagctcatgggtgtagaatggtatctgaaactgaatccaaagtacgaagtcagtaatgaggagtgtgtctctctcaggcttgaactgtcgcagagttcagtgaaactcgacactatctttgaggcatctttcaagttcatgatatatgatcagttaatcggaaagcacaaggtgcatctaggtaaccacagcttccagactgcaagtacgagctctgccatcgcattcatgttacctctgaaagcactcagacaatcctctagatttattgtcaataacagctgcgtatttggcattggcttcatcaaagttgccactatcaaagttaacacgacgctagaaacactgtttgtcaggaagatgaacatcttcaacgaggccaaagtttacacttggaaaatcgaggatttctctgctctgaagaacccgtcccactcaccggagtttgagatcgctggatacacatggattatctctttgaatccatcctacgatggtaacagcctgtccttattcctgaaaatgaagaagacaaacgacgtccccaaaggctctgggagcctggtcgagttcgctttatccatcaaagaccaggaaaacggcaaggacaggaaatatccaggcaggtgccagttctcgagcaaacaccatcgctggggatggaagaagttcatctcgctggaggacttcaaggactcgtcaaagggttatctcatcaagggcaagtgctgcatcgaggctgaggtcgcaatcagtggctcttcgaagacggagtactctatgtaatttgatttgtgagagctcatgattagtgtttattctcgctagaaccaactatatagcgtgttccatatgtattagcatgccatcgagactctagcttgctctatagatatctcgacgtatccgctcttcaagcttcgttctgtcgagttgaatgtggtctaataagtgaatatatgcaaactgggatcttattattttaggctattctggcaatctatcttgattgcgacgaatgatttcacagcagttcttttttttctctatctaat

SEQ ID NO: 66658 - DNA, 1601 bp, Zea Mays
caacaaccagacatcaggtcaaacctcctcacacgcctcaaacccctggtccaacacccaaacatcgcgtggcgcacactataaattgagattctgttttttttttgcacgaattcttatataatagagacgggagcaaagcgactcaaccatgctatccacgtcagccaaaaaaacttcagccattcgattcttgatttgtggtccctggtgcagcgaggccacaagggggaaacgaccggaggcctggttctagagactacacaacatatcgcgatggctctatctgacctgaggtctatgtctggcttgctggcccgcacctctctcgatcccacatcggactcatctccttcgattcagcagaggacagcgctctgcctctccactacttgacagccacggatccttccatccctcgcctagcgaacagacccggctggccatcctcaacgcacccctcccattttccattcggatgtatgcgtgggtgaccagcacatcgaggagttccacaagcacacatgaggtatctgaaactgaatccaaagtacgaagtcagtaatgaggagtgtgtctctctcaggcttgaactgtcgcagagttcagtgaaactcgacactatctttgaggcatctttcaagttcatgatatatgatcagttaatcggaaagcacaaggtgcatctaggtaaccacagcttccagactgcaagtacgagctctgccatcgcattcatgttacctctgaaagcactcagacaatcctctagatttattgtcaataacagctgcgtatttggcattggcttcatcaaagttgccactatcaaagttaacacgacgctagaaacactgtttgtcaggaagatgaacatcttcaacgaggccaaagtttacacttggaaaatcgaggatttctctgctctgaagaacccgtcccactcaccggagtttgagatcgctggatacacatggtgataaataatcttttcagcttgcagtacttgacatgattatctctttgaatccatcctacgatggtaacagcctgtccttattcctgaaaatgaagaagacaaacgacgtccccaaaggctctgggagcctggtcgagttcgctttatccatcaaagaccaggaaaacggcaaggacaggaaatatccaggcaggtgccagttctcgagcaaacaccatcgctggggatggaagaagttcatctcgctggaggacttcaaggactcgtcaaagggttatctcatcaagggcaagtgctgcatcgaggctgaggtcgcaatcagtggctcttcgaagacggagtactctatgtaatttgatttgtgagagctcatgattagtgtttattctcgctagaaccaactatatagcgtgttccatatgtattagcatgccatcgagactctagcttgctctatagatatctcgacgtatccgctcttcaagcttcgttctgtcgagttgaatgtggtctaataagtgaatatatgcaaactgggatcttattattttaggctattctggcaatctatcttgattgcgacgaatgatttcacagcagttcttttttttctctatctaat

SEQ ID NO: 66659 - DNA, 1677 bp, Zea Mays
aacttcagccattcgattcttgatttgtggtccctggtgcagcgaggccacaagggggaaacgaccggaggcctggttctagagactacacaacatatcgcgatggctctatctgacctgaggtctatgtctggcttgctggcccgcacctctctcgatcccacatcggactcatctccttcgattcagcagaggacagcgctctgcctctccactacttgacagccacggatccttccatccctcgcctagcgaacagacccggctggccatcctcaacgcacccctcccattttccattcggatgtatgcgtgggtgaccagcacatcgaggagttccacaagcacacatgaggtgtggatgggcagcgcttgaagccggtgtgcacgaagtgggctttgcatttggagcccgcagccgcggagggcctagcgcggtgcggcatggcacgtcgaacatcacaggacatgtggcatcgatgggattcaactatgtcaggctcacctgaccgacctacctcctcaccaacgtcgtgctcgctggagcgtgtcggcgtgcaggagtgtgttgttttgtagtccctatttttagtccgtggaaaagccagacgcaaagtgaagtgtagttttctagaaaaaaaggtatctgaaactgaatccaaagtacgaagtcagtaatgaggagtgtgtctctctcaggcttgaactgtcgcagagttcagtgaaactcgacactatctttgaggcatctttcaagttcatgatatatgatcagttaatcggaaagcacaaggtgcatctaggtaaccacagcttccagactgcaagtacgagctctgccatcgcattcatgttacctctgaaagcactcagacaatcctctagatttattgtcaataacagctgcgtatttggcattggcttcatcaaagttgccactatcaaagttaacacgacgctagaaacactgtttgtcaggaagatgaacatcttcaacgaggccaaagtttacacttggaaaatcgaggatttctctgctctgaagaacccgtcccactcaccggagtttgagatcgctggatacacatggattatctctttgaatccatcctacgatggtaacagcctgtccttattcctgaaaatgaagaagacaaacgacgtccccaaaggctctgggagcctggtcgagttcgctttatccatcaaagaccaggaaaacggcaaggacaggaaatatccaggcaggtgccagttctcgagcaaacaccatcgctggggatggaagaagttcatctcgctggaggacttcaaggactcgtcaaagggttatctcatcaagggcaagtgctgcatcgaggctgaggtcgcaatcagtggctcttcgaagacggagtactctatgtaatttgatttgtgagagctcatgattagtgtttattctcgctagaaccaactatatagcgtgttccatatgtattagcatgccatcgagactctagcttgctctatagatatctcgacgtatccgctcttcaagcttcgttctgtcgagttgaatgtggtctaataagtgaatatatgcaaactgggatcttattattttaggctattctggcaatctatcttgattgcgacgaatgatttcacagcagttcttttttttctctatctaat

SEQ ID NO: 66660 - DNA, 1755 bp, Zea Mays
aacttcagccattcgattcttgatttgtggtccctggtgcagcgaggccacaagggggaaacgaccggaggcctggttctagagactacacaacatatcgcgatggctctatctgacctgaggtctatgtctggcttgctggcccgcacctctctcgatcccacatcggactcatctccttcgattcagcagaggacagcgctctgcctctccactacttgacagccacggatccttccatccctcgcctagcgaacagacccggctggccatcctcaacgcacccctcccattttccattcggatgtatgcgtgggtgaccagcacatcgaggagttccacaagcacacatgaggttttatcgcattcgagacagtttcagtggcacataacaactaatcaccaattcaccatggcgtcctccacctatccagtgtggatgggcagcgcttgaagccggtgtgcacgaagtgggctttgcatttggagcccgcagccgcggagggcctagcgcggtgcggcatggcacgtcgaacatcacaggacatgtggcatcgatgggattcaactatgtcaggctcacctgaccgacctacctcctcaccaacgtcgtgctcgctggagcgtgtcggcgtgcaggagtgtgttgttttgtagtccctatttttagtccgtggaaaagccagacgcaaagtgaagtgtagttttctagaaaaaaaggtatctgaaactgaatccaaagtacgaagtcagtaatgaggagtgtgtctctctcaggcttgaactgtcgcagagttcagtgaaactcgacactatctttgaggcatctttcaagttcatgatatatgatcagttaatcggaaagcacaaggtgcatctaggtaaccacagcttccagactgcaagtacgagctctgccatcgcattcatgttacctctgaaagcactcagacaatcctctagatttattgtcaataacagctgcgtatttggcattggcttcatcaaagttgccactatcaaagttaacacgacgctagaaacactgtttgtcaggaagatgaacatcttcaacgaggccaaagtttacacttggaaaatcgaggatttctctgctctgaagaacccgtcccactcaccggagtttgagatcgctggatacacatggattatctctttgaatccatcctacgatggtaacagcctgtccttattcctgaaaatgaagaagacaaacgacgtccccaaaggctctgggagcctggtcgagttcgctttatccatcaaagaccaggaaaacggcaaggacaggaaatatccaggcaggtgccagttctcgagcaaacaccatcgctggggatggaagaagttcatctcgctggaggacttcaaggactcgtcaaagggttatctcatcaagggcaagtgctgcatcgaggctgaggtcgcaatcagtggctcttcgaagacggagtactctatgtaatttgatttgtgagagctcatgattagtgtttattctcgctagaaccaactatatagcgtgttccatatgtattagcatgccatcgagactctagcttgctctatagatatctcgacgtatccgctcttcaagcttcgttctgtcgagttgaatgtggtctaataagtgaatatatgcaaactgggatcttattattttaggctattctggcaatctatcttgattgcgacgaatgatttcacagcagttcttttttttctctatctaat

SEQ ID NO: 66661 - DNA, 1967 bp, Zea Mays
aacttcagccattcgattcttgatttgtggtccctggtgcagcgaggccacaagggggaaacgaccggaggcctggttctagagactacacaacatatcgcgatggctctatctgacctgaggtctatgtctggcttgctggcccgcacctctctcgatcccacatcggactcatctccttcgattcagcagaggacagcgctctgcctctccactacttgacagccacggatccttccatccctcgcctagcgaacagacccggctggccatcctcaacgcacccctcccattttccattcggatgtatgcgtgggtgaccagcacatcgaggagttccacaagcacacatgagtccggtcctcctcgcccttctcctccaacccgcgctcacagcagcgacctcgctctcggtgctgctgctctcaacggcgtcgtggtggattgtaggtgtggatgggcagcgcttgaagccggtgtgcacgaagtgggctttgcatttggagcccgcagccgcggagggcctagcgcggtgcggcatggcacgtcgaacatcacaggacatgtggcatcgatgggattcaactatgtcaggctcacctgaccgacctacctcctcaccaacgtcgtgctcgctggagcgtgtcggcgtgcaggagtgtgttgttttgtagtccctatttttagtccgtggaaaagccagacgcaaagtgaagtgtagttttctagaaaaaaaggtatctgaaactgaatccaaagtacgaagtcagtaatgaggagtgtgtctctctcaggcttgaactgtcgcagagttcagtgaaactcgacactatctttgaggcatctttcaagttcatgatatatgatcagttaatcggaaagcacaaggtgcatctaggtaaccacagcttccagactgcaagtacgagctctgccatcgcattcatgttacctctgaaagcactcagacaatcctctagatttattgtcaataacagctgcgtatttggcattggcttcatcaaagttgccactatcaaagttaacacgacgctagaaacactgtttgtcaggaagatgaacatcttcaacgaggccaaagtttacacttggaaaatcgaggatttctctgctctgaagaacccgtcccactcaccggagtttgagatcgctggatacacatggtgataaataatcttttcagcttgcagtacttgacatgtactccacatgactgaacgttgatatcataatctgaacttccttgcaatgctaagagtggttctgaaccacatcggttttgaaaattttacttgaaacacaattatagcagtcctgcacgtcgtcaacctgattgtgtgaccctgaccaatttgcaggattatctctttgaatccatcctacgatggtaacagcctgtccttattcctgaaaatgaagaagacaaacgacgtccccaaaggctctgggagcctggtcgagttcgctttatccatcaaagaccaggaaaacggcaaggacaggaaatatccaggcaggtgccagttctcgagcaaacaccatcgctggggatggaagaagttcatctcgctggaggacttcaaggactcgtcaaagggttatctcatcaagggcaagtgctgcatcgaggctgaggtcgcaatcagtggctcttcgaagacggagtactctatgtaatttgatttgtgagagctcatgattagtgtttattctcgctagaaccaactatatagcgtgttccatatgtattagcatgccatcgagactctagcttgctctatagatatctcgacgtatccgctcttcaagcttcgttctgtcgagttgaatgtggtctaataagtgaatatatgcaaactgggatcttattattttaggctattctggcaatctatcttgattgcgacgaatgatttcacagcagttcttttttttctctatctaat

SEQ ID NO: 66662 - DNA, 1238 bp, Zea Mays
ttaattaagcaagcaaataaaaaatgactaaatgaactatttgttgtttcttccatttcccatcatttatgttttgtttcactaatttgtttttgtgtgtgtttaatttcattatggctgggaaggcttttaactggggccatgatagtgttgtccattagtggaagtgcttatgtgagtaccgcagatgaagtaaagttttggtatctgaaactgaatccaaagtacgaagtcagtaatgaggagtgtgtctctctcaggcttgaactgtcgcagagttcagtgaaactcgacactatctttgaggcatctttcaagttcatgatatatgatcagttaatcggaaagcacaaggtgcatctaggtaaccacagcttccagactgcaagtacgagctctgccatcgcattcatgttacctctgaaagcactcagacaatcctctagatttattgtcaataacagctgcgtatttggcattggcttcatcaaagttgccactatcaaagttaacacgacgctagaaacactgtttgtcaggaagatgaacatcttcaacgaggccaaagtttacacttggaaaatcgaggatttctctgctctgaagaacccgtcccactcaccggagtttgagatcgctggatacacatggattatctctttgaatccatcctacgatggtaacagcctgtccttattcctgaaaatgaagaagacaaacgacgtccccaaaggctctgggagcctggtcgagttcgctttatccatcaaagaccaggaaaacggcaaggacaggaaatatccaggcaggtgccagttctcgagcaaacaccatcgctggggatggaagaagttcatctcgctggaggacttcaaggactcgtcaaagggttatctcatcaagggcaagtgctgcatcgaggctgaggtcgcaatcagtggctcttcgaagacggagtactctatgtaatttgatttgtgagagctcatgattagtgtttattctcgctagaaccaactatatagcgtgttccatatgtattagcatgccatcgagactctagcttgctctatagatatctcgacgtatccgctcttcaagcttcgttctgtcgagttgaatgtggtctaataagtgaatatatgcaaactgggatcttattattttaggctattctggcaatctatcttgattgcgacgaatgatttcacagcagttcttttttttctctatctaat

SEQ ID NO: 66663 - DNA, 234 bp, Zea Mays
atgctgacagggcgtttcttattggtgcgccacaacctttggcagtcatacccacatcatgtcaccaggaagtaccccaaacaaagcatcacactcaaacctcactcatacaccgcatatcaccacgttcaggatatcgtttacaaccaaacaatcaaaccagggacacagcaactgcagctccatcagccctcattcagacagggccttcacagcttcacgccaggaacatga

SEQ ID NO: 66664 - DNA, 1683 bp, Zea Mays
gatcgtcttgatccttgtcccatcagaggcgtgcttcaggtccagcttcgcagcatcgtagatgtcagtaatgttgatctcagcaacacccatgctgtcgtctgctgtgaacttgtcttcatcaaaaacttcctgtgtggcattagcggagcaattcagaaatcaagagtcggttttcctggttgtttcgtagttagaaatacatgcggtcaatttgttcgtatttgtggcggcgatatcagcggaccaatggcagacatggttccataccatccatatttctgccaggaacaaattatgctcaggttaaaaaacgttgatctgataaattaagtattttgtaacacatcaccgtggtaaaccttttaaccagcatatagctttatacagtattttcataagtctatatctatatagttctccgacagcaaacatgatgaaaccaattgagacagcaaacttacaaggtgcactggcttcgtaggatttgttactgagagctgcagtacttcgtttcacactggattggggttcttcttctggacactagtcttcaccttctgtagcaacagcaaaagaaaacttccataacgtaaacaccgagaacagaaagccataaacccaatgggtatccatgacgtttgaactgaagtcaaccgaataaaatagaacaagagctttcaaaatcctagaaaaatgtttagttatgcaattctgcaacactcgagataagtggttgacctgacaccacacaagccaatcatacagaaacttaaaactgcataatactgaaatccttgggcttggggtaacactaagaaaaagtcaaattagtaggaaaatagaagactggtaagtaattcagtccgcaaaatactatttttaccctagaatcattatgcagatcacagagatactgctaagtacaggttgattcatattgaagtttcgcaaacttgtgcagggccagtccctagttcagaagaaatgttatcagcagctattatttcttattttattcaaggtgaagctgttacggggtgtggtgctctgccgctcagttcaacgttctccaaaggtgcagtatagccctgacgcattggttaagcaaattcatgagcaagctagaactgctgtcagtcaggaacttatttgtggcttggcaattcattgtcaggattttggtctccccgcatcgaggtcagcggctggtcggataagcccatggaccactcgccatccaatccacagaccactggccgtaaaaaacggtaacaggatcctaagatggggaggcaacacgggcagattcgcagctcatagaagacgacagagacagaggagacgagcacctagacctaggactaggagatcagggaagatcaacagtaatcccgacaacccgattccccctcgcaccgcggcgctgaccgtggaccacgcacggcacgggtcgtcaactgcgaacgagtccccgtcgatcgcggaggtccagccaggcaatgctgcgggggaaaaaaaggagaccagatggcagaggaagagggagaaggcgagcggagcggggatggtcggatggacatggacctgagcgccgtactggaggacgacgtaggggtcgctggtgtgggtgagcgggtcggcgatgaccaggttgttgccccgcaccacgcggacgttgag

SEQ ID NO: 66665 - DNA, 1443 bp, Zea Mays
tttacatacaccgttgggggagaggaggtagggtgaggagaggaaactgctggagagggtgagagcaaggggagcagcggtcgggcagccatggggcaccactgctgcagcaagcagaaggtgaagcgtgggctgtggtcgccggaggaggacgagaagcttgtcaagtacatcaccgcccacggccacagctgctggagcgccgttcccaagcatgccgggctgcagcgctgcggcaagagctgccgcctccggtggatcaactacctccggccggacctgaagcgcggaaccttctccgaccacgaggagcgcaccatcatcgacgtccaccgcatcctcgggaaccgatcgccaagcacctgcccgggcgcacggataacgaggtcaagaacttctggaactcgtgcatcaagaagaagctcatcgcgcagggcctcgaccccaagacccacaacctcctgccggcctccaggactctcctccacggcaacggggcaaaccctagcagcaacaatcctgcccacttcaactcaaacggctgcgctgctgtcgtctccgtcgccacgacgcccttcaccatcagctccccgaccaaggccgccgcctacggcaccgtcacggccacgccgccgccggagacgatggcgccggcaacgtacgacgtccctaataattaccctgacggcatgctcatgaggcatgatcaggcagccacggcggctgcgattccgggatacccgtaccaccccggaaacggcggcggcgtgctgatgagcttcagggaccagaatgctggtctccagacatctgtggacttcgtgaacggctcctcgtcctcctcctccatggatcacgccgccggcatgcctaacggcaacggctttagccaacaaggcatgggcgcggccttcatggacgtgacggcgggaatgtggagcaccgcagccgtggattctggcatgtgtgcagggatggaagtggctcagccaccgccgccgccgccgcagcagccgctgccaccacaagggctggtgcagggggaggtgctcgtcggccgacaaactgtgatgaacggtggcggtgcagttgctgacaagggcatggacatgatggacgtctcttcagtgtatggcggcgccggtgcaatggcgttcgatctggagctgatggagtcatgcgcgttgttttgcggcagcaccggcaacaccatggagcagctgcaatgggactgctaagctcactatcgtccttacccctaattagtttgttgtcttccatgcttcatccatgtctttatttttcctcttaattttgatgttcgatttactgggttcttgattcagatcgtccttttaaagcaagaaatccatgctgagcttagtgacgaactcgatctaattcagatttcaataaagttatctcaaattttattgattgcat

SEQ ID NO: 66666 - DNA, 8133 bp, Zea Mays
atggcggttgtggaggcgtgcgaccccgcaaggatcgacatctcgtccaagacagcagcctcctcagagcggacgacgcagcttatctctggtggaaggcacgcagccacgcccccactcccctcctcgtgctccccgccgacgcctgcctcgcgctcctcgtcgaccgtctctccctctcctccgtcgttgcatctcgcctctcgcgcacgcacaaagctgaggacgttcctgctcaagccgttcaagctcatcaccgtcttcctccacgagaccagccacgcgctcgcctgcaagctcacctgcggtgatcgcacgatctacgacgctgatttggaaagtgccttgccaaacgattccaacacaaatcccccaaatcgtgcacccatcatcattaaaaaggtcgcaattgccagactgctacaaccatcctacagctacggaaatccttcgctcacactcctccaggacttagagctctgaacaagattggcctatcaagtgaagagaactattctggagaacatgtttcttttgttactgtatttacaacctacaattctgtctcagctggagatggcaatgtttcacctgattctgtaactgttggaaatagttcttatagcaaaatagaaagatccatgaccattctgaacactttcatcagtttcataaaggtatcaatgccaagaagcgatgtgatcatattgactgatcctggttcaaaattttcagtaaatcaagggagtgctacactattgcctattgaaggaaactattctcgaggaaatttgatgcttcagagaataaagacatacatttatgtctctggtgcaagagtgctgaagatgaaggagaggagctctttatgcgaaagtgcagccgatggaaactggggtttgaaatataaaaggaaaagaagcaagttaacagttagcccatctaatgagaatgaggctacctcaccaacatctgactctcgaatgagccatggttccaccaaaaagaagttgaagcatgacaataacatttctccatcagccaagaagataagagggcacgatgggtattttttcgagtgcgtagaatgtgatcttggtggcaatttgctatgttgtgatagctgtcctcgtgtttaccacttggaatgcctcaatcctcctcttaagcgtgcaccccctgggaagtggcaatgtccaagatgccgtccgaaaaaagttagcttgaagctgttaggtaatgcagatgttgacacttctaaacgtgaaaaaagtacaaggacatatgcaagtacggcatcagatagtccaccttcgcatacaaaagtctcctttaagaccaggaactccacacaagacaaaactggattaaacgaacaaggaaaagagtcatctggtggcacaatgaatgggggtgaaaccagtacgaagaataatgaagttgagaaaaagaagacactgatattacatttgaagaagcgttcaaccaaggaattgtcagagaacactaaaccctcgaagtcagaatttgttgaactttcagaagagaaaattgtaaaacatggaagtgttttgaaactcaagaaacatccacatcgtatggacttgtctccaagtaaatctaaaaccaggaggcaaagtagccagagagagagtaaaagatctggcacaaaaaagattaaatattccatgtctgatgatgacagtgtttcctcatcagaaccatcgacatctcttgataacagtgaatcaccaccaaaaagaaaacactcagatggaaaagcaccttcatccagtaccaagaaagggaaaaagaaagtgaaatttgttgagaaaaagcactctgaggagcagggcgtggtaggtgacaaaatgatgactacccaggaggatcagcaggtcgatcgcatcctaggctgccggcttcagatgagccaaatcaacccgccgtcccatgcttcattggagcagtttgaatcagctaatctccaggtggatggtatggttcttccacatgcttccgctggcattcctaataggcctcatgatggaacagagtcttctagaaatggtacaattgaggatatatgtgctgatgaatcagccaatcatagtggtcacaatttagaaatgcgaaaggatacggacagtaaatcccatgaaaaggagtcacataagcgagaacaagtcaagaagatattatcagtatgttctggtgatgagaccaatataatgaaagatgatcaagtagtcagagaaaatgtttcagcttccaaaaaaggtgaagatgagacatctgatttgccagcagaaaaggatgataccatacttccagtcaccagagcttgtacaatgatcaggaccaatcaagatcatacagatgaaagtaaacagcatgggaaaatagaacaaataacaaataaggactacaatgatgctggatatgagttcttgatcaaatgggttggaaaatcaaatattcacaacagttgggtttctgaatccgaggtaaaaatattagcaaaaaggaaactagaaaactacaaagcgaagtatggaatgagtttgataaacatttgcaaggaacagtggtgccagccacagcgagttattggtcttcgtgcttctgtagatgaagtggaagaggttttaatcaaatggtgtggtcttccttatgatgaatgcacttgggaaagatcagatgaacctaccctgatgaaatatagccatttggtcactcagttcaagaattttgaatgccaggctttggataaagatgtggtaaaagattatgcaaatgcaaggaaccgacatgagcttaatgtgttagttgatcagccaaaagaacttcagggcggcatgctcttccctcatcaattggaagcgttgaactggctgcggaaatgctggtacaagtcaaaaaatgttatccttgctgatgagatgggtcttggaaagacagtgtcagcttgtgcttttctatcatccctatattgtgaatttaagattaatttgccatgtcttgtcttggttcctctttctacaatgcccaattggatggctgaattttcatcttgggctcctcatttaaatgttgtggagtatcatggttctgcaaggtcaagatctatcattcgccagtatgagtggcatgcgggcgatgcaagccagattggcaaaacaaagagatcgtacaaattcaatgttttgcttaccacttatgaaatggtgcttgttgatgctgcatatcttcgttctgtctcatgggaagttcttatagttgatgagggacatcgcctgaagaattctagcagcaaactctttagtttacttaattcattctcatttcagcacagagttttgttgactggaactcccttacagaacaacattggtgaaatgtataacttattgaacttcttacagcctacttcttttccttctctatcatcatttgaggagaagtttaatgaccttacaacagcagaaaaagtagaggagctgaagaaacttgtagctcctcatatgcttcggagattgaaaaaagatgcaatgcaaaatatccccccaaagatagagcgaatggtacctgttgaattgacatcaatccaggctgaatactaccgtgctatgcttacaaagaactatcaagtactgcgcaacattggaaaaggtggtgcacaccagtctttattgaacatagtaatgcagcttcggaaagtctgcaaccatccctatcttattcctggaactgaacctgaatctggttcacctgagtttctgcatgaaatgcgcataaaagcctcagcaaagctaactttgttgcatttgatgctaaaaatattacacaaggaaggccatcgtgttcttattttctctcagatgacaaaacttcttgacatccttgaagattatctgactttagaatttggccctaaaacatttgaaagagttgatggctcagtatctgtggcggagcgccaggcagcgattgttcgctttaatcaggataagacacgttttgttttcttgctgtctacacggtcatgtggacttggtattaatttggcaactgcagatactgttatcatatatgattcggatttcaacccacatgctgatatacaggcgatgaacagggcacacagaattggacaatcgaacagacttctggtttacaggcttgtagtacgtgctagtgttgaagagcgtatcttgcaattagccaagaagaaattgatgcttgatcaacttttcgttaacaaatcagaatcacagaaagaagtggaagatatcattcgctggggtacagaggaactctttggaaatagtgacagtgtggatggtaaagataacagtgaagtcccaggtcctgttgctgatgttgaatttaagcatagaagaaaaactggtggcctaggtgatgtttatgaggacaaatgtattggtggttctaccaaacttgtttgggatgaaaatgctattttgaagcttcttgatagatcaaaccttccatcatcaatggctgaaagcactgacggggatttggacaatgatatgcttggtactgtgaagtcaatagattggaacgatgagctcaatgacgaccctggtaccaatgaggatactgcacctattgacaatgatggtagcgagcaggcatctgaatcaaagcaaggtgctaccaatcgttcagaagaaaatgaatgggataaacttttgcgtgtcagatgggagcaatatcaaatagaggaggaggcatgtcttggtcgaggcaaacgtttaaggaaggctgtttcttacagagagacattcgcaacacttcctaacgaagctttaagtgaggactctgatgagggagatgaaccaaagagagaatatacagcagctggactggccttgaaggaaaaatatggaaagcttcgagctagacaaaaggaaaggattgctcagcgacacattatcaagaactatgctgatgataatcttgaagagttcatgactccatacgactctattgctaatgaacctgctgaaaatcctttggtaatcgtagaagatctaaattcttcacagctatctggcgcgaaacgtttcagtgactcaactggagaaatgaggcaatcctccaagaaatcaaagagatattctgaaatccctcaagatctttatgccaaaattcctggtaacacagcttcattcaagcaccactcaaaggccactgatgtattcaatccagggaccccaaatcacttgctacctgtacttggcctttgtgctcctaatgctgatcaggtgaactcatacaaaaactcaatttgtgcaccaagcataaaggagcgtaaaagggccagtggtgacattgtcaaacaactgtcaactcctgctgaccattctaatgtgcatagaaacgaagctcaatcagcttctgataaggccatctttcctggtgcatctgaggaggctttgcgaagaataagtaacatgattccagatagttattttcccttcagtcatattcctcctatatcagggaagggggttgatcctgttgaaaatcctggaccctccattgcatcatttcaagggaatctgggtcttccaaacttcagtctggaagacaacgctccacttaagcatattaagcctatacctgatatatttcctagcctgtcactgggtgctcataaggattatattcgtagttctgtcccagagttgccagatggttcattgctgccaaacttcatggcagatattactggtacttcgaagcaaaagtcatttatgtctggtctacttcctgggctgggtcttagcccagggcaaccaatacattcggctatgcctgataatcacaagaaagtcttggacaatataatgatgcgtgctcagtatgcgtcaaacaaattcttgaagaagagatcaaaactagattattggtcagaggatgaacttgatgctctgtggataggagttcgtaggcatggaaggggaaattgggatgctatgcttagagatccaaagctgaagtttttgaacaaccgaactagtgaggagctggccttgaggtggattttggaggagcaaaaaattatagatgaacctatgtctacatccaccaggcgttctaactcagcagcatttcctggaatatctgatgcaatgatgtctcgggcactgaatgaaagtaatttctctaaaatgaggatggagcagcctaaattgcagtcccacttaactgatattcagttaggttcgagtgatatcctatccacatttcctcatgttgacgctgctagttacattaactcaggggagggtggcccatctcaaataccatggcaggattttaagcatagatcaagttatgctggagattttcctgccggtgcatttgacaagttggagaaacctgatgttggaccgatcccgccatttatgccaaatcctttcatgactgacagcattggttcacttcccataaacagaaaaaacaatagttccatcccgcatagtgaaatcaggtcaagttctcgtgagaacattctttctggtgtttcggatggacagatcaacttgcttcatgagatgcagcgtcgtcgtcgtgtgaggtcaggcaaagaacccattgagatgaatctcaaccacatagaccactcaaatctccagcttgataatactagtgaccttggaggtttaaaaccaaacaagttacctcattggcttcaggaggctgtacgtgctccttcatctaagccacctgaacgtgagctaccagcaacagtttcggcaattgctcagtcggtctgccttcttcttggagaacaagaaccatcaatacctccattcttgatcccgggaacacctctttctcgcccaaaagatccaaggattaattcaaagaagaaactccgcaaggctcagcaatctaactctcatgtagagcattcaaaaattggatctggtgagggtgattgtgtcactaccccagcacccccatccattgaagcttcacctgcacttcctgtcgattgcgatgatggtgagccttcactcaacttgaaatctgcatcgttgtcatcttcagctggcagcaaggggctagatgaattacctcccacatttaaagaagcaaaccaaaccgtggatggctcagaagctgttgcggccaagtcagatgctcctgaaattggttgtcaggtacctggttcctctccattacatgacaaaggtagtgaatcctcggggtcgccagtgaaggacactcctgacgctggaatcagattgccaggatcagataactcagttatggcattttctgcactcccacttgttgatgaagcacctgggacaagcagcagagcagctgacacgcctgtgccatgtgatggcaatgagtcgaaagaggatgttccactagacaacgctgaaagcaccaggaaactggagccgaacggatgaactggctcctcttgcgagcatggatgcatcgcatcgagtttctgctaatacagccgacgaagatgggtggatgaaatgatcattagactcgagctagttagctcaacattcctttcttttgcgttcagcataacactgggattttccctctcccaatgtttccagtgttgatctcgtgttgtgtaatgctttagtgcaggtctcgttgcagataggatgaaacgcaaagggctagtggtacttagcagtagttgggcactagtccgtcgggggagcaactcgtggaaacctgtatacaagaaatgtatattttgctaatatggtgctggttgggtgtgtagaaggtagaccgctattcgtttatttatgcgtatatggtttagtaatttgccatctgtctagcggtggctgtaagagtagacgtgatgatgatattgcctagccttgactcgttggcctccatgcctagccgaagagaagctgtgttcatactgacataactgacatactgagcgacttttgactgtttttttttatttcattagcggcaacgaagccaagaaccatgatcttcactcttttgtccccaccccccaaaaaaaaccccggaactctcaactattgttgtgcactgtaatttacctcttcaaattagaaaagtgatgttttg

SEQ ID NO: 66667 - DNA, 7957 bp, Zea Mays
atgctcccgagatcagacctctgccccatcctcctgcgcgtccgcgtcggttactgcctgactggtccagcttttagatcacatggtgatgatggttatgatggtagaactgatggcgcctttgaaggaggtgcagtcgactcacgcaagtacaagcccgcgctcaagctctgcaccgccaacgcctacgaaatcccgattgcagtgaagtcaattacttccctctgcaatccaactatatagagagatcgacgtcaaaaggaacctcagactttgtattcaagtctgcgaggacttagagctctgaacaagattggcctatcaagtgaagagaactattctggagaacatgtttcttttgttactgtatttacaacctacaattctgtctcagctggagatggcaatgtttcacctgattctgtaactgttggaaatagttcttatagcaaaatagaaagatccatgaccattctgaacactttcatcagtttcataaaggtatcaatgccaagaagcgatgtgatcatattgactgatcctggttcaaaattttcagtaaatcaagggagtgctacactattgcctattgaaggaaactattctcgaggaaatttgatgcttcagagaataaagacatacatttatgtctctggtgcaagagtgctgaagatgaaggagaggagctctttatgcgaaagtgcagccgatggaaactggggtttgaaatataaaaggaaaagaagcaagttaacagttagcccatctaatgagaatgaggctacctcaccaacatctgactctcgaatgagccatggttccaccaaaaagaagttgaagcatgacaataacatttctccatcagccaagaagataagagggcacgatgggtattttttcgagtgcgtagaatgtgatcttggtggcaatttgctatgttgtgatagctgtcctcgtgtttaccacttggaatgcctcaatcctcctcttaagcgtgcaccccctgggaagtggcaatgtccaagatgccgtccgaaaaaagttagcttgaagctgttaggtaatgcagatgttgacacttctaaacgtgaaaaaagtacaaggacatatgcaagtacggcatcagatagtccaccttcgcatacaaaagtctcctttaagaccaggaactccacacaagacaaaactggattaaacgaacaaggaaaagagtcatctggtggcacaatgaatgggggtgaaaccagtacgaagaataatgaagttgagaaaaagaagacactgatattacatttgaagaagcgttcaaccaaggaattgtcagagaacactaaaccctcgaagtcagaatttgttgaactttcagaagagaaaattgtaaaacatggaagtgttttgaaactcaagaaacatccacatcgtatggacttgtctccaagtaaatctaaaaccaggaggcaaagtagccagagagagagtaaaagatctggcacaaaaaagattaaatattccatgtctgatgatgacagtgtttcctcatcagaaccatcgacatctcttgataacagtgaatcaccaccaaaaagaaaacactcagatggaaaagcaccttcatccagtaccaagaaagggaaaaagaaagtgaaatttgttgagaaaaagcactctgaggagcagggcgtggtaggtgacaaaatgatgactacccaggaggatcagcaggtcgatcgcatcctaggctgccggcttcagatgagccaaatcaacccgccgtcccatgcttcattggagcagtttgaatcagctaatctccaggtggatggtatggttcttccacatgcttccgctggcattcctaataggcctcatgatggaacagagtcttctagaaatggtacaattgaggatatatgtgctgatgaatcagccaatcatagtggtcacaatttagaaatgcgaaaggatacggacagtaaatcccatgaaaaggagtcacataagcgagaacaagtcaagaagatattatcagtatgttctggtgatgagaccaatataatgaaagatgatcaagtagtcagagaaaatgtttcagcttccaaaaaaggtgaagatgagacatctgatttgccagcagaaaaggatgataccatacttccagtcaccagagcttgtacaatgatcaggaccaatcaagatcatacagatgaaagtaaacagcatgggaaaatagaacaaataacaaataaggactacaatgatgctggatatgagttcttgatcaaatgggttggaaaatcaaatattcacaacagttgggtttctgaatccgaggtaaaaatattagcaaaaaggaaactagaaaactacaaagcgaagtatggaatgagtttgataaacatttgcaaggaacagtggtgccagccacagcgagttattggtcttcgtgcttctgtagatgaagtggaagaggttttaatcaaatggtgtggtcttccttatgatgaatgcacttgggaaagatcagatgaacctaccctgatgaaatatagccatttggtcactcagttcaagaattttgaatgccaggctttggataaagatgtggtaaaagattatgcaaatgcaaggaaccgacatgagcttaatgtgttagttgatcagccaaaagaacttcagggcggcatgctcttccctcatcaattggaagcgttgaactggctgcggaaatgctggtacaagtcaaaaaatgttatccttgctgatgagatgggtcttggaaagacagtgtcagcttgtgcttttctatcatccctatattgtgaatttaagattaatttgccatgtcttgtcttggttcctctttctacaatgcccaattggatggctgaattttcatcttgggctcctcatttaaatgttgtggagtatcatggttctgcaaggtcaagatctatcattcgccagtatgagtggcatgcgggcgatgcaagccagattggcaaaacaaagagatcgtacaaattcaatgttttgcttaccacttatgaaatggtgcttgttgatgctgcatatcttcgttctgtctcatgggaagttcttatagttgatgagggacatcgcctgaagaattctagcagcaaactctttagtttacttaattcattctcatttcagcacagagttttgttgactggaactcccttacagaacaacattggtgaaatgtataacttattgaacttcttacagcctacttcttttccttctctatcatcatttgaggagaagtttaatgaccttacaacagcagaaaaagtagaggagctgaagaaacttgtagctcctcatatgcttcggagattgaaaaaagatgcaatgcaaaatatccccccaaagatagagcgaatggtacctgttgaattgacatcaatccaggctgaatactaccgtgctatgcttacaaagaactatcaagtactgcgcaacattggaaaaggtggtgcacaccagtctttattgaacatagtaatgcagcttcggaaagtctgcaaccatccctatcttattcctggaactgaacctgaatctggttcacctgagtttctgcatgaaatgcgcataaaagcctcagcaaagctaactttgttgcatttgatgctaaaaatattacacaaggaaggccatcgtgttcttattttctctcagatgacaaaacttcttgacatccttgaagattatctgactttagaatttggccctaaaacatttgaaagagttgatggctcagtatctgtggcggagcgccaggcagcgattgttcgctttaatcaggataagacacgttttgttttcttgctgtctacacggtcatgtggacttggtattaatttggcaactgcagatactgttatcatatatgattcggatttcaacccacatgctgatatacaggcgatgaacagggcacacagaattggacaatcgaacagacttctggtttacaggcttgtagtacgtgctagtgttgaagagcgtatcttgcaattagccaagaagaaattgatgcttgatcaacttttcgttaacaaatcagaatcacagaaagaagtggaagatatcattcgctggggtacagaggaactctttggaaatagtgacagtgtggatggtaaagataacagtgaagtcccaggtcctgttgctgatgttgaatttaagcatagaagaaaaactggtggcctaggtgatgtttatgaggacaaatgtattggtggttctaccaaacttgtttgggatgaaaatgctattttgaagcttcttgatagatcaaaccttccatcatcaatggctgaaagcactgacggggatttggacaatgatatgcttggtactgtgaagtcaatagattggaacgatgagctcaatgacgaccctggtaccaatgaggatactgcacctattgacaatgatggtagcgagcaggcatctgaatcaaagcaaggtgctaccaatcgttcagaagaaaatgaatgggataaacttttgcgtgtcagatgggagcaatatcaaatagaggaggaggcatgtcttggtcgaggcaaacgtttaaggaaggctgtttcttacagagagacattcgcaacacttcctaacgaagctttaagtgaggactctgatgagggagatgaaccaaagagagaatatacagcagctggactggccttgaaggaaaaatatggaaagcttcgagctagacaaaaggaaaggattgctcagcgacacattatcaagaactatgctgatgataatcttgaagagttcatgactccatacgactctattgctaatgaacctgctgaaaatcctttggtaatcgtagaagatctaaattcttcacagctatctggcgcgaaacgtttcagtgactcaactggagaaatgaggcaatcctccaagaaatcaaagagatattctgaaatccctcaagatctttatgccaaaattcctggtaacacagcttcattcaagcaccactcaaaggccactgatgtattcaatccagggaccccaaatcacttgctacctgtacttggcctttgtgctcctaatgctgatcaggtgaactcatacaaaaactcaatttgtgcaccaagcataaaggagcgtaaaagggccagtggtgacattgtcaaacaactgtcaactcctgctgaccattctaatgtgcatagaaacgaagctcaatcagcttctgataaggccatctttcctggtgcatctgaggaggctttgcgaagaataagtaacatgattccagatagttattttcccttcagtcatattcctcctatatcagggaagggggttgatcctgttgaaaatcctggaccctccattgcatcatttcaagggaatctgggtcttccaaacttcagtctggaagacaacgctccacttaagcatattaagcctatacctgatatatttcctagcctgtcactgggtgctcataaggattatattcgtagttctgtcccagagttgccagatggttcattgctgccaaacttcatggcagatattactggtacttcgaagcaaaagtcatttatgtctggtctacttcctgggctgggtcttagcccagggcaaccaatacattcggctatgcctgataatcacaagaaagtcttggacaatataatgatgcgtgctcagtatgcgtcaaacaaattcttgaagaagagatcaaaactagattattggtcagaggatgaacttgatgctctgtggataggagttcgtaggcatggaaggggaaattgggatgctatgcttagagatccaaagctgaagtttttgaacaaccgaactagtgaggagctggccttgaggtggattttggaggagcaaaaaattatagatgaacctatgtctacatccaccaggcgttctaactcagcagcatttcctggaatatctgatgcaatgatgtctcgggcactgaatgaaagtaatttctctaaaatgaggatggagcagcctaaattgcagtcccacttaactgatattcagttaggttcgagtgatatcctatccacatttcctcatgttgacgctgctagttacattaactcaggggagggtggcccatctcaaataccatggcaggattttaagcatagatcaagttatgctggagattttcctgccggtgcatttgacaagttggagaaacctgatgttggaccgatcccgccatttatgccaaatcctttcatgactgacagcattggttcacttcccataaacagaaaaaacaatagttccatcccgcatagtgaaatcaggtcaagttctcgtgagaacattctttctggtgtttcggatggacagatcaacttgcttcatgagatgcagcgtcgtcgtcgtgtgaggtcaggcaaagaacccattgagatgaatctcaaccacatagaccactcaaatctccagcttgataatactagtgaccttggaggtttaaaaccaaacaagttacctcattggcttcaggaggctgtacgtgctccttcatctaagccacctgaacgtgagctaccagcaacagtttcggcaattgctcagtcggtctgccttcttcttggagaacaagaaccatcaatacctccattcttgatcccgggaacacctctttctcgcccaaaagatccaaggattaattcaaagaagaaactccgcaaggctcagcaatctaactctcatgtagagcattcaaaaattggatctggtgagggtgattgtgtcactaccccagcacccccatccattgaagcttcacctgcacttcctgtcgattgcgatgatggtgagccttcactcaacttgaaatctgcatcgttgtcatcttcagctggcagcaaggggctagatgaattacctcccacatttaaagaagcaaaccaaaccgtggatggctcagaagctgttgcggccaagtcagatgctcctgaaattggttgtcaggtacctggttcctctccattacatgacaaaggtagtgaatcctcggggtcgccagtgaaggacactcctgacgctggaatcagattgccaggatcagataactcagttatggcattttctgcactcccacttgttgatgaagcacctgggacaagcagcagagcagctgacacgcctgtgccatgtgatggcaatgagtcgaaagaggatgttccactagacaacgctgaaagcaccaggaaactggagccgaacggatgaactggctcctcttgcgagcatggatgcatcgcatcgagtttctgctaatacagccgacgaagatgggtggatgaaatgatcattagactcgagctagttagctcaacattcctttcttttgcgttcagcataacactgggattttccctctcccaatgtttccagtgttgatctcgtgttgtgtaatgctttagtgcaggtctcgttgcagataggatgaaacgcaaagggctagtggtacttagcagtagttgggcactagtccgtcgggggagcaactcgtggaaacctgtatacaagaaatgtatattttgctaatatggtgctggttgggtgtgtagaaggtagaccgctattcgtttatttatgcgtatatggtttagtaatttgccatctgtctagcggtggctgtaagagtagacgtgatgatgatattgcctagccttgactcgttggcctccatgcctagccgaagagaagctgtgttcatactgacataactgacatactgagcgacttttgactgtttttttttatttcattagcggcaacgaagccaagaaccatgatcttcactcttttgtccccaccccccaaaaaaaaccccggaactctcaactattgttgtgcactgtaatttacctcttcaaattagaaaagtgatgttttg

SEQ ID NO: 66668 - DNA, 8061 bp, Zea Mays
atgttggtggattcaaacctaccgttagatgtaatgtttatgattattattatatttgatacaaatttggcattatcaaatttatattttacttatacatataatagtttaaaactatcgatcacaagctggacgtttttttatcacaaaggttggactgtttgaatcttgattgacttataagctggacgaacctgatcaatacgcttatcatttgcccctccggtcaccccgctgtcggcgaagctgacacgatttcgtttcctgacggaccggggctccgctgccgcctcttcgcccctatatggcggtcccgaggcctcgaatccgcgccctacgtcgaggcacgctgctcctcttcctcctcgtcccgctcatctactccggacttagagctctgaacaagattggcctatcaagtgaagagaactattctggagaacatgtttcttttgttactgtatttacaacctacaattctgtctcagctggagatggcaatgtttcacctgattctgtaactgttggaaatagttcttatagcaaaatagaaagatccatgaccattctgaacactttcatcagtttcataaagaaccctgcaggtatcaatgccaagaagcgatgtgatcatattgactgatcctggttcaaaattttcagtaaatcaagggagtgctacactattgcctattgaaggaaactattctcgaggaaatttgatgcttcagagaataaagacatacatttatgtctctggtgcaagagtgctgaagatgaaggagaggagctctttatgcgaaagtgcagccgatggaaactggggtttgaaatataaaaggaaaagaagcaagttaacagttagcccatctaatgagaatgaggctacctcaccaacatctgactctcgaatgagccatggttccaccaaaaagaagttgaagcatgacaataacatttctccatcagccaagaagataagagggcacgatgggtattttttcgagtgcgtagaatgtgatcttggtggcaatttgctatgttgtgatagctgtcctcgtgtttaccacttggaatgcctcaatcctcctcttaagcgtgcaccccctgggaagtggcaatgtccaagatgccgtccgaaaaaagttagcttgaagctgttaggtaatgcagatgttgacacttctaaacgtgaaaaaagtacaaggacatatgcaagtacggcatcagatagtccaccttcgcatacaaaagtctcctttaagaccaggaactccacacaagacaaaactggattaaacgaacaaggaaaagagtcatctggtggcacaatgaatgggggtgaaaccagtacgaagaataatgaagttgagaaaaagaagacactgatattacatttgaagaagcgttcaaccaaggaattgtcagagaacactaaaccctcgaagtcagaatttgttgaactttcagaagagaaaattgtaaaacatggaagtgttttgaaactcaagaaacatccacatcgtatggacttgtctccaagtaaatctaaaaccaggaggcaaagtagccagagagagagtaaaagatctggcacaaaaaagattaaatattccatgtctgatgatgacagtgtttcctcatcagaaccatcgacatctcttgataacagtgaatcaccaccaaaaagaaaacactcagatggaaaagcaccttcatccagtaccaagaaagggaaaaagaaagtgaaatttgttgagaaaaagcactctgaggagcagggcgtggtaggtgacaaaatgatgactacccaggaggatcagcaggtcgatcgcatcctaggctgccggcttcagatgagccaaatcaacccgccgtcccatgcttcattggagcagtttgaatcagctaatctccaggtggatggtatggttcttccacatgcttccgctggcattcctaataggcctcatgatggaacagagtcttctagaaatggtacaattgaggatatatgtgctgatgaatcagccaatcatagtggtcacaatttagaaatgcgaaaggatacggacagtaaatcccatgaaaaggagtcacataagcgagaacaagtcaagaagatattatcagtatgttctggtgatgagaccaatataatgaaagatgatcaagtagtcagagaaaatgtttcagcttccaaaaaaggtgaagatgagacatctgatttgccagcagaaaaggatgataccatacttccagtcaccagagcttgtacaatgatcaggaccaatcaagatcatacagatgaaagtaaacagcatgggaaaatagaacaaataacaaataaggactacaatgatgctggatatgagttcttgatcaaatgggttggaaaatcaaatattcacaacagttgggtttctgaatccgaggtaaaaatattagcaaaaaggaaactagaaaactacaaagcgaagtatggaatgagtttgataaacatttgcaaggaacagtggtgccagccacagcgagttattggtcttcgtgcttctgtagatgaagtggaagaggttttaatcaaatggtgtggtcttccttatgatgaatgcacttgggaaagatcagatgaacctaccctgatgaaatatagccatttggtcactcagttcaagaattttgaatgccaggctttggataaagatgtggtaaaagattatgcaaatgcaaggaaccgacatgagcttaatgtgttagttgatcagccaaaagaacttcagggcggcatgctcttccctcatcaattggaagcgttgaactggctgcggaaatgctggtacaagtcaaaaaatgttatccttgctgatgagatgggtcttggaaagacagtgtcagcttgtgcttttctatcatccctatattgtgaatttaagattaatttgccatgtcttgtcttggttcctctttctacaatgcccaattggatggctgaattttcatcttgggctcctcatttaaatgttgtggagtatcatggttctgcaaggtcaagatctatcattcgccagtatgagtggcatgcgggcgatgcaagccagattggcaaaacaaagagatcgtacaaattcaatgttttgcttaccacttatgaaatggtgcttgttgatgctgcatatcttcgttctgtctcatgggaagttcttatagttgatgagggacatcgcctgaagaattctagcagcaaactctttagtttacttaattcattctcatttcagcacagagttttgttgactggaactcccttacagaacaacattggtgaaatgtataacttattgaacttcttacagcctacttcttttccttctctatcatcatttgaggagaagtttaatgaccttacaacagcagaaaaagtagaggagctgaagaaacttgtagctcctcatatgcttcggagattgaaaaaagatgcaatgcaaaatatccccccaaagatagagcgaatggtacctgttgaattgacatcaatccaggctgaatactaccgtgctatgcttacaaagaactatcaagtactgcgcaacattggaaaaggtggtgcacaccagtctttattgaacatagtaatgcagcttcggaaagtctgcaaccatccctatcttattcctggaactgaacctgaatctggttcacctgagtttctgcatgaaatgcgcataaaagcctcagcaaagctaactttgttgcatttgatgctaaaaatattacacaaggaaggccatcgtgttcttattttctctcagatgacaaaacttcttgacatccttgaagattatctgactttagaatttggccctaaaacatttgaaagagttgatggctcagtatctgtggcggagcgccaggcagcgattgttcgctttaatcaggataagacacgttttgttttcttgctgtctacacggtcatgtggacttggtattaatttggcaactgcagatactgttatcatatatgattcggatttcaacccacatgctgatatacaggcgatgaacagggcacacagaattggacaatcgaacagacttctggtttacaggcttgtagtacgtgctagtgttgaagagcgtatcttgcaattagccaagaagaaattgatgcttgatcaacttttcgttaacaaatcagaatcacagaaagaagtggaagatatcattcgctggggtacagaggaactctttggaaatagtgacagtgtggatggtaaagataacagtgaagtcccaggtcctgttgctgatgttgaatttaagcatagaagaaaaactggtggcctaggtgatgtttatgaggacaaatgtattggtggttctaccaaacttgtttgggatgaaaatgctattttgaagcttcttgatagatcaaaccttccatcatcaatggctgaaagcactgacggggatttggacaatgatatgcttggtactgtgaagtcaatagattggaacgatgagctcaatgacgaccctggtaccaatgaggatactgcacctattgacaatgatggtagcgagcaggcatctgaatcaaagcaaggtgctaccaatcgttcagaagaaaatgaatgggataaacttttgcgtgtcagatgggagcaatatcaaatagaggaggaggcatgtcttggtcgaggcaaacgtttaaggaaggctgtttcttacagagagacattcgcaacacttcctaacgaagctttaagtgaggactctgatgagggagatgaaccaaagagagaatatacagcagctggactggccttgaaggaaaaatatggaaagcttcgagctagacaaaaggaaaggattgctcagcgacacattatcaagaactatgctgatgataatcttgaagagttcatgactccatacgactctattgctaatgaacctgctgaaaatcctttggtaatcgtagaagatctaaattcttcacagctatctggcgcgaaacgtttcagtgactcaactggagaaatgaggcaatcctccaagaaatcaaagagatattctgaaatccctcaagatctttatgccaaaattcctggtaacacagcttcattcaagcaccactcaaaggccactgatgtattcaatccagggaccccaaatcacttgctacctgtacttggcctttgtgctcctaatgctgatcaggtgaactcatacaaaaactcaatttgtgcaccaagcataaaggagcgtaaaagggccagtggtgacattgtcaaacaactgtcaactcctgctgaccattctaatgtgcatagaaacgaagctcaatcagcttctgataaggccatctttcctggtgcatctgaggaggctttgcgaagaataagtaacatgattccagatagttattttcccttcagtcatattcctcctatatcagggaagggggttgatcctgttgaaaatcctggaccctccattgcatcatttcaagggaatctgggtcttccaaacttcagtctggaagacaacgctccacttaagcatattaagcctatacctgatatatttcctagcctgtcactgggtgctcataaggattatattcgtagttctgtcccagagttgccagatggttcattgctgccaaacttcatggcagatattactggtacttcgaagcaaaagtcatttatgtctggtctacttcctgggctgggtcttagcccagggcaaccaatacattcggctatgcctgataatcacaagaaagtcttggacaatataatgatgcgtgctcagtatgcgtcaaacaaattcttgaagaagagatcaaaactagattattggtcagaggatgaacttgatgctctgtggataggagttcgtaggcatggaaggggaaattgggatgctatgcttagagatccaaagctgaagtttttgaacaaccgaactagtgaggagctggccttgaggtggattttggaggagcaaaaaattatagatgaacctatgtctacatccaccaggcgttctaactcagcagcatttcctggaatatctgatgcaatgatgtctcgggcactgaatgaaagtaatttctctaaaatgaggatggagcagcctaaattgcagtcccacttaactgatattcagttaggttcgagtgatatcctatccacatttcctcatgttgacgctgctagttacattaactcaggggagggtggcccatctcaaataccatggcaggattttaagcatagatcaagttatgctggagattttcctgccggtgcatttgacaagttggagaaacctgatgttggaccgatcccgccatttatgccaaatcctttcatgactgacagcattggttcacttcccataaacagaaaaaacaatagttccatcccgcatagtgaaatcaggtcaagttctcgtgagaacattctttctggtgtttcggatggacagatcaacttgcttcatgagatgcagcgtcgtcgtcgtgtgaggtcaggcaaagaacccattgagatgaatctcaaccacatagaccactcaaatctccagcttgataatactagtgaccttggaggtttaaaaccaaacaagttacctcattggcttcaggaggctgtacgtgctccttcatctaagccacctgaacgtgagctaccagcaacagtttcggcaattgctcagtcggtctgccttcttcttggagaacaagaaccatcaatacctccattcttgatcccgggaacacctctttctcgcccaaaagatccaaggattaattcaaagaagaaactccgcaaggctcagcaatctaactctcatgtagagcattcaaaaattggatctggtgagggtgattgtgtcactaccccagcacccccatccattgaagcttcacctgcacttcctgtcgattgcgatgatggtgagccttcactcaacttgaaatctgcatcgttgtcatcttcagctggcagcaaggggctagatgaattacctcccacatttaaagaagcaaaccaaaccgtggatggctcagaagctgttgcggccaagtcagatgctcctgaaattggttgtcaggtacctggttcctctccattacatgacaaaggtagtgaatcctcggggtcgccagtgaaggacactcctgacgctggaatcagattgccaggatcagataactcagttatggcattttctgcactcccacttgttgatgaagcacctgggacaagcagcagagcagctgacacgcctgtgccatgtgatggcaatgagtcgaaagaggatgttccactagacaacgctgaaagcaccaggaaactggagccgaacggatgaactggctcctcttgcgagcatggatgcatcgcatcgagtttctgctaatacagccgacgaagatgggtggatgaaatgatcattagactcgagctagttagctcaacattcctttcttttgcgttcagcataacactgggattttccctctcccaatgtttccagtgttgatctcgtgttgtgtaatgctttagtgcaggtctcgttgcagataggatgaaacgcaaagggctagtggtacttagcagtagttgggcactagtccgtcgggggagcaactcgtggaaacctgtatacaagaaatgtatattttgctaatatggtgctggttgggtgtgtagaaggtagaccgctattcgtttatttatgcgtatatggtttagtaatttgccatctgtctagcggtggctgtaagagtagacgtgatgatgatattgcctagccttgactcgttggcctccatgcctagccgaagagaagctgtgttcatactgacataactgacatactgagcgacttttgactgtttttttttatttcattagcggcaacgaagccaagaaccatgatcttcactcttttgtccccaccccccaaaaaaaaccccggaactctcaactattgttgtgcactgtaatttacctcttcaaattagaaaagtgatgttttg

SEQ ID NO: 66669 - DNA, 7240 bp, Zea Mays
aaacaagtccttggaacttacagcttaagatatactagtatgtctctggtgcaagagtgctgaagatgaaggagaggagctctttatgcgaaagtgcagccgatggaaactggggtttgaaatataaaaggaaaagaagcaagttaacagttagcccatctaatgagaatgaggctacctcaccaacatctgactctcgaatgagccatggttccaccaaaaagaagttgaagcatgacaataacatttctccatcagccaagaagataagagggcacgatgggtattttttcgagtgcgtagaatgtgatcttggtggcaatttgctatgttgtgatagctgtcctcgtgtttaccacttggaatgcctcaatcctcctcttaagcgtgcaccccctgggaagtggcaatgtccaagatgccgtccgaaaaaagttagcttgaagctgttaggtaatgcagatgttgacacttctaaacgtgaaaaaagtacaaggacatatgcaagtacggcatcagatagtccaccttcgcatacaaaagtctcctttaagaccaggaactccacacaagacaaaactggattaaacgaacaaggaaaagagtcatctggtggcacaatgaatgggggtgaaaccagtacgaagaataatgaagttgagaaaaagaagacactgatattacatttgaagaagcgttcaaccaaggaattgtcagagaacactaaaccctcgaagtcagaatttgttgaactttcagaagagaaaattgtaaaacatggaagtgttttgaaactcaagaaacatccacatcgtatggacttgtctccaagtaaatctaaaaccaggaggcaaagtagccagagagagagtaaaagatctggcacaaaaaagattaaatattccatgtctgatgatgacagtgtttcctcatcagaaccatcgacatctcttgataacagtgaatcaccaccaaaaagaaaacactcagatggaaaagcaccttcatccagtaccaagaaagggaaaaagaaagtgaaatttgttgagaaaaagcactctgaggagcagggcgtggtaggtgacaaaatgatgactacccaggaggatcagcaggtcgatcgcatcctaggctgccggcttcagatgagccaaatcaacccgccgtcccatgcttcattggagcagtttgaatcagctaatctccaggtggatggtatggttcttccacatgcttccgctggcattcctaataggcctcatgatggaacagagtcttctagaaatggtacaattgaggatatatgtgctgatgaatcagccaatcatagtggtcacaatttagaaatgcgaaaggatacggacagtaaatcccatgaaaaggagtcacataagcgagaacaagtcaagaagatattatcagtatgttctggtgatgagaccaatataatgaaagatgatcaagtagtcagagaaaatgtttcagcttccaaaaaaggtgaagatgagacatctgatttgccagcagaaaaggatgataccatacttccagtcaccagagcttgtacaatgatcaggaccaatcaagatcatacagatgaaagtaaacagcatgggaaaatagaacaaataacaaataaggactacaatgatgctggatatgagttcttgatcaaatgggttggaaaatcaaatattcacaacagttgggtttctgaatccgaggtaaaaatattagcaaaaaggaaactagaaaactacaaagcgaagtatggaatgagtttgataaacatttgcaaggaacagtggtgccagccacagcgagttattggtcttcgtgcttctgtagatgaagtggaagaggttttaatcaaatggtgtggtcttccttatgatgaatgcacttgggaaagatcagatgaacctaccctgatgaaatatagccatttggtcactcagttcaagaattttgaatgccaggctttggataaagatgtggtaaaagattatgcaaatgcaaggaaccgacatgagcttaatgtgttagttgatcagccaaaagaacttcagggcggcatgctcttccctcatcaattggaagcgttgaactggctgcggaaatgctggtacaagtcaaaaaatgttatccttgctgatgagatgggtcttggaaagacagtgtcagcttgtgcttttctatcatccctatattgtgaatttaagattaatttgccatgtcttgtcttggttcctctttctacaatgcccaattggatggctgaattttcatcttgggctcctcatttaaatgttgtggagtatcatggttctgcaaggtcaagatctatcattcgccagtatgagtggcatgcgggcgatgcaagccagattggcaaaacaaagagatcgtacaaattcaatgttttgcttaccacttatgaaatggtgcttgttgatgctgcatatcttcgttctgtctcatgggaagttcttatagttgatgagggacatcgcctgaagaattctagcagcaaactctttagtttacttaattcattctcatttcagcacagagttttgttgactggaactcccttacagaacaacattggtgaaatgtataacttattgaacttcttacagcctacttcttttccttctctatcatcatttgaggagaagtttaatgaccttacaacagcagaaaaagtagaggagctgaagaaacttgtagctcctcatatgcttcggagattgaaaaaagatgcaatgcaaaatatccccccaaagatagagcgaatggtacctgttgaattgacatcaatccaggctgaatactaccgtgctatgcttacaaagaactatcaagtactgcgcaacattggaaaaggtggtgcacaccagtctttattgaacatagtaatgcagcttcggaaagtctgcaaccatccctatcttattcctggaactgaacctgaatctggttcacctgagtttctgcatgaaatgcgcataaaagcctcagcaaagctaactttgttgcatttgatgctaaaaatattacacaaggaaggccatcgtgttcttattttctctcagatgacaaaacttcttgacatccttgaagattatctgactttagaatttggccctaaaacatttgaaagagttgatggctcagtatctgtggcggagcgccaggcagcgattgttcgctttaatcaggataagacacgttttgttttcttgctgtctacacggtcatgtggacttggtattaatttggcaactgcagatactgttatcatatatgattcggatttcaacccacatgctgatatacaggcgatgaacagggcacacagaattggacaatcgaacagacttctggtttacaggcttgtagtacgtgctagtgttgaagagcgtatcttgcaattagccaagaagaaattgatgcttgatcaacttttcgttaacaaatcagaatcacagaaagaagtggaagatatcattcgctggggtacagaggaactctttggaaatagtgacagtgtggatggtaaagataacagtgaagtcccaggtcctgttgctgatgttgaatttaagcatagaagaaaaactggtggcctaggtgatgtttatgaggacaaatgtattggtggttctaccaaacttgtttgggatgaaaatgctattttgaagcttcttgatagatcaaaccttccatcatcaatggctgaaagcactgacggggatttggacaatgatatgcttggtactgtgaagtcaatagattggaacgatgagctcaatgacgaccctggtaccaatgaggatactgcacctattgacaatgatggtagcgagcaggcatctgaatcaaagcaaggtgctaccaatcgttcagaagaaaatgaatgggataaacttttgcgtgtcagatgggagcaatatcaaatagaggaggaggcatgtcttggtcgaggcaaacgtttaaggaaggctgtttcttacagagagacattcgcaacacttcctaacgaagctttaagtgaggactctgatgagggagatgaaccaaagagagaatatacagcagctggactggccttgaaggaaaaatatggaaagcttcgagctagacaaaaggaaaggattgctcagcgacacattatcaagaactatgctgatgataatcttgaagagttcatgactccatacgactctattgctaatgaacctgctgaaaatcctttggtaatcgtagaagatctaaattcttcacagctatctggcgcgaaacgtttcagtgactcaactggagaaatgaggcaatcctccaagaaatcaaagagatattctgaaatccctcaagatctttatgccaaaattcctggtgaactcatacaaaaactcaatttgtgcaccaagcataaaggagcgtaaaagggccagtggtgacattgtcaaacaactgtcaactcctgctgaccattctaatgtgcatagaaacgaagctcaatcagcttctgataaggccatctttcctggtgcatctgaggaggctttgcgaagaataagtaacatgattccagatagttattttcccttcagtcatattcctcctatatcagggaagggggttgatcctgttgaaaatcctggaccctccattgcatcatttcaagggaatctgggtcttccaaacttcagtctggaagacaacgctccacttaagcatattaagcctatacctgatatatttcctagcctgtcactgggtgctcataaggattatattcgtagttctgtcccagagttgccagatggttcattgctgccaaacttcatggcagatattactggtacttcgaagcaaaagtcatttatgtctggtctacttcctgggctgggtcttagcccagggcaaccaatacattcggctatgcctgataatcacaagaaagtcttggacaatataatgatgcgtgctcagtatgcgtcaaacaaattcttgaagaagagatcaaaactagattattggtcagaggatgaacttgatgctctgtggataggagttcgtaggcatggaaggggaaattgggatgctatgcttagagatccaaagctgaagtttttgaacaaccgaactagtgaggagctggccttgaggtggattttggaggagcaaaaaattatagatgaacctatgtctacatccaccaggcgttctaactcagcagcatttcctggaatatctgatgcaatgatgtctcgggcactgaatgaaagtaatttctctaaaatgaggatggagcagcctaaattgcagtcccacttaactgatattcagttaggttcgagtgatatcctatccacatttcctcatgttgacgctgctagttacattaactcaggggagggtggcccatctcaaataccatggcaggattttaagcatagatcaagttatgctggagattttcctgccggtgcatttgacaagttggagaaacctgatgttggaccgatcccgccatttatgccaaatcctttcatgactgacagcattggttcacttcccataaacagaaaaaacaatagttccatcccgcatagtgaaatcaggtcaagttctcgtgagaacattctttctggtgtttcggatggacagatcaacttgcttcatgagatgcagcgtcgtcgtcgtgtgaggtcaggcaaagaacccattgagatgaatctcaaccacatagaccactcaaatctccagcttgataatactagtgaccttggaggtttaaaaccaaacaagttacctcattggcttcaggaggctgtacgtgctccttcatctaagccacctgaacgtgagctaccagcaacagtttcggcaattgctcagtcggtctgccttcttcttggagaacaagaaccatcaatacctccattcttgatcccgggaacacctctttctcgcccaaaagatccaaggattaattcaaagaagaaactccgcaaggctcagcaatctaactctcatgtagagcattcaaaaattggatctggtgagggtgattgtgtcactaccccagcacccccatccattgaagcttcacctgcacttcctgtcgattgcgatgatggtgagccttcactcaacttgaaatctgcatcgttgtcatcttcagctggcagcaaggggctagatgaattacctcccacatttaaagaagcaaaccaaaccgtggatggctcagaagctgttgcggccaagtcagatgctcctgaaattggttgtcaggtacctggttcctctccattacatgacaaaggtagtgaatcctcggggtcgccagtgaaggacactcctgacgctggaatcagattgccaggatcagataactcagttatggcattttctgcactcccacttgttgatgaagcacctgggacaagcagcagagcagctgacacgcctgtgccatgtgatggcaatgagtcgaaagaggatgttccactagacaacgctgaaagcaccaggaaactggagccgaacggatgaactggctcctcttgcgagcatggatgcatcgcatcgagtttctgctaatacagccgacgaagatgggtggatgaaatgatcattagactcgagctagttagctcaacattcctttcttttgcgttcagcataacactgggattttccctctcccaatgtttccagtgttgatctcgtgttgtgtaatgctttagtgcaggtctcgttgcagataggatgaaacgcaaagggctagtggtacttagcagtagttgggcactagtccgtcgggggagcaactcgtggaaacctgtatacaagaaatgtatattttgctaatatggtgctggttgggtgtgtagaaggtagaccgctattcgtttatttatgcgtatatggtttagtaatttgccatctgtctagcggtggctgtaagagtagacgtgatgatgatattgcctagccttgactcgttggcctccatgcctagccgaagagaagctgtgttcatactgacataactgacatactgagcgacttttgactgtttttttttatttcattagcggcaacgaagccaagaaccatgatcttcactcttttgtccccaccccccaaaaaaaaccccggaactctcaactattgttgtgcactgtaatttacctcttcaaattagaaaagtgatgttttg

SEQ ID NO: 66670 - DNA, 7538 bp, Zea Mays
gctgccctcagcgctcgcctctcgtcacgcgccccctccacaacccccgatgcgatgggtgcccctgcccctcgatagccgcgccgctctcctgcccccgttccccatttgcatcctcgtccacctccctgccctagcaccgtcctcccctattcgacccaacgccgccgccgcctccgccgccgcataggcctcgccgcggcctctgctccgccccgcggcctccggaggttctactcgcgcgcgatccgccgctgcgtccgttgctccgccatcgattcggtggcgcgtggagtatgtctctggtgcaagagtgctgaagatgaaggagaggagctctttatgcgaaagtgcagccgatggaaactggggtttgaaatataaaaggaaaagaagcaagttaacagttagcccatctaatgagaatgaggctacctcaccaacatctgactctcgaatgagccatggttccaccaaaaagaagttgaagcatgacaataacatttctccatcagccaagaagataagagggcacgatgggtattttttcgagtgcgtagaatgtgatcttggtggcaatttgctatgttgtgatagctgtcctcgtgtttaccacttggaatgcctcaatcctcctcttaagcgtgcaccccctgggaagtggcaatgtccaagatgccgtccgaaaaaagttagcttgaagctgttaggtaatgcagatgttgacacttctaaacgtgaaaaaagtacaaggacatatgcaagtacggcatcagatagtccaccttcgcatacaaaagtctcctttaagaccaggaactccacacaagacaaaactggattaaacgaacaaggaaaagagtcatctggtggcacaatgaatgggggtgaaaccagtacgaagaataatgaagttgagaaaaagaagacactgatattacatttgaagaagcgttcaaccaaggaattgtcagagaacactaaaccctcgaagtcagaatttgttgaactttcagaagagaaaattgtaaaacatggaagtgttttgaaactcaagaaacatccacatcgtatggacttgtctccaagtaaatctaaaaccaggaggcaaagtagccagagagagagtaaaagatctggcacaaaaaagattaaatattccatgtctgatgatgacagtgtttcctcatcagaaccatcgacatctcttgataacagtgaatcaccaccaaaaagaaaacactcagatggaaaagcaccttcatccagtaccaagaaagggaaaaagaaagtgaaatttgttgagaaaaagcactctgaggagcagggcgtggtaggtgacaaaatgatgactacccaggaggatcagcaggtcgatcgcatcctaggctgccggcttcagatgagccaaatcaacccgccgtcccatgcttcattggagcagtttgaatcagctaatctccaggtggatggtatggttcttccacatgcttccgctggcattcctaataggcctcatgatggaacagagtcttctagaaatggtacaattgaggatatatgtgctgatgaatcagccaatcatagtggtcacaatttagaaatgcgaaaggatacggacagtaaatcccatgaaaaggagtcacataagcgagaacaagtcaagaagatattatcagtatgttctggtgatgagaccaatataatgaaagatgatcaagtagtcagagaaaatgtttcagcttccaaaaaaggtgaagatgagacatctgatttgccagcagaaaaggatgataccatacttccagtcaccagagcttgtacaatgatcaggaccaatcaagatcatacagatgaaagtaaacagcatgggaaaatagaacaaataacaaataaggactacaatgatgctggatatgagttcttgatcaaatgggttggaaaatcaaatattcacaacagttgggtttctgaatccgaggtaaaaatattagcaaaaaggaaactagaaaactacaaagcgaagtatggaatgaatgaagtggaagaggttttaatcaaatggtgtggtcttccttatgatgaatgcacttgggaaagatcagatgaacctaccctgatgaaatatagccatttggtcactcagttcaagaattttgaatgccaggctttggataaagatgtggtaaaagattatgcaaatgcaaggaaccgacatgagcttaatgtgttagttgatcagccaaaagaacttcagggcggcatgctcttccctcatcaattggaagcgttgaactggctgcggaaatgctggtacaagtcaaaaaatgttatccttgctgatgagatgggtcttggaaagacagtgtcagcttgtgcttttctatcatccctatattgtgaatttaagattaatttgccatgtcttgtcttggttcctctttctacaatgcccaattggatggctgaattttcatcttgggctcctcatttaaatgttgtggagtatcatggttctgcaaggtcaagatctatcattcgccagtatgagtggcatgcgggcgatgcaagccagattggcaaaacaaagagatcgtacaaattcaatgttttgcttaccacttatgaaatggtgcttgttgatgctgcatatcttcgttctgtctcatgggaagttcttatagttgatgagggacatcgcctgaagaattctagcagcaaactctttagtttacttaattcattctcatttcagcacagagttttgttgactggaactcccttacagaacaacattggtgaaatgtataacttattgaacttcttacagcctacttcttttccttctctatcatcatttgaggagaagtttaatgaccttacaacagcagaaaaagtagaggagctgaagaaacttgtagctcctcatatgcttcggagattgaaaaaagatgcaatgcaaaatatccccccaaagatagagcgaatggtacctgttgaattgacatcaatccaggctgaatactaccgtgctatgcttacaaagaactatcaagtactgcgcaacattggaaaaggtggtgcacaccagtctttattgaacatagtaatgcagcttcggaaagtctgcaaccatccctatcttattcctggaactgaacctgaatctggttcacctgagtttctgcatgaaatgcgcataaaagcctcagcaaagctaactttgttgcatttgatgctaaaaatattacacaaggaaggccatcgtgttcttattttctctcagatgacaaaacttcttgacatccttgaagattatctgactttagaatttggccctaaaacatttgaaagagttgatggctcagtatctgtggcggagcgccaggcagcgattgttcgctttaatcaggataagacacgttttgttttcttgctgtctacacggtcatgtggacttggtattaatttggcaactgcagatactgttatcatatatgattcggatttcaacccacatgctgatatacaggcgatgaacagggcacacagaattggacaatcgaacagacttctggtttacaggcttgtagtacgtgctagtgttgaagagcgtatcttgcaattagccaagaagaaattgatgcttgatcaacttttcgttaacaaatcagaatcacagaaagaagtggaagatatcattcgctggggtacagaggaactctttggaaatagtgacagtgtggatggtaaagataacagtgaagtcccaggtcctgttgctgatgttgaatttaagcatagaagaaaaactggtggcctaggtgatgtttatgaggacaaatgtattggtggttctaccaaacttgtttgggatgaaaatgctattttgaagcttcttgatagatcaaaccttccatcatcaatggctgaaagcactgacggggatttggacaatgatatgcttggtactgtgaagtcaatagattggaacgatgagctcaatgacgaccctggtaccaatgaggatactgcacctattgacaatgatggtagcgagcaggcatctgaatcaaagcaaggtgctaccaatcgttcagaagaaaatgaatgggataaacttttgcgtgtcagatgggagcaatatcaaatagaggaggaggcatgtcttggtcgaggcaaacgtttaaggaaggctgtttcttacagagagacattcgcaacacttcctaacgaagctttaagtgaggactctgatgagggagatgaaccaaagagagaatatacagcagctggactggccttgaaggaaaaatatggaaagcttcgagctagacaaaaggaaaggattgctcagcgacacattatcaagaactatgctgatgataatcttgaagagttcatgactccatacgactctattgctaatgaacctgctgaaaatcctttggtaatcgtagaagatctaaattcttcacagctatctggcgcgaaacgtttcagtgactcaactggagaaatgaggcaatcctccaagaaatcaaagagatattctgaaatccctcaagatctttatgccaaaattcctggtaacacagcttcattcaagcaccactcaaaggccactgatgtattcaatccagggaccccaaatcacttgctacctgtacttggcctttgtgctcctaatgctgatcaggtgaactcatacaaaaactcaatttgtgcaccaagcataaaggagcgtaaaagggccagtggtgacattgtcaaacaactgtcaactcctgctgaccattctaatgtgcatagaaacgaagctcaatcagcttctgataaggccatctttcctggtgcatctgaggaggctttgcgaagaataagtaacatgattccagatagttattttcccttcagtcatattcctcctatatcagggaagggggttgatcctgttgaaaatcctggaccctccattgcatcatttcaagggaatctgggtcttccaaacttcagtctggaagacaacgctccacttaagcatattaagcctatacctgatatatttcctagcctgtcactgggtgctcataaggattatattcgtagttctgtcccagagttgccagatggttcattgctgccaaacttcatggcagatattactggtacttcgaagcaaaagtcatttatgtctggtctacttcctgggctgggtcttagcccagggcaaccaatacattcggctatgcctgataatcacaagaaagtcttggacaatataatgatgcgtgctcagtatgcgtcaaacaaattcttgaagaagagatcaaaactagattattggtcagaggatgaacttgatgctctgtggataggagttcgtaggcatggaaggggaaattgggatgctatgcttagagatccaaagctgaagtttttgaacaaccgaactagtgaggagctggccttgaggtggattttggaggagcaaaaaattatagatgaacctatgtctacatccaccaggcgttctaactcagcagcatttcctggaatatctgatgcaatgatgtctcgggcactgaatgaaagtaatttctctaaaatgaggatggagcagcctaaattgcagtcccacttaactgatattcagttaggttcgagtgatatcctatccacatttcctcatgttgacgctgctagttacattaactcaggggagggtggcccatctcaaataccatggcaggattttaagcatagatcaagttatgctggagattttcctgccggtgcatttgacaagttggagaaacctgatgttggaccgatcccgccatttatgccaaatcctttcatgactgacagcattggttcacttcccataaacagaaaaaacaatagttccatcccgcatagtgaaatcaggtcaagttctcgtgagaacattctttctggtgtttcggatggacagatcaacttgcttcatgagatgcagcgtcgtcgtcgtgtgaggtcaggcaaagaacccattgagatgaatctcaaccacatagaccactcaaatctccagcttgataatactagtgaccttggaggtttaaaaccaaacaagttacctcattggcttcaggaggctgtacgtgctccttcatctaagccacctgaacgtgagctaccagcaacagtttcggcaattgctcagtcggtctgccttcttcttggagaacaagaaccatcaatacctccattcttgatcccgggaacacctctttctcgcccaaaagatccaaggattaattcaaagaagaaactccgcaaggctcagcaatctaactctcatgtagagcattcaaaaattggatctggtgagggtgattgtgtcactaccccagcacccccatccattgaagcttcacctgcacttcctgtcgattgcgatgatggtgagccttcactcaacttgaaatctgcatcgttgtcatcttcagctggcagcaaggggctagatgaattacctcccacatttaaagaagcaaaccaaaccgtggatggctcagaagctgttgcggccaagtcagatgctcctgaaattggttgtcaggtacctggttcctctccattacatgacaaaggtagtgaatcctcggggtcgccagtgaaggacactcctgacgctggaatcagattgccaggatcagataactcagttatggcattttctgcactcccacttgttgatgaagcacctgggacaagcagcagagcagctgacacgcctgtgccatgtgatggcaatgagtcgaaagaggatgttccactagacaacgctgaaagcaccaggaaactggagccgaacggatgaactggctcctcttgcgagcatggatgcatcgcatcgagtttctgctaatacagccgacgaagatgggtggatgaaatgatcattagactcgagctagttagctcaacattcctttcttttgcgttcagcataacactgggattttccctctcccaatgtttccagtgttgatctcgtgttgtgtaatgctttagtgcaggtctcgttgcagataggatgaaacgcaaagggctagtggtacttagcagtagttgggcactagtccgtcgggggagcaactcgtggaaacctgtatacaagaaatgtatattttgctaatatggtgctggttgggtgtgtagaaggtagaccgctattcgtttatttatgcgtatatggtttagtaatttgccatctgtctagcggtggctgtaagagtagacgtgatgatgatattgcctagccttgactcgttggcctccatgcctagccgaagagaagctgtgttcatactgacataactgacatactgagcgacttttgactgtttttttttatttcattagcggcaacgaagccaagaaccatgatcttcactcttttgtccccaccccccaaaaaaaaccccggaactctcaactattgttgtgcactgtaatttacctcttcaaattagaaaagtgatgttttg

SEQ ID NO: 66671 - DNA, 6983 bp, Zea Mays
ctcgcctctcgtcacgcgccccctccacaacccccgatgcgatgggtgcccctgcccctcgatagccgcgccgctctcctgcccccgttccccatttgcatcctcgtccacctccctgccctagcaccgtcctcccctattcgacccaacgccgccgccgcctccgccgccgcataggcctcgccgcggcctctgctccgccccgcggcctccggaggttctactcgcgcgcgatccgccgctgcgtccgttgctccgccatcgattcggtggcgcgtggagtatgtctctggtgcaagagtgctgaagatgaaggagaggagctctttatgcgaaagtgcagccgatggaaactggggtttgaaatataaaaggaaaagaagcaagttaacagttagcccatctaatgagaatgaggctacctcaccaacatctgactctcgaatgagccatggttccaccaaaaagaagttgaagcatgacaataacatttctccatcagccaagaagataagagggcacgatgggtattttttcgagtgcgtagaatgtgatcttggtggcaatttgctatgttgtgatagctgtcctcgtgtttaccacttggaatgcctcaatcctcctcttaagcgtgcaccccctgggaagtggcaatgtccaagatgccgtccgaaaaaagttagcttgaagctgttaggagcagggcgtggtaggtgacaaaatgatgactacccaggaggatcagcaggtcgatcgcatcctaggctgccggcttcagatgagccaaatcaacccgccgtcccatgcttcattggagcagtttgaatcagctaatctccaggtggatggtatggttcttccacatgcttccgctggcattcctaataggcctcatgatggaacagagtcttctagaaatggtacaattgaggatatatgtgctgatgaatcagccaatcatagtggtcacaatttagaaatgcgaaaggatacggacagtaaatcccatgaaaaggagtcacataagcgagaacaagtcaagaagatattatcagtatgttctggtgatgagaccaatataatgaaagatgatcaagtagtcagagaaaatgtttcagcttccaaaaaaggtgaagatgagacatctgatttgccagcagaaaaggatgataccatacttccagtcaccagagcttgtacaatgatcaggaccaatcaagatcatacagatgaaagtaaacagcatgggaaaatagaacaaataacaaataaggactacaatgatgctggatatgagttcttgatcaaatgggttggaaaatcaaatattcacaacagttgggtttctgaatccgaggtaaaaatattagcaaaaaggaaactagaaaactacaaagcgaagtatggaatgagtttgataaacatttgcaaggaacagtggtgccagccacagcgagttattggtcttcgtgcttctgtagatgaagtggaagaggttttaatcaaatggtgtggtcttccttatgatgaatgcacttgggaaagatcagatgaacctaccctgatgaaatatagccatttggtcactcagttcaagaattttgaatgccaggctttggataaagatgtggtaaaagattatgcaaatgcaaggaaccgacatgagcttaatgtgttagttgatcagccaaaagaacttcagggcggcatgctcttccctcatcaattggaagcgttgaactggctgcggaaatgctggtacaagtcaaaaaatgttatccttgctgatgagatgggtcttggaaagacagtgtcagcttgtgcttttctatcatccctatattgtgaatttaagattaatttgccatgtcttgtcttggttcctctttctacaatgcccaattggatggctgaattttcatcttgggctcctcatttaaatgttgtggagtatcatggttctgcaaggtcaagatctatcattcgccagtatgagtggcatgcgggcgatgcaagccagattggcaaaacaaagagatcgtacaaattcaatgttttgcttaccacttatgaaatggtgcttgttgatgctgcatatcttcgttctgtctcatgggaagttcttatagttgatgagggacatcgcctgaagaattctagcagcaaactctttagtttacttaattcattctcatttcagcacagagttttgttgactggaactcccttacagaacaacattggtgaaatgtataacttattgaacttcttacagcctacttcttttccttctctatcatcatttgaggagaagtttaatgaccttacaacagcagaaaaagtagaggagctgaagaaacttgtagctcctcatatgcttcggagattgaaaaaagatgcaatgcaaaatatccccccaaagatagagcgaatggtacctgttgaattgacatcaatccaggctgaatactaccgtgctatgcttacaaagaactatcaagtactgcgcaacattggaaaaggtggtgcacaccagtctttattgaacatagtaatgcagcttcggaaagtctgcaaccatccctatcttattcctggaactgaacctgaatctggttcacctgagtttctgcatgaaatgcgcataaaagcctcagcaaagctaactttgttgcatttgatgctaaaaatattacacaaggaaggccatcgtgttcttattttctctcagatgacaaaacttcttgacatccttgaagattatctgactttagaatttggccctaaaacatttgaaagagttgatggctcagtatctgtggcggagcgccaggcagcgattgttcgctttaatcaggataagacacgttttgttttcttgctgtctacacggtcatgtggacttggtattaatttggcaactgcagatactgttatcatatatgattcggatttcaacccacatgctgatatacaggcgatgaacagggcacacagaattggacaatcgaacagacttctggtttacaggcttgtagtacgtgctagtgttgaagagcgtatcttgcaattagccaagaagaaattgatgcttgatcaacttttcgttaacaaatcagaatcacagaaagaagtggaagatatcattcgctggggtacagaggaactctttggaaatagtgacagtgtggatggtaaagataacagtgaagtcccaggtcctgttgctgatgttgaatttaagcatagaagaaaaactggtggcctaggtgatgtttatgaggacaaatgtattggtggttctaccaaacttgtttgggatgaaaatgctattttgaagcttcttgatagatcaaaccttccatcatcaatggctgaaagcactgacggggatttggacaatgatatgcttggtactgtgaagtcaatagattggaacgatgagctcaatgacgaccctggtaccaatgaggatactgcacctattgacaatgatggtagcgagcaggcatctgaatcaaagcaaggtgctaccaatcgttcagaagaaaatgaatgggataaacttttgcgtgtcagatgggagcaatatcaaatagaggaggaggcatgtcttggtcgaggcaaacgtttaaggaaggctgtttcttacagagagacattcgcaacacttcctaacgaagctttaagtgaggactctgatgagggagatgaaccaaagagagaatatacagcagctggactggccttgaaggaaaaatatggaaagcttcgagctagacaaaaggaaaggattgctcagcgacacattatcaagaactatgctgatgataatcttgaagagttcatgactccatacgactctattgctaatgaacctgctgaaaatcctttggtaatcgtagaagatctaaattcttcacagctatctggcgcgaaacgtttcagtgactcaactggagaaatgaggcaatcctccaagaaatcaaagagatattctgaaatccctcaagatctttatgccaaaattcctggtaacacagcttcattcaagcaccactcaaaggccactgatgtattcaatccagggaccccaaatcacttgctacctgtacttggcctttgtgctcctaatgctgatcaggtgaactcatacaaaaactcaatttgtgcaccaagcataaaggagcgtaaaagggccagtggtgacattgtcaaacaactgtcaactcctgctgaccattctaatgtgcatagaaacgaagctcaatcagcttctgataaggccatctttcctggtgcatctgaggaggctttgcgaagaataagtaacatgattccagatagttattttcccttcagtcatattcctcctatatcagggaagggggttgatcctgttgaaaatcctggaccctccattgcatcatttcaagggaatctgggtcttccaaacttcagtctggaagacaacgctccacttaagcatattaagcctatacctgatatatttcctagcctgtcactgggtgctcataaggattatattcgtagttctgtcccagagttgccagatggttcattgctgccaaacttcatggcagatattactggtacttcgaagcaaaagtcatttatgtctggtctacttcctgggctgggtcttagcccagggcaaccaatacattcggctatgcctgataatcacaagaaagtcttggacaatataatgatgcgtgctcagtatgcgtcaaacaaattcttgaagaagagatcaaaactagattattggtcagaggatgaacttgatgctctgtggataggagttcgtaggcatggaaggggaaattgggatgctatgcttagagatccaaagctgaagtttttgaacaaccgaactagtgaggagctggccttgaggtggattttggaggagcaaaaaattatagatgaacctatgtctacatccaccaggcgttctaactcagcagcatttcctggaatatctgatgcaatgatgtctcgggcactgaatgaaagtaatttctctaaaatgaggatggagcagcctaaattgcagtcccacttaactgatattcagttaggttcgagtgatatcctatccacatttcctcatgttgacgctgctagttacattaactcaggggagggtggcccatctcaaataccatggcaggattttaagcatagatcaagttatgctggagattttcctgccggtgcatttgacaagttggagaaacctgatgttggaccgatcccgccatttatgccaaatcctttcatgactgacagcattggttcacttcccataaacagaaaaaacaatagttccatcccgcatagtgaaatcaggtcaagttctcgtgagaacattctttctggtgtttcggatggacagatcaacttgcttcatgagatgcagcgtcgtcgtcgtgtgaggtcaggcaaagaacccattgagatgaatctcaaccacatagaccactcaaatctccagcttgataatactagtgaccttggaggtttaaaaccaaacaagttacctcattggcttcaggaggctgtacgtgctccttcatctaagccacctgaacgtgagctaccagcaacagtttcggcaattgctcagtcggtctgccttcttcttggagaacaagaaccatcaatacctccattcttgatcccgggaacacctctttctcgcccaaaagatccaaggattaattcaaagaagaaactccgcaaggctcagcaatctaactctcatgtagagcattcaaaaattggatctggtgagggtgattgtgtcactaccccagcacccccatccattgaagcttcacctgcacttcctgtcgattgcgatgatggtgagccttcactcaacttgaaatctgcatcgttgtcatcttcagctggcagcaaggggctagatgaattacctcccacatttaaagaagcaaaccaaaccgtggatggctcagaagctgttgcggccaagtcagatgctcctgaaattggttgtcaggtacctggttcctctccattacatgacaaaggtagtgaatcctcggggtcgccagtgaaggacactcctgacgctggaatcagattgccaggatcagataactcagttatggcattttctgcactcccacttgttgatgaagcacctgggacaagcagcagagcagctgacacgcctgtgccatgtgatggcaatgagtcgaaagaggatgttccactagacaacgctgaaagcaccaggaaactggagccgaacggatgaactggctcctcttgcgagcatggatgcatcgcatcgagtttctgctaatacagccgacgaagatgggtggatgaaatgatcattagactcgagctagttagctcaacattcctttcttttgcgttcagcataacactgggattttccctctcccaatgtttccagtgttgatctcgtgttgtgtaatgctttagtgcaggtctcgttgcagataggatgaaacgcaaagggctagtggtacttagcagtagttgggcactagtccgtcgggggagcaactcgtggaaacctgtatacaagaaatgtatattttgctaatatggtgctggttgggtgtgtagaaggtagaccgctattcgtttatttatgcgtatatggtttagtaatttgccatctgtctagcggtggctgtaagagtagacgtgatgatgatattgcctagccttgactcgttggcctccatgcctagccgaagagaagctgtgttcatactgacataactgacatactgagcgacttttgactgtttttttttatttcattagcggcaacgaagccaagaaccatgatcttcactcttttgtccccaccccccaaaaaaaaccccggaactctcaactattgttgtgcactgtaatttacctcttcaaattagaaaagtgatgttttg

SEQ ID NO: 66672 - DNA, 4371 bp, Zea Mays
cctctcgtcacgcgccccctccacaacccccgatgcgatgggtgcccctgcccctcgatagccgcgccgctctcctgcccccgttccccatttgcatcctcgtccacctccctgccctagcaccgtcctcccctattcgacccaacgccgccgccgcctccgccgccgcataggcctcgccgcggcctctgctccgccccgcggcctccggaggttctactcgcgcgcgatccgccgctgcgtccgttgctccgccatcgattcggtggcgcgtggagtatgtctctggtgcaagagtgctgaagatgaaggagaggagctctttatgcgaaagtgcagccgatggaaactggggtttgaaatataaaaggaaaagaagcaagttaacagttagcccatctaatgagaatgaggctacctcaccaacatctgactctcgaatgagccatggttccaccaaaaagaagttgaagcatgacaataacatttctccatcagccaagaagataagagggcacgatgggtattttttcgagtgcgtagaatgtgatcttggtggcaatttgctatgttgtgatagctgtcctcgtgtttaccacttggaatgcctcaatcctcctcttaagcgtgcaccccctgggaagtggcaatgtccaagatgccgtccgaaaaaagttagcttgaagctgttaggtaatgcagatgttgacacttctaaacgtgaaaaaagtacaaggacatatgcaagtacggcatcagatagtccaccttcgcatacaaaagtctcctttaagaccaggaactccacacaagacaaaactggattaaacgaacaaggaaaagagtcatctggtggcacaatgaatgggggtgaaaccagtacgaagaataatgaagttgagaaaaagaagacactgatattacatttgaagaagcgttcaaccaaggaattgtcagagaacactaaaccctcgaagtcagaatttgttgaactttcagaagagaaaattgtaaaacatggaagtgttttgaaactcaagaaacatccacatcgtatggacttgtctccaagtaaatctaaaaccaggaggcaaagtagccagagagagagtaaaagatctggcacaaaaaagattaaatattccatgtctgatgatgacagtgtttcctcatcagaaccatcgacatctcttgataacagtgaatcaccaccaaaaagaaaacactcagatggaaaagcaccttcatccagtaccaagaaagggaaaaagaaagtgaaatttgttgagaaaaagcactctgaggagcagggcgtggtaggtgacaaaatgatgactacccaggaggatcagcaggtcgatcgcatcctaggctgccggcttcagatgagccaaatcaacccgccgtcccatgcttcattggagcagtttgaatcagctaatctccaggtggatggtatggttcttccacatgcttccgctggcattcctaataggcctcatgatggaacagagtcttctagaaatggtacaattgaggatatatgtgctgatgaatcagccaatcatagtggtcacaatttagaaatgcgaaaggatacggacagtaaatcccatgaaaaggagtcacataagcgagaacaagtcaagaagatattatcagtatgttctggtgatgagaccaatataatgaaagatgatcaagtagtcagagaaaatgtttcagcttccaaaaaaggtgaagatgagacatctgatttgccagcagaaaaggatgataccatacttccagtcaccagagcttgtacaatgatcaggaccaatcaagatcatacagatgaaagtaaacagcatgggaaaatagaacaaataacaaataaggactacaatgatgctggatatgagttcttgatcaaatgggttggaaaatcaaatattcacaacagttgggtttctgaatccgaggtaaaaatattagcaaaaaggaaactagaaaactacaaagcgaagtatggaatgagtttgataaacatttgcaaggaacagtggtgccagccacagcgagttattggtcttcgtgcttctgtagatgaagtggaagaggttttaatcaaatggtgtggtcttccttatgatgaatgcacttgggaaagatcagatgaacctaccctgatgaaatatagccatttggtcactcagttcaagaattttgaatgccaggctttggataaagatgtggtaaaagattatgcaaatgcaaggaaccgacatgagcttaatgtgttagttgatcagccaaaagaacttcagggcggcatgctcttccctcatcaattggaagcgttgaactggctgcggaaatgctggtacaagtcaaaaaatgttatccttgctgatgagatgggtcttggaaagacagtgtcagcttgtgcttttctatcatccctatattgtgaatttaagattaatttgccatgtcttgtcttggttcctctttctacaatgcccaattggatggctgaattttcatcttgggctcctcatttaaatgttgtggagtatcatggttctgcaaggtcaagatctatcattcgccagtatgagtggcatgcgggcgatgcaagccagattggcaaaacaaagagatcgtacaaattcaatgttttgcttaccacttatgaaatggtgcttgttgatgctgcatatcttcgttctgtctcatgggaagttcttatagttgatgagggacatcgcctgaagaattctagcagcaaactctttagtttacttaattcattctcatttcagcacagagttttgttgactggaactcccttacagaacaacattggtgaaatgtataacttattgaacttcttacagcctacttcttttccttctctatcatcatttgaggagaagtttaatgaccttacaacagcagaaaaagtagaggagctgaagaaacttgtagctcctcatatgcttcggagattgaaaaaagatgcaatgcaaaatatccccccaaagatagagcgaatggtacctgttgaattgacatcaatccaggctgaatactaccgtgctatgcttacaaagaactatcaagtactgcgcaacattggaaaaggtggtgcacaccagtctttattgaacatagtaatgcagcttcggaaagtctgcaaccatccctatcttattcctggaactgaacctgaatctggttcacctgagtttctgcatgaaatgcgcataaaagcctcagcaaagctaactttgttgcatttgatgctaaaaatattacacaaggaaggccatcgtgttcttattttctctcagatgacaaaacttcttgacatccttgaagattatctgactttagaatttggccctaaaacatttgaaagagttgatggctcagtatctgtggcggagcgccaggcagcgattgttcgctttaatcaggataagacacgttttgttttcttgctgtctacacggtcatgtggacttggtattaatttggcaactgcagatactgttatcatatatgattcggatttcaacccacatgctgatatacaggcgatgaacagggcacacagaattggacaatcgaacagacttctggtttacaggcttgtagtacgtgctagtgttgaagagcgtatcttgcaattagccaagaagaaattgatgcttgatcaacttttcgttaacaaatcagaatcacagaaagaagtggaagatatcattcgctggggtacagaggaactctttggaaatagtgacagtgtggatggtaaagataacagtgaagtcccaggtcctgttgctgatgttgaatttaagcatagaagaaaaactggtggcctaggtgatgtttatgaggacaaatgtattggtggttctaccaaacttgtttgggatgaaaatgctattttgaagcttcttgatagatcaaaccttccatcatcaatggctgaaagcactgacggggatttggacaatgatatgcttggtactgtgaagtcaatagattggaacgatgagctcaatgacgaccctggtaccaatgaggatactgcacctattgacaatgatggtagcgagcaggcatctgaatcaaagcaaggtgctaccaatcgttcagaagaaaatgaatgggataaacttttgcgtgtcagatgggagcaatatcaaatagaggaggaggcatgtcttggtcgaggcaaacgtttaaggaaggctgtttcttacagagagacattcgcaacacttcctaacgaagctttaagtgaggtattcaaaatgctaatggaggcgattgccttgtgtcttgggagaaggttcaaaggccgttgcagtattg

SEQ ID NO: 66673 - DNA, 7561 bp, Zea Mays
acaacccccgatgcgatgggtgcccctgcccctcgatagccgcgccgctctcctgcccccgttccccatttgcatcctcgtccacctccctgccctagcaccgtcctcccctattcgacccaacgccgccgccgcctccgccgccgcataggcctcgccgcggcctctgctccgccccgcggcctccggaggttctactcgcgcgcgatccgccgctgcgtccgttgctccgccatcgattcggtggcgcgtggagtatgtctctggtgcaagagtgctgaagatgaaggagaggagctctttatgcgaaagtgcagccgatggaaactggggtttgaaatataaaaggaaaagaagcaagttaacagttagcccatctaatgagaatgaggctacctcaccaacatctgactctcgaatgagccatggttccaccaaaaagaagttgaagcatgacaataacatttctccatcagccaagaagataagagggcacgatgggtattttttcgagtgcgtagaatgtgatcttggtggcaatttgctatgttgtgatagctgtcctcgtgtttaccacttggaatgcctcaatcctcctcttaagcgtgcaccccctgggaagtggcaatgtccaagatgccgtccgaaaaaagttagcttgaagctgttaggtaatgcagatgttgacacttctaaacgtgaaaaaagtacaaggacatatgcaagtacggcatcagatagtccaccttcgcatacaaaagtctcctttaagaccaggaactccacacaagacaaaactggattaaacgaacaaggaaaagagtcatctggtggcacaatgaatgggggtgaaaccagtacgaagaataatgaagttgagaaaaagaagacactgatattacatttgaagaagcgttcaaccaaggaattgtcagagaacactaaaccctcgaagtcagaatttgttgaactttcagaagagaaaattgtaaaacatggaagtgttttgaaactcaagaaacatccacatcgtatggacttgtctccaagtaaatctaaaaccaggaggcaaagtagccagagagagagtaaaagatctggcacaaaaaagattaaatattccatgtctgatgatgacagtgtttcctcatcagaaccatcgacatctcttgataacagtgaatcaccaccaaaaagaaaacactcagatggaaaagcaccttcatccagtaccaagaaagggaaaaagaaagtgaaatttgttgagaaaaagcactctgaggagcagggcgtggtaggtgacaaaatgatgactacccaggaggatcagcaggtcgatcgcatcctaggctgccggcttcagatgagccaaatcaacccgccgtcccatgcttcattggagcagtttgaatcagctaatctccaggtggatggtatggttcttccacatgcttccgctggcattcctaataggcctcatgatggaacagagtcttctagaaatggtacaattgaggatatatgtgctgatgaatcagccaatcatagtggtcacaatttagaaatgcgaaaggatacggacagtaaatcccatgaaaaggagtcacataagcgagaacaagtcaagaagatattatcagtatgttctggtgatgagaccaatataatgaaagatgatcaagtagtcagagaaaatgtttcagcttccaaaaaaggtgaagatgagacatctgatttgccagcagaaaaggatgataccatacttccagtcaccagagcttgtacaatgatcaggaccaatcaagatcatacagatgaaagtaaacagcatgggaaaatagaacaaataacaaataaggactacaatgatgctggatatgagttcttgatcaaatgggttggaaaatcaaatattcacaacagttgggtttctgaatccgaggtaaaaatattagcaaaaaggaaactagaaaactacaaagcgaagtatggaatgagtttgataaacatttgcaaggaacagtggtgccagccacagcgagttattggtcttcgtgcttctgtagatgaagtggaagaggttttaatcaaatggtgtggtcttccttatgatgaatgcacttgggaaagatcagatgaacctaccctgatgaaatatagccatttggtcactcagttcaagaattttgaatgccaggctttggataaagatgtggtaaaagattatgcaaatgcaaggaaccgacatgagcttaatgtgttagttgatcagccaaaagaacttcagggcggcatgctcttccctcatcaattggaagcgttgaactggctgcggaaatgctggtacaagtcaaaaaatgttatccttgctgatgagatgggtcttggaaagacagtgtcagcttgtgcttttctatcatccctatattgtgaatttaagattaatttgccatgtcttgtcttggttcctctttctacaatgcccaattggatggctgaattttcatcttgggctcctcatttaaatgttgtggagtatcatggttctgcaaggtcaagatctatcattcgccagtatgagtggcatgcgggcgatgcaagccagattggcaaaacaaagagatcgtacaaattcaatgttttgcttaccacttatgaaatggtgcttgttgatgctgcatatcttcgttctgtctcatgggaagttcttatagttgatgagggacatcgcctgaagaattctagcagcaaactctttagtttacttaattcattctcatttcagcacagagttttgttgactggaactcccttacagaacaacattggtgaaatgtataacttattgaacttcttacagcctacttcttttccttctctatcatcatttgaggagaagtttaatgaccttacaacagcagaaaaagtagaggagctgaagaaacttgtagctcctcatatgcttcggagattgaaaaaagatgcaatgcaaaatatccccccaaagatagagcgaatggtacctgttgaattgacatcaatccaggctgaatactaccgtgctatgcttacaaagaactatcaagtactgcgcaacattggaaaaggtggtgcacaccagtctttattgaacatagtaatgcagcttcggaaagtctgcaaccatccctatcttattcctggaactgaacctgaatctggttcacctgagtttctgcatgaaatgcgcataaaagcctcagcaaagctaactttgttgcatttgatgctaaaaatattacacaaggaaggccatcgtgttcttattttctctcagatgacaaaacttcttgacatccttgaagattatctgactttagaatttggccctaaaacatttgaaagagttgatggctcagtatctgtggcggagcgccaggcagcgattgttcgctttaatcaggataagacacgttttgttttcttgctgtctacacggtcatgtggacttggtattaatttggcaactgcagatactgttatcatatatgattcggatttcaacccacatgctgatatacaggcgatgaacagggcacacagaattggacaatcgaacagacttctggtttacaggcttgtagtacgtgctagtgttgaagagcgtatcttgcaattagccaagaagaaattgatgcttgatcaacttttcgttaacaaatcagaatcacagaaagaagtggaagatatcattcgctggggtacagaggaactctttggaaatagtgacagtgtggatggtaaagataacagtgaagtcccaggtcctgttgctgatgttgaatttaagcatagaagaaaaactggtggcctaggtgatgtttatgaggacaaatgtattggtggttctaccaaacttgtttgggatgaaaatgctattttgaagcttcttgatagatcaaaccttccatcatcaatggctgaaagcactgacggggatttggacaatgatatgcttggtactgtgaagtcaatagattggaacgatgagctcaatgacgaccctggtaccaatgaggatactgcacctattgacaatgatggtagcgagcaggcatctgaatcaaagcaaggtgctaccaatcgttcagaagaaaatgaatgggataaacttttgcgtgtcagatgggagcaatatcaaatagaggaggaggcatgtcttggtcgaggcaaacgtttaaggaaggctgtttcttacagagagacattcgcaacacttcctaacgaagctttaagtgaggactctgatgagggagatgaaccaaagagagaatatacagcagctggactggccttgaaggaaaaatacttcgagctagacaaaaggaaaggattgctcagcgacacattatcaagaactatgctgatgataatcttgaagagttcatgactccatacgactctattgctaatgaacctgctgaaaatcctttggtaatcgtagaagatctaaattcttcacagctatctggcgcgaaacgtttcagtgactcaactggagaaatgaggcaatcctccaagaaatcaaagagatattctgaaatccctcaagatctttatgccaaaattcctggtaacacagcttcattcaagcaccactcaaaggccactgatgtattcaatccagggaccccaaatcacttgctacctgtacttggcctttgtgctcctaatgctgatcaggtgaactcatacaaaaactcaatttgtgcaccaagcataaaggagcgtaaaagggccagtggtgacattgtcaaacaactgtcaactcctgctgaccattctaatgtgcatagaaacgaagctcaatcagcttctgataaggccatctttcctggtgcatctgaggaggctttgcgaagaataagtaacatgattccagatagttattttcccttcagtcatattcctcctatatcagggaagggggttgatcctgttgaaaatcctggaccctccattgcatcatttcaagggaatctgggtcttccaaacttcagtctggaagacaacgctccacttaagcatattaagcctatacctgatatatttcctagcctgtcactgggtgctcataaggattatattcgtagttctgtcccagagttgccagatggttcattgctgccaaacttcatggcagatattactggtacttcgaagcaaaagtcatttatgtctggtctacttcctgggctgggtcttagcccagggcaaccaatacattcggctatgcctgataatcacaagaaagtcttggacaatataatgatgcgtgctcagtatgcgtcaaacaaattcttgaagaagagatcaaaactagattattggtcagaggatgaacttgatgctctgtggataggagttcgtaggcatggaaggggaaattgggatgctatgcttagagatccaaagctgaagtttttgaacaaccgaactagtgaggagctggccttgaggtggattttggaggagcaaaaaattatagatgaacctatgtctacatccaccaggcgttctaactcagcagcatttcctggaatatctgatgcaatgatgtctcgggcactgaatgaaagtaatttctctaaaatgaggatggagcagcctaaattgcagtcccacttaactgatattcagttaggttcgagtgatatcctatccacatttcctcatgttgacgctgctagttacattaactcaggggagggtggcccatctcaaataccatggcaggattttaagcatagatcaagttatgctggagattttcctgccggtgcatttgacaagttggagaaacctgatgttggaccgatcccgccatttatgccaaatcctttcatgactgacagcattggttcacttcccataaacagaaaaaacaatagttccatcccgcatagtgaaatcaggtcaagttctcgtgagaacattctttctggtgtttcggatggacagatcaacttgcttcatgagatgcagcgtcgtcgtcgtgtgaggtcaggcaaagaacccattgagatgaatctcaaccacatagaccactcaaatctccagcttgataatactagtgaccttggaggtttaaaaccaaacaagttacctcattggcttcaggaggctgtacgtgctccttcatctaagccacctgaacgtgagctaccagcaacagtttcggcaattgctcagtcggtctgccttcttcttggagaacaagaaccatcaatacctccattcttgatcccgggaacacctctttctcgcccaaaagatccaaggattaattcaaagaagaaactccgcaaggctcagcaatctaactctcatgtagagcattcaaaaattggatctggtgagggtgattgtgtcactaccccagcacccccatccattgaagcttcacctgcacttcctgtcgattgcgatgatggtgagccttcactcaacttgaaatctgcatcgttgtcatcttcagctggcagcaaggggctagatgaattacctcccacatttaaagaagcaaaccaaaccgtggatggctcagaagctgttgcggccaagtcagatgctcctgaaattggttgtcaggtacctggttcctctccattacatgacaaaggtagtgaatcctcggggtcgccagtgaaggacactcctgacgctggaatcagattgccaggatcagataactcagttatggcattttctgcactcccacttgttgatgaagcacctgggacaagcagcagagcagctgacacgcctgtgccatgtgatggcaatgagtcgaaagaggatgttccactagacaacgctgaaagcaccaggaaactggagccgaacggatgaactggctcctcttgcgagcatggatgcatcgcatcgagtttctgctaatacagccgacgaagatgggtggatgaaatgatcattagactcgagctagttagctcaacattcctttcttttgcgttcagcataacactgggattttccctctcccaatgtttccagtgttgatctcgtgttgtgtaatgctttagtgcaggtctcgttgcagataggatgaaacgcaaagggctagtggtacttagcagtagttgggcactagtccgtcgggggagcaactcgtggaaacctgtatacaagaaatgtatattttgctaatatggtgctggttgggtgtgtagaaggtagaccgctattcgtttatttatgcgtatatggtttagtaatttgccatctgtctagcggtggctgtaagagtagacgtgatgatgatattgcctagccttgactcgttggcctccatgcctagccgaagagaagctgtgttcatactgacataactgacatactgagcgacttttgactgtttttttttatttcattagcggcaacgaagccaagaaccatgatcttcactcttttgtccccaccccccaaaaaaaaccccggaactctcaactattgttgtgcactgtaatttacctcttcaaattagaaaagtgatgttttg

SEQ ID NO: 66674 - DNA, 6803 bp, Zea Mays
acaacccccgatgcgatgggtgcccctgcccctcgatagccgcgccgctctcctgcccccgttccccatttgcatcctcgtccacctccctgccctagcaccgtcctcccctattcgacccaacgccgccgccgcctccgccgccgcataggcctcgccgcggcctctgctccgccccgcggcctccggaggttctactcgcgcgcgatccgccgctgcgtccgttgctccgccatcgattcggtggcgcgtggagtatgtctctggtgcaagagtgctgaagatgaaggagaggagctctttatgcgaaagtgcagccgatggaaactggggtttgaaatataaaaggaaaagaagcaagttaacagttagcccatctaatgagaatgaggctacctcaccaacatctgactctcgaatgagccatggttccaccaaaaagaagttgaagcatgacaataacatttctccatcagccaagaagataagagggcacgatggggagcagggcgtggtaggtgacaaaatgatgactacccaggaggatcagcaggtcgatcgcatcctaggctgccggcttcagatgagccaaatcaacccgccgtcccatgcttcattggagcagtttgaatcagctaatctccaggtggatggtatggttcttccacatgcttccgctggcattcctaataggcctcatgatggaacagagtcttctagaaatggtacaattgaggatatatgtgctgatgaatcagccaatcatagtggtcacaatttagaaatgcgaaaggatacggacagtaaatcccatgaaaaggagtcacataagcgagaacaagtcaagaagatattatcagtatgttctggtgatgagaccaatataatgaaagatgatcaagtagtcagagaaaatgtttcagcttccaaaaaaggtgaagatgagacatctgatttgccagcagaaaaggatgataccatacttccagtcaccagagcttgtacaatgatcaggaccaatcaagatcatacagatgaaagtaaacagcatgggaaaatagaacaaataacaaataaggactacaatgatgctggatatgagttcttgatcaaatgggttggaaaatcaaatattcacaacagttgggtttctgaatccgaggtaaaaatattagcaaaaaggaaactagaaaactacaaagcgaagtatggaatgagtttgataaacatttgcaaggaacagtggtgccagccacagcgagttattggtcttcgtgcttctgtagatgaagtggaagaggttttaatcaaatggtgtggtcttccttatgatgaatgcacttgggaaagatcagatgaacctaccctgatgaaatatagccatttggtcactcagttcaagaattttgaatgccaggctttggataaagatgtggtaaaagattatgcaaatgcaaggaaccgacatgagcttaatgtgttagttgatcagccaaaagaacttcagggcggcatgctcttccctcatcaattggaagcgttgaactggctgcggaaatgctggtacaagtcaaaaaatgttatccttgctgatgagatgggtcttggaaagacagtgtcagcttgtgcttttctatcatccctatattgtgaatttaagattaatttgccatgtcttgtcttggttcctctttctacaatgcccaattggatggctgaattttcatcttgggctcctcatttaaatgttgtggagtatcatggttctgcaaggtcaagatctatcattcgccagtatgagtggcatgcgggcgatgcaagccagattggcaaaacaaagagatcgtacaaattcaatgttttgcttaccacttatgaaatggtgcttgttgatgctgcatatcttcgttctgtctcatgggaagttcttatagttgatgagggacatcgcctgaagaattctagcagcaaactctttagtttacttaattcattctcatttcagcacagagttttgttgactggaactcccttacagaacaacattggtgaaatgtataacttattgaacttcttacagcctacttcttttccttctctatcatcatttgaggagaagtttaatgaccttacaacagcagaaaaagtagaggagctgaagaaacttgtagctcctcatatgcttcggagattgaaaaaagatgcaatgcaaaatatccccccaaagatagagcgaatggtacctgttgaattgacatcaatccaggctgaatactaccgtgctatgcttacaaagaactatcaagtactgcgcaacattggaaaaggtggtgcacaccagtctttattgaacatagtaatgcagcttcggaaagtctgcaaccatccctatcttattcctggaactgaacctgaatctggttcacctgagtttctgcatgaaatgcgcataaaagcctcagcaaagctaactttgttgcatttgatgctaaaaatattacacaaggaaggccatcgtgttcttattttctctcagatgacaaaacttcttgacatccttgaagattatctgactttagaatttggccctaaaacatttgaaagagttgatggctcagtatctgtggcggagcgccaggcagcgattgttcgctttaatcaggataagacacgttttgttttcttgctgtctacacggtcatgtggacttggtattaatttggcaactgcagatactgttatcatatatgattcggatttcaacccacatgctgatatacaggcgatgaacagggcacacagaattggacaatcgaacagacttctggtttacaggcttgtagtacgtgctagtgttgaagagcgtatcttgcaattagccaagaagaaattgatgcttgatcaacttttcgttaacaaatcagaatcacagaaagaagtggaagatatcattcgctggggtacagaggaactctttggaaatagtgacagtgtggatggtaaagataacagtgaagtcccaggtcctgttgctgatgttgaatttaagcatagaagaaaaactggtggcctaggtgatgtttatgaggacaaatgtattggtggttctaccaaacttgtttgggatgaaaatgctattttgaagcttcttgatagatcaaaccttccatcatcaatggctgaaagcactgacggggatttggacaatgatatgcttggtactgtgaagtcaatagattggaacgatgagctcaatgacgaccctggtaccaatgaggatactgcacctattgacaatgatggtagcgagcaggcatctgaatcaaagcaaggtgctaccaatcgttcagaagaaaatgaatgggataaacttttgcgtgtcaggtactctgcaatactatgggagcaatatcaaatagaggaggaggcatgtcttggtcgaggcaaacgtttaaggaaggctgtttcttacagagagacattcgcaacacttcctaacgaagctttaagtgaggactctgatgagggagatgaaccaaagagagaatatacagcagctggactggccttgaaggaaaaatatggaaagcttcgagctagacaaaaggaaaggattgctcagcgacacattatcaagaactatgctgatgataatcttgaagagttcatgactccatacgactctattgctaatgaacctgctgaaaatcctttggtaatcgtagaagatctaaattcttcacagctatctggcgcgaaacgtttcagtgactcaactggagaaatgaggcaatcctccaagaaatcaaagagatattctgaaatccctcaagatctttatgccaaaattcctggtaacacagcttcattcaagcaccactcaaaggccactgatgtattcaatccagggaccccaaatcacttgctacctgtacttggcctttgtgctcctaatgctgatcaggtgaactcatacaaaaactcaatttgtgcaccaagcataaaggagcgtaaaagggccagtggtgacattgtcaaacaactgtcaactcctgctgaccattctaatgtgcatagaaacgaagctcaatcagcttctgataaggccatctttcctggtgcatctgaggaggctttgcgaagaataagtaacatgattccagatagttattttcccttcagtcatattcctcctatatcagggaagggggttgatcctgttgaaaatcctggaccctccattgcatcatttcaagggaatctgggtcttccaaacttcagtctggaagacaacgctccacttaagcatattaagcctatacctgatatatttcctagcctgtcactgggtgctcataaggattatattcgtagttctgtcccagagttgccagatggttcattgctgccaaacttcatggcagatattactggtacttcgaagcaaaagtcatttatgtctggtctacttcctgggctgggtcttagcccagggcaaccaatacattcggctatgcctgataatcacaagaaagtcttggacaatataatgatgcgtgctcagtatgcgtcaaacaaattcttgaagaagagatcaaaactagattattggtcagaggatgaacttgatgctctgtggataggagttcgtaggcatggaaggggaaattgggatgctatgcttagagatccaaagctgaagtttttgaacaaccgaactagtgaggagctggccttgaggtggattttggaggagcaaaaaattatagatgaacctatgtctacatccaccaggcgttctaactcagcagcatttcctggaatatctgatgcaatgatgtctcgggcactgaatgaaagtaatttctctaaaatgaggatggagcagcctaaattgcagtcccacttaactgatattcagttaggttcgagtgatatcctatccacatttcctcatgttgacgctgctagttacattaactcaggggagggtggcccatctcaaataccatggcaggattttaagcatagatcaagttatgctggagattttcctgccggtgcatttgacaagttggagaaacctgatgttggaccgatcccgccatttatgccaaatcctttcatgactgacagcattggttcacttcccataaacagaaaaaacaatagttccatcccgcatagtgaaatcaggtcaagttctcgtgagaacattctttctggtgtttcggatggacagatcaacttgcttcatgagatgcagcgtcgtcgtcgtgtgaggtcaggcaaagaacccattgagatgaatctcaaccacatagaccactcaaatctccagcttgataatactagtgaccttggaggtttaaaaccaaacaagttacctcattggcttcaggaggctgtacgtgctccttcatctaagccacctgaacgtgagctaccagcaacagtttcggcaattgctcagtcggtctgccttcttcttggagaacaagaaccatcaatacctccattcttgatcccgggaacacctctttctcgcccaaaagatccaaggattaattcaaagaagaaactccgcaaggctcagcaatctaactctcatgtagagcattcaaaaattggatctggtgagggtgattgtgtcactaccccagcacccccatccattgaagcttcacctgcacttcctgtcgattgcgatgatggtgagccttcactcaacttgaaatctgcatcgttgtcatcttcagctggcagcaaggggctagatgaattacctcccacatttaaagaagcaaaccaaaccgtggatggctcagaagctgttgcggccaagtcagatgctcctgaaattggttgtcaggtacctggttcctctccattacatgacaaaggtagtgaatcctcggggtcgccagtgaaggacactcctgacgctggaatcagattgccaggatcagataactcagttatggcattttctgcactcccacttgttgatgaagcacctgggacaagcagcagagcagctgacacgcctgtgccatgtgatggcaatgagtcgaaagaggatgttccactagacaacgctgaaagcaccaggaaactggagccgaacggatgaactggctcctcttgcgagcatggatgcatcgcatcgagtttctgctaatacagccgacgaagatgggtggatgaaatgatcattagactcgagctagttagctcaacattcctttcttttgcgttcagcataacactgggattttccctctcccaatgtttccagtgttgatctcgtgttgtgtaatgctttagtgcaggtctcgttgcagataggatgaaacgcaaagggctagtggtacttagcagtagttgggcactagtccgtcgggggagcaactcgtggaaacctgtatacaagaaatgtatattttgctaatatggtgctggttgggtgtgtagaaggtagaccgctattcgtttatttatgcgtatatggtttagtaatttgccatctgtctagcggtggctgtaagagtagacgtgatgatgatattgcctagccttgactcgttggcctccatgcctagccgaagagaagctgtgttcatactgacataactgacatactgagcgacttttgactgtttttttttatttcattagcggcaacgaagccaagaaccatgatcttcactcttttgtccccaccccccaaaaaaaaccccggaactctcaactattgttgtgcactgtaatttacctcttcaaattagaaaagtgatgttttg

SEQ ID NO: 66675 - DNA, 7380 bp, Zea Mays
ctttttcaagctctgatgcttctgccgacagggttgacaggctccagttgggatatgtctctggtgcaagagtgctgaagatgaaggagaggagctctttatgcgaaagtgcagccgatggaaactggggtttgaaatataaaaggaaaagaagcaagttaacagttagcccatctaatgagaatgaggctacctcaccaacatctgactctcgaatgagccatggttccaccaaaaagaagttgaagcatgacaataacatttctccatcagccaagaagataagagggcacgatgggtattttttcgagtgcgtagaatgtgatcttggtggcaatttgctatgttgtgatagctgtcctcgtgtttaccacttggaatgcctcaatcctcctcttaagcgtgcaccccctgggaagtggcaatgtccaagatgccgtccgaaaaaagttagcttgaagctgttaggtaatgcagatgttgacacttctaaacgtgaaaaaagtacaaggacatatgcaagtacggcatcagatagtccaccttcgcatacaaaagtctcctttaagaccaggaactccacacaagacaaaactggattaaacgaacaaggaaaagagtcatctggtggcacaatgaatgggggtgaaaccagtacgaagaataatgaagttgagaaaaagaagacactgatattacatttgaagaagcgttcaaccaaggaattgtcagagaacactaaaccctcgaagtcagaatttgttgaactttcagaagagaaaattgtaaaacatggaagtgttttgaaactcaagaaacatccacatcgtatggacttgtctccaagtaaatctaaaaccaggaggcaaagtagccagagagagagtaaaagatctggcacaaaaaagattaaatattccatgtctgatgatgacagtgtttcctcatcagaaccatcgacatctcttgataacagtgaatcaccaccaaaaagaaaacactcagatggaaaagcaccttcatccagtaccaagaaagggaaaaagaaagtgaaatttgttgagaaaaagcactctgaggagcagggcgtggtaggtgacaaaatgatgactacccaggaggatcagcaggtcgatcgcatcctaggctgccggcttcagatgagccaaatcaacccgccgtcccatgcttcattggagcagtttgaatcagctaatctccaggtggatggtatggttcttccacatgcttccgctggcattcctaataggcctcatgatggaacagagtcttctagaaatggtacaattgaggatatatgtgctgatgaatcagccaatcatagtggtcacaatttagaaatgcgaaaggatacggacagtaaatcccatgaaaaggagtcacataagcgagaacaagtcaagaagatattatcagtatgttctggtgatgagaccaatataatgaaagatgatcaagtagtcagagaaaatgtttcagcttccaaaaaaggtgaagatgagacatctgatttgccagcagaaaaggatgataccatacttccagtcaccagagcttgtacaatgatcaggaccaatcaagatcatacagatgaaagtaaacagcatgggaaaatagaacaaataacaaataaggactacaatgatgctggatatgagttcttgatcaaatgggttggaaaatcaaatattcacaacagttgggtttctgaatccgaggtaaaaatattagcaaaaaggaaactagaaaactacaaagcgaagtatggaatgagtttgataaacatttgcaaggaacagtggtgccagccacagcgagttattggtcttcgtgcttctgtagatgaagtggaagaggttttaatcaaatggtgtggtcttccttatgatgaatgcacttgggaaagatcagatgaacctaccctgatgaaatatagccatttggtcactcagttcaagaattttgaatgccaggctttggataaagatgtggtaaaagattatgcaaatgcaaggaaccgacatgagcttaatgtgttagttgatcagccaaaagaacttcagggcggcatgctcttccctcatcaattggaagcgttgaactggctgcggaaatgctggtacaagtcaaaaaatgttatccttgctgatgagatgggtcttggaaagacagtgtcagcttgtgcttttctatcatccctatattgtgaatttaagattaatttgccatgtcttgtcttggttcctctttctacaatgcccaattggatggctgaattttcatcttgggctcctcatttaaatgttgtggagtatcatggttctgcaaggtcaagatctatcattcgccagtatgagtggcatgcgggcgatgcaagccagattggcaaaacaaagagatcgtacaaattcaatgttttgcttaccacttatgaaatggtgcttgttgatgctgcatatcttcgttctgtctcatgggaagttcttatagttgatgagggacatcgcctgaagaattctagcagcaaactctttagtttacttaattcattctcatttcagcacagagttttgttgactggaactcccttacagaacaacattggtgaaatgtataacttattgaacttcttacagcctacttcttttccttctctatcatcatttgaggagaagtttaatgaccttacaacagcagaaaaagtagaggagctgaagaaacttgtagctcctcatatgcttcggagattgaaaaaagatgcaatgcaaaatatccccccaaagatagagcgaatggtacctgttgaattgacatcaatccaggctgaatactaccgtgctatgcttacaaagaactatcaagtactgcgcaacattggaaaaggtggtgcacaccagtctttattgaacatagtaatgcagcttcggaaagtctgcaaccatccctatcttattcctggaactgaacctgaatctggttcacctgagtttctgcatgaaatgcgcataaaagcctcagcaaagctaactttgttgcatttgatgctaaaaatattacacaaggaaggccatcgtgttcttattttctctcagatgacaaaacttcttgacatccttgaagattatctgactttagaatttggccctaaaacatttgaaagagttgatggctcagtatctgtggcggagcgccaggcagcgattgttcgctttaatcaggataagacacgttttgttttcttgctgtctacacggtcatgtggacttggtattaatttggcaactgcagatactgttatcatatatgattcggatttcaacccacatgctgatatacaggcgatgaacagggcacacagaattggacaatcgaacagacttctggtttacaggcttgtagtacgtgctagtgttgaagagcgtatcttgcaattagccaagaagaaattgatgcttgatcaacttttcgttaacaaatcagaatcacagaaagaagtggaagatatcattcgctggggtacagaggaactctttggaaatagtgacagtgtggatggtaaagataacagtgaagtcccaggtcctgttgctgatgttgaatttaagcatagaagaaaaactggtggcctaggtgatgtttatgaggacaaatgtattggtggttctaccaaacttgtttgggatgaaaatgctattttgaagcttcttgatagatcaaaccttccatcatcaatggctgaaagcactgacggggatttggacaatgatatgcttggtactgtgaagtcaatagattggaacgatgagctcaatgacgaccctggtaccaatgaggatactgcacctattgacaatgatggtagcgagcaggcatctgaatcaaagcaaggtgctaccaatcgttcagaagaaaatgaatgggataaacttttgcgtgtcaggtactctgcaatactatgggagcaatatcaaatagaggaggaggcatgtcttggtcgaggcaaacgtttaaggaaggctgtttcttacagagagacattcgcaacacttcctaacgaagctttaagtgaggactctgatgagggagatgaaccaaagagagaatatacagcagctggactggccttgaaggaaaaatatggaaagcttcgagctagacaaaaggaaaggattgctcagcgacacattatcaagaactatgctgatgataatcttgaagagttcatgactccatacgactctattgctaatgaacctgctgaaaatcctttggtaatcgtagaagatctaaattcttcacagctatctggcgcgaaacgtttcagtgactcaactggagaaatgaggcaatcctccaagaaatcaaagagatattctgaaatccctcaagatctttatgccaaaattcctggtaacacagcttcattcaagcaccactcaaaggccactgatgtattcaatccagggaccccaaatcacttgctacctgtacttggcctttgtgctcctaatgctgatcaggtgaactcatacaaaaactcaatttgtgcaccaagcataaaggagcgtaaaagggccagtggtgacattgtcaaacaactgtcaactcctgctgaccattctaatgtgcatagaaacgaagctcaatcagcttctgataaggccatctttcctggtgcatctgaggaggctttgcgaagaataagtaacatgattccagatagttattttcccttcagtcatattcctcctatatcagggaagggggttgatcctgttgaaaatcctggaccctccattgcatcatttcaagggaatctgggtcttccaaacttcagtctggaagacaacgctccacttaagcatattaagcctatacctgatatatttcctagcctgtcactgggtgctcataaggattatattcgtagttctgtcccagagttgccagatggttcattgctgccaaacttcatggcagatattactggtacttcgaagcaaaagtcatttatgtctggtctacttcctgggctgggtcttagcccagggcaaccaatacattcggctatgcctgataatcacaagaaagtcttggacaatataatgatgcgtgctcagtatgcgtcaaacaaattcttgaagaagagatcaaaactagattattggtcagaggatgaacttgatgctctgtggataggagttcgtaggcatggaaggggaaattgggatgctatgcttagagatccaaagctgaagtttttgaacaaccgaactagtgaggagctggccttgaggtggattttggaggagcaaaaaattatagatgaacctatgtctacatccaccaggcgttctaactcagcagcatttcctggaatatctgatgcaatgatgtctcgggcactgaatgaaagtaatttctctaaaatgaggatggagcagcctaaattgcagtcccacttaactgatattcagttaggttcgagtgatatcctatccacatttcctcatgttgacgctgctagttacattaactcaggggagggtggcccatctcaaataccatggcaggattttaagcatagatcaagttatgctggagattttcctgccggtgcatttgacaagttggagaaacctgatgttggaccgatcccgccatttatgccaaatcctttcatgactgacagcattggttcacttcccataaacagaaaaaacaatagttccatcccgcatagtgaaatcaggtcaagttctcgtgagaacattctttctggtgtttcggatggacagatcaacttgcttcatgagatgcagcgtcgtcgtcgtgtgaggtcaggcaaagaacccattgagatgaatctcaaccacatagaccactcaaatctccagcttgataatactagtgaccttggaggtttaaaaccaaacaagttacctcattggcttcaggaggctgtacgtgctccttcatctaagccacctgaacgtgagctaccagcaacagtttcggcaattgctcagtcggtctgccttcttcttggagaacaagaaccatcaatacctccattcttgatcccgggaacacctctttctcgcccaaaagatccaaggattaattcaaagaagaaactccgcaaggctcagcaatctaactctcatgtagagcattcaaaaattggatctggtgagggtgattgtgtcactaccccagcacccccatccattgaagcttcacctgcacttcctgtcgattgcgatgatggtgagccttcactcaacttgaaatctgcatcgttgtcatcttcagctggcagcaaggggctagatgaattacctcccacatttaaagaagcaaaccaaaccgtggatggctcagaagctgttgcggccaagtcagatgctcctgaaattggttgtcaggtacctggttcctctccattacatgacaaaggtagtgaatcctcggggtcgccagtgaaggacactcctgacgctggaatcagattgccaggatcagataactcagttatggcattttctgcactcccacttgttgatgaagcacctgggacaagcagcagagcagctgacacgcctgtgccatgtgatggcaatgagtcgaaagaggatgttccactagacaacgctgaaagcaccaggaaactggagccgaacggatgaactggctcctcttgcgagcatggatgcatcgcatcgagtttctgctaatacagccgacgaagatgggtggatgaaatgatcattagactcgagctagttagctcaacattcctttcttttgcgttcagcataacactgggattttccctctcccaatgtttccagtgttgatctcgtgttgtgtaatgctttagtgcaggtctcgttgcagataggatgaaacgcaaagggctagtggtacttagcagtagttgggcactagtccgtcgggggagcaactcgtggaaacctgtatacaagaaatgtatattttgctaatatggtgctggttgggtgtgtagaaggtagaccgctattcgtttatttatgcgtatatggtttagtaatttgccatctgtctagcggtggctgtaagagtagacgtgatgatgatattgcctagccttgactcgttggcctccatgcctagccgaagagaagctgtgttcatactgacataactgacatactgagcgacttttgactgtttttttttatttcattagcggcaacgaagccaagaaccatgatcttcactcttttgtccccaccccccaaaaaaaaccccggaactctcaactattgttgtgcactgtaatttacctcttcaaattagaaaagtgatgttttg

SEQ ID NO: 66676 - DNA, 7144 bp, Zea Mays
atcagacccatgtacgcgagatctgactgagccttgagcaactatggtgctatttgtttcaattattttttcgagtgcgtagaatgtgatcttggtggcaatttgctatgttgtgatagctgtcctcgtgtttaccacttggaatgcctcaatcctcctcttaagcgtgcaccccctgggaagtggcaatgtccaagatgccgtccgaaaaaagttagcttgaagctgttaggtaatgcagatgttgacacttctaaacgtgaaaaaagtacaaggacatatgcaagtacggcatcagatagtccaccttcgcatacaaaagtctcctttaagaccaggaactccacacaagacaaaactggattaaacgaacaaggaaaagagtcatctggtggcacaatgaatgggggtgaaaccagtacgaagaataatgaagttgagaaaaagaagacactgatattacatttgaagaagcgttcaaccaaggaattgtcagagaacactaaaccctcgaagtcagaatttgttgaactttcagaagagaaaattgtaaaacatggaagtgttttgaaactcaagaaacatccacatcgtatggacttgtctccaagtaaatctaaaaccaggaggcaaagtagccagagagagagtaaaagatctggcacaaaaaagattaaatattccatgtctgatgatgacagtgtttcctcatcagaaccatcgacatctcttgataacagtgaatcaccaccaaaaagaaaacactcagatggaaaagcaccttcatccagtaccaagaaagggaaaaagaaagtgaaatttgttgagaaaaagcactctgaggagcagggcgtggtaggtgacaaaatgatgactacccaggaggatcagcaggtcgatcgcatcctaggctgccggcttcagatgagccaaatcaacccgccgtcccatgcttcattggagcagtttgaatcagctaatctccaggtggatggtatggttcttccacatgcttccgctggcattcctaataggcctcatgatggaacagagtcttctagaaatggtacaattgaggatatatgtgctgatgaatcagccaatcatagtggtcacaatttagaaatgcgaaaggatacggacagtaaatcccatgaaaaggagtcacataagcgagaacaagtcaagaagatattatcagtatgttctggtgatgagaccaatataatgaaagatgatcaagtagtcagagaaaatgtttcagcttccaaaaaaggtgaagatgagacatctgatttgccagcagaaaaggatgataccatacttccagtcaccagagcttgtacaatgatcaggaccaatcaagatcatacagatgaaagtaaacagcatgggaaaatagaacaaataacaaataaggactacaatgatgctggatatgagttcttgatcaaatgggttggaaaatcaaatattcacaacagttgggtttctgaatccgaggtaaaaatattagcaaaaaggaaactagaaaactacaaagcgaagtatggaatgagtttgataaacatttgcaaggaacagtggtgccagccacagcgagttattggtcttcgtgcttctgtagatgaagtggaagaggttttaatcaaatggtgtggtcttccttatgatgaatgcacttgggaaagatcagatgaacctaccctgatgaaatatagccatttggtcactcagttcaagaattttgaatgccaggctttggataaagatgtggtaaaagattatgcaaatgcaaggaaccgacatgagcttaatgtgttagttgatcagccaaaagaacttcagggcggcatgctcttccctcatcaattggaagcgttgaactggctgcggaaatgctggtacaagtcaaaaaatgttatccttgctgatgagatgggtcttggaaagacagtgtcagcttgtgcttttctatcatccctatattgtgaatttaagattaatttgccatgtcttgtcttggttcctctttctacaatgcccaattggatggctgaattttcatcttgggctcctcatttaaatgttgtggagtatcatggttctgcaaggtcaagatctatcattcgccagtatgagtggcatgcgggcgatgcaagccagattggcaaaacaaagagatcgtacaaattcaatgttttgcttaccacttatgaaatggtgcttgttgatgctgcatatcttcgttctgtctcatgggaagttcttatagttgatgagggacatcgcctgaagaattctagcagcaaactctttagtttacttaattcattctcatttcagcacagagttttgttgactggaactcccttacagaacaacattggtgaaatgtataacttattgaacttcttacagcctacttcttttccttctctatcatcatttgaggagaagtttaatgaccttacaacagcagaaaaagtagaggagctgaagaaacttgtagctcctcatatgcttcggagattgaaaaaagatgcaatgcaaaatatccccccaaagatagagcgaatggtacctgttgaattgacatcaatccaggctgaatactaccgtgctatgcttacaaagaactatcaagtactgcgcaacattggaaaaggtggtgcacaccagtctttattgaacatagtaatgcagcttcggaaagtctgcaaccatccctatcttattcctggaactgaacctgaatctggttcacctgagtttctgcatgaaatgcgcataaaagcctcagcaaagctaactttgttgcatttgatgctaaaaatattacacaaggaaggccatcgtgttcttattttctctcagatgacaaaacttcttgacatccttgaagattatctgactttagaatttggccctaaaacatttgaaagagttgatggctcagtatctgtggcggagcgccaggcagcgattgttcgctttaatcaggataagacacgttttgttttcttgctgtctacacggtcatgtggacttggtattaatttggcaactgcagatactgttatcatatatgattcggatttcaacccacatgctgatatacaggcgatgaacagggcacacagaattggacaatcgaacagacttctggtttacaggcttgtagtacgtgctagtgttgaagagcgtatcttgcaattagccaagaagaaattgatgcttgatcaacttttcgttaacaaatcagaatcacagaaagaagtggaagatatcattcgctggggtacagaggaactctttggaaatagtgacagtgtggatggtaaagataacagtgaagtcccaggtcctgttgctgatgttgaatttaagcatagaagaaaaactggtggcctaggtgatgtttatgaggacaaatgtattggtggttctaccaaacttgtttgggatgaaaatgctattttgaagcttcttgatagatcaaaccttccatcatcaatggctgaaagcactgacggggatttggacaatgatatgcttggtactgtgaagtcaatagattggaacgatgagctcaatgacgaccctggtaccaatgaggatactgcacctattgacaatgatggtagcgagcaggcatctgaatcaaagcaaggtgctaccaatcgttcagaagaaaatgaatgggataaacttttgcgtgtcaggtactctgcaatactatgggagcaatatcaaatagaggaggaggcatgtcttggtcgaggcaaacgtttaaggaaggctgtttcttacagagagacattcgcaacacttcctaacgaagctttaagtgaggactctgatgagggagatgaaccaaagagagaatatacagcagctggactggccttgaaggaaaaatatggaaagcttcgagctagacaaaaggaaaggattgctcagcgacacattatcaagaactatgctgatgataatcttgaagagttcatgactccatacgactctattgctaatgaacctgctgaaaatcctttggtaatcgtagaagatctaaattcttcacagctatctggcgcgaaacgtttcagtgactcaactggagaaatgaggcaatcctccaagaaatcaaagagatattctgaaatccctcaagatctttatgccaaaattcctggtaacacagcttcattcaagcaccactcaaaggccactgatgtattcaatccagggaccccaaatcacttgctacctgtacttggcctttgtgctcctaatgctgatcaggtgaactcatacaaaaactcaatttgtgcaccaagcataaaggagcgtaaaagggccagtggtgacattgtcaaacaactgtcaactcctgctgaccattctaatgtgcatagaaacgaagctcaatcagcttctgataaggccatctttcctggtgcatctgaggaggctttgcgaagaataagtaacatgattccagatagttattttcccttcagtcatattcctcctatatcagggaagggggttgatcctgttgaaaatcctggaccctccattgcatcatttcaagggaatctgggtcttccaaacttcagtctggaagacaacgctccacttaagcatattaagcctatacctgatatatttcctagcctgtcactgggtgctcataaggattatattcgtagttctgtcccagagttgccagatggttcattgctgccaaacttcatggcagatattactggtacttcgaagcaaaagtcatttatgtctggtctacttcctgggctgggtcttagcccagggcaaccaatacattcggctatgcctgataatcacaagaaagtcttggacaatataatgatgcgtgctcagtatgcgtcaaacaaattcttgaagaagagatcaaaactagattattggtcagaggatgaacttgatgctctgtggataggagttcgtaggcatggaaggggaaattgggatgctatgcttagagatccaaagctgaagtttttgaacaaccgaactagtgaggagctggccttgaggtggattttggaggagcaaaaaattatagatgaacctatgtctacatccaccaggcgttctaactcagcagcatttcctggaatatctgatgcaatgatgtctcgggcactgaatgaaagtaatttctctaaaatgaggatggagcagcctaaattgcagtcccacttaactgatattcagttaggttcgagtgatatcctatccacatttcctcatgttgacgctgctagttacattaactcaggggagggtggcccatctcaaataccatggcaggattttaagcatagatcaagttatgctggagattttcctgccggtgcatttgacaagttggagaaacctgatgttggaccgatcccgccatttatgccaaatcctttcatgactgacagcattggttcacttcccataaacagaaaaaacaatagttccatcccgcatagtgaaatcaggtcaagttctcgtgagaacattctttctggtgtttcggatggacagatcaacttgcttcatgagatgcagcgtcgtcgtcgtgtgaggtcaggcaaagaacccattgagatgaatctcaaccacatagaccactcaaatctccagcttgataatactagtgaccttggaggtttaaaaccaaacaagttacctcattggcttcaggaggctgtacgtgctccttcatctaagccacctgaacgtgagctaccagcaacagtttcggcaattgctcagtcggtctgccttcttcttggagaacaagaaccatcaatacctccattcttgatcccgggaacacctctttctcgcccaaaagatccaaggattaattcaaagaagaaactccgcaaggctcagcaatctaactctcatgtagagcattcaaaaattggatctggtgagggtgattgtgtcactaccccagcacccccatccattgaagcttcacctgcacttcctgtcgattgcgatgatggtgagccttcactcaacttgaaatctgcatcgttgtcatcttcagctggcagcaaggggctagatgaattacctcccacatttaaagaagcaaaccaaaccgtggatggctcagaagctgttgcggccaagtcagatgctcctgaaattggttgtcaggtacctggttcctctccattacatgacaaaggtagtgaatcctcggggtcgccagtgaaggacactcctgacgctggaatcagattgccaggatcagataactcagttatggcattttctgcactcccacttgttgatgaagcacctgggacaagcagcagagcagctgacacgcctgtgccatgtgatggcaatgagtcgaaagaggatgttccactagacaacgctgaaagcaccaggaaactggagccgaacggatgaactggctcctcttgcgagcatggatgcatcgcatcgagtttctgctaatacagccgacgaagatgggtggatgaaatgatcattagactcgagctagttagctcaacattcctttcttttgcgttcagcataacactgggattttccctctcccaatgtttccagtgttgatctcgtgttgtgtaatgctttagtgcaggtctcgttgcagataggatgaaacgcaaagggctagtggtacttagcagtagttgggcactagtccgtcgggggagcaactcgtggaaacctgtatacaagaaatgtatattttgctaatatggtgctggttgggtgtgtagaaggtagaccgctattcgtttatttatgcgtatatggtttagtaatttgccatctgtctagcggtggctgtaagagtagacgtgatgatgatattgcctagccttgactcgttggcctccatgcctagccgaagagaagctgtgttcatactgacataactgacatactgagcgacttttgactgtttttttttatttcattagcggcaacgaagccaagaaccatgatcttcactcttttgtccccaccccccaaaaaaaaccccggaactctcaactattgttgtgcactgtaatttacctcttcaaattagaaaagtgatgttttg

SEQ ID NO: 66677 - DNA, 3327 bp, Zea Mays
gttgggttactgacatccagggcgccctcacagtccaggactctgatgagggagatgaaccaaagagagaatatacagcagctggactggccttgaaggaaaaatatggaaagcttcgagctagacaaaaggaaaggattgctcagcgacacattatcaagaactatgctgatgataatcttgaagagttcatgactccatacgactctattgctaatgaacctgctgaaaatcctttggtaatcgtagaagatctaaattcttcacagctatctggcgcgaaacgtttcagtgactcaactggagaaatgaggcaatcctccaagaaatcaaagagatattctgaaatccctcaagatctttatgccaaaattcctggtaacacagcttcattcaagcaccactcaaaggccactgatgtattcaatccagggaccccaaatcacttgctacctgtacttggcctttgtgctcctaatgctgatcaggtgaactcatacaaaaactcaatttgtgcaccaagcataaaggagcgtaaaagggccagtggtgacattgtcaaacaactgtcaactcctgctgaccattctaatgtgcatagaaacgaagctcaatcagcttctgataaggccatctttcctggtgcatctgaggaggctttgcgaagaataagtaacatgattccagatagttattttcccttcagtcatattcctcctatatcagggaagggggttgatcctgttgaaaatcctggaccctccattgcatcatttcaagggaatctgggtcttccaaacttcagtctggaagacaacgctccacttaagcatattaagcctatacctgatatatttcctagcctgtcactgggtgctcataaggattatattcgtagttctgtcccagagttgccagatggttcattgctgccaaacttcatggcagatattactggtacttcgaagcaaaagtcatttatgtctggtctacttcctgggctgggtcttagcccagggcaaccaatacattcggctatgcctgataatcacaagaaagtcttggacaatataatgatgcgtgctcagtatgcgtcaaacaaattcttgaagaagagatcaaaactagattattggtcagaggatgaacttgatgctctgtggataggagttcgtaggcatggaaggggaaattgggatgctatgcttagagatccaaagctgaagtttttgaacaaccgaactagtgaggagctggccttgaggtggattttggaggagcaaaaaattatagatgaacctatgtctacatccaccaggcgttctaactcagcagcatttcctggaatatctgatgcaatgatgtctcgggcactgaatgaaagtaatttctctaaaatgaggatggagcagcctaaattgcagtcccacttaactgatattcagttaggttcgagtgatatcctatccacatttcctcatgttgacgctgctagttacattaactcaggggagggtggcccatctcaaataccatggcaggattttaagcatagatcaagttatgctggagattttcctgccggtgcatttgacaagttggagaaacctgatgttggaccgatcccgccatttatgccaaatcctttcatgactgacagcattggttcacttcccataaacagaaaaaacaatagttccatcccgcatagtgaaatcaggtcaagttctcgtgagaacattctttctggtgtttcggatggacagatcaacttgcttcatgagatgcagcgtcgtcgtcgtgtgaggtcaggcaaagaacccattgagatgaatctcaaccacatagaccactcaaatctccagcttgataatactagtgaccttggaggtttaaaaccaaacaagttacctcattggcttcaggaggctgtacgtgctccttcatctaagccacctgaacgtgagctaccagcaacagtttcggcaattgctcagtcggtctgccttcttcttggagaacaagaaccatcaatacctccattcttgatcccgggaacacctctttctcgcccaaaagatccaaggattaattcaaagaagaaactccgcaaggctcagcaatctaactctcatgtagagcattcaaaaattggatctggtgagggtgattgtgtcactaccccagcacccccatccattgaagcttcacctgcacttcctgtcgattgcgatgatggtgagccttcactcaacttgaaatctgcatcgttgtcatcttcagctggcagcaaggggctagatgaattacctcccacatttaaagaagcaaaccaaaccgtggatggctcagaagctgttgcggccaagtcagatgctcctgaaattggttgtcaggtacctggttcctctccattacatgacaaaggtagtgaatcctcggggtcgccagtgaaggacactcctgacgctggaatcagattgccaggatcagataactcagttatggcattttctgcactcccacttgttgatgaagcacctgggacaagcagcagagcagctgacacgcctgtgccatgtgatggcaatgagtcgaaagaggatgttccactagacaacgctgaaagcaccaggaaactggagccgaacggatgaactggctcctcttgcgagcatggatgcatcgcatcgagtttctgctaatacagccgacgaagatgggtggatgaaatgatcattagactcgagctagttagctcaacattcctttcttttgcgttcagcataacactgggattttccctctcccaatgtttccagtgttgatctcgtgttgtgtaatgctttagtgcaggtctcgttgcagataggatgaaacgcaaagggctagtggtacttagcagtagttgggcactagtccgtcgggggagcaactcgtggaaacctgtatacaagaaatgtatattttgctaatatggtgctggttgggtgtgtagaaggtagaccgctattcgtttatttatgcgtatatggtttagtaatttgccatctgtctagcggtggctgtaagagtagacgtgatgatgatattgcctagccttgactcgttggcctccatgcctagccgaagagaagctgtgttcatactgacataactgacatactgagcgacttttgactgtttttttttatttcattagcggcaacgaagccaagaaccatgatcttcactcttttgtccccaccccccaaaaaaaaccccggaactctcaactattgttgtgcactgtaatttacctcttcaaattagaaaagtgatgttttg

SEQ ID NO: 66678 - DNA, 766 bp, Zea Mays
tggccatcaccagttcaccgctccactccactaccgccgccaccccttcaacacaacctccgcccccggccgtaggggagggagggccggaggaagcgaccgagcaacccaccgccggagatgcagatcttcgtgaagacgctgacggggaagaccatcacgctggaggtcgagagtagcgacaccgtcgccaacgacaaggcgaagatacaggacaaggaaggcatcccgccggaccagcagcggctcattttcgccgggaagcagctagaggacgaccgcaccctggccgactacagcatccagaaggactccacgctgcacctggtgctccggctccgcggcggcggcaggggtggctaccccctcatgagcgtcccgtgggacctcatcaaccttgcccgcaagcataatgaggacaagatgatctgccgcaactgaggtcaaagaagaagctcatctccaagtttagcatgtgaactttgcaaagcgacattctggagtgccatccgaaagcgtcatgcatcagttgaatcaccctacctaaacattagttgtcctagtttaagtttctatctgtgtgttgaaccttaaatactatctttcaaatactccatgccgtgttcagcacgtgcagtgccatgcctaagaaatgctagtggaagttcttttggctggatgttgaaatccttgtcactcttcctgaatgctttattcggttttgaagaagagaaggatgagaagtagctggataattgcattttat

SEQ ID NO: 66679 - DNA, 2897 bp, Zea Mays
atgaccacgtcgcagaccaactcggtcgcccccgtgggccgtgggaggctcaaccgcacacattaacccacaccggccgcctccgcaggcgatccctccaccccacaggttcccttctccctcctccttcctccaaaccctggcgcaaaccctaatgtccaccgccggggacccttcccgcctctccggcgagtcctcgccgtcgtcctccacgtcctccggctcctcctcccactcctctggcgccgccgatgccgccgccaccaacctcgccctgacagcaccaacctccgccctcgccgatgacacagacgccgatgcccccacctccccgcgcgtggggacgtactttgagaccgaggacgacgcgtacgagttctacaaggcctacgcggcccgtctcggcttcgtcgtccgcaagtccaacaagtccaagaactcacggcacaccgtcacccgccgcctcttcgtctgctccaagcagggcttccgccaggagcccaagaagccccaggacgaaaccgcaggctccggagtcgcgtcctcgccctcgctgtcgctggtgcctgcgcctcggtgcccggactcgcgcacaggctgcctagcgtcgctcaccatcaagctcattccttccgcaaacgccttccgtgttactgacttcgtcgccgatcacaaccacccgctcgcctcttcctcgcccgctgtgtcactagccttgctgtcgccgagctcttcacaccacagcattgtagcagtggccagcttgccggacccaagggatgggccgcgggccgatatgcattttgagacagaggaggatgcatatgtcttctataacagatatgccgaacatgtaggcttcagtgtacggcgctcctacaagaagcggaagcgagggatgatagtgtcgcgtatttttgtttgttctcgcgagggtgtcagtgaccgcaccaagcaagagggtggagccatagtcattgcaaatggtggtgcagggtcagcaggcacacctaggccaggtccgccgccaacacggaccggatgtcaggcaagaatggtgataaagatcaccccctgccgaacataccgtgtagcaaagttttttccagagcataaccatcctctggccaatccagacagcgtgcataagctgcggtctcataaaatgagagcccgtgcacatgagcttggagcaggggaaatgcatcgaaggaagcaagggaagggtgtgcagcttggggatgttggcgcagcattgcaatacttggaggagttgcaggtagaaaatccttcagtttattacgcggtaggagtggggcctgatgggaaatccgctgtgaatttcttctgggctgatgcaaaatcaataattgactacaggagttttggggatgttgtttgctttgatacaacatatgcattgaacatttatggacggccatttgcactctttgttggtgttgacaaccataagcagttacttgtgtttggcgcagcactgctctatgatgagagcattcagtcgctgaaatgggtatttgaggtgtttgctgatgccatgcatgctaggcacccacaaactattttgattgatgaacgtcctgagtgtgccattgcagcagcagaggtgtggcctggcaccaatcactgcacaggggtgtggcatatctaccataattcaaagaggcacttgaagcaggtgtttgaaagctcaaaaagtttcagcaatgctttgaaccattgtctctttgaatgtgaggatgagattgagttcttgtcagcatgggaaaagctagttgagaaacatgacattggtgagagtgagtggctcagcagactttacctggagaaagaaaaatgggctttaccttatcagagaaccatgttttctgctgatatactctcaacccttcgtaaggataacatgattaatgaactaagacgagacctcagtgagcaagaagatatcctgcagttcttcaggcgttatgagtctattctggaagagcatcgatcaaagaaattgcatgctgatgttgatggcagccaggttactctgcctatcccatcgttgcgaatgctaaaacaatcatcaaatgcttatacacctgaagctttcaagatgttccagggagagtttgaggcttacatgaattgcatgtccttcccctgcggtgtggttggcacgatctctgagtacaagattgtgcttgatgagaagccatcagagagttttgtcaaatttgatgcactagatggctcgaccacttgcagctgcaagaagtttgaagctgttgggattcaatgctgtcatgtactgaaagtgctggatctcaagaatatcaaagaacttccagaacaatatattttgaagagatggaggaaagatgctcgttctgttcaaattggggaggaacctacctatgggtctggcagtgtcatgcgatcaacctcagaagctcgattcagtaacatgtgtcggttggctagcttgattgcttcaagagctgccaaatccgaggatgtgatgtcatacatcgaaagtcagtcaaatgctattcagaaacatctggatgatattctacacacaagctatcctgatatgggaaatcacactgttgcttcaagtagtcaagcaatttcctttgtaggcacccaacatcctgaccattccacaccagtagtggttgcacagacaacaaatggcctgatggggctttgacggcgcacatttgatcatactggcaacattgggctgcatgattgtcaggaattcctcgtcctccagaacttgtattcgtcagtggacaactgaacgggccacttggtggggagattgcagcccatacagcatcatgagttcgtcttagaagctggcatgtggggttcacagtctg

SEQ ID NO: 66680 - DNA, 4069 bp, Zea Mays
atgaccacgtcgcagaccaactcggtcgcccccgtgggccgtgggaggctcaaccgcacacattaacccacaccggccgcctccgcaggcgatccctccaccccacaggttcccttctccctcctccttcctccaaaccctggcgcaaaccctaatgtccaccgccggggacccttcccgcctctccggcgagtcctcgccgtcgtcctccacgtcctccggctcctcctcccactcctctggcgccgccgatgccgccgccaccaacctcgccctgacagcaccaacctccgccctcgccgatgacacagacgccgatgcccccacctccccgcgcgtggggacgtactttgagaccgaggacgacgcgtacgagttctacaaggcctacgcggcccgtctcggcttcgtcgtccgcaagtccaacaagtccaagaactcacggcacaccgtcacccgccgcctcttcgtctgctccaagcagggcttccgccaggagcccaagaagccccaggacgaaaccgcaggctccggagtcgcgtcctcgccctcgctgtcgctggtgcctgcgcctcggtgcccggactcgcgcacaggctgcctagcgtcgctcaccatcaagctcattccttccgcaaacgccttccgtgttactgacttcgtcgccgatcacaaccacccgctcgcctcttcctcgcccgctgtgtcactagccttgctgtcgccgagctcttcacaccacagcattgtagcagtggccagcttgccggacccaagggatgggccgcgggccgatatgcattttgagacagaggaggatgcatatgtcttctataacagatatgccgaacatgtaggcttcagtgtacggcgctcctacaagaagcggaagcgagggatgatagtgtcgcgtatttttgtttgttctcgcgagggtgtcagtgaccgcaccaagcaagagggtggagccatagtcattgcaaatggtggtgcagggtcagcaggcacacctaggccaggtccgccgccaacacggaccggatgtcaggcaagaatggtgataaagatcaccccctgccgaacataccgtgtagcaaagttttttccagagcataaccatcctctggccaatccagacagcgtgcataagctgcggtctcataaaatgagagcccgtgcacatgagcttggagcaggggaaatgcatcgaaggaagcaagggaagggtgtgcagcttggggatgttggcgcagcattgcaatacttggaggagttgcaggtagaaaatccttcagtttattacgcggtaggagtggggcctgatgggaaatccgctgtgaatttcttctgggctgatgcaaaatcaataattgactacaggagttttggggatgttgtttgctttgatacaacatatgcattgaacatttatggacggccatttgcactctttgttggtgttgacaaccataagcagttacttgtgtttggcgcagcactgctctatgatgagagcattcagtcgctgaaatgggtatttgaggtgtttgctgatgccatgcatgctaggcacccacaaactattttgattgatgaacgtcctgagtgtgccattgcagcagcagaggtgtggcctggcaccaatcactgcacaggggtgtggcatatctaccataattcaaagaggcacttgaagcaggtgtttgaaagctcaaaaagtttcagcaatgctttgaaccattgtctctttgaatgtgaggatgagattgagttcttgtcagcatgggaaaagctagttgagaaacatgacattggtgagagtgagtggctcagcagactttacctggagaaagaaaaatgggctttaccttatcagagaaccatgttttctgctgatatactctcaacccttcgtaaggataacatgattaatgaactaagacgagacctcagtgagcaagaagatatcctgcagttcttcaggcgttatgagtctattctggaagagcatcgatcaaagaaattgcatgctgatgttgatggcagccaggttactctgcctatcccatcgttgcgaatgctaaaacaatcatcaaatgcttatacacctgaagctttcaagatgttccagggagagtttgaggcttacatgaattgcatgtccttcccctgcggtgtggttggcacgatctctgagtacaagattgtgcttgatgagaagccatcagagagttttgtcaaatttgatgcactagatggctcgaccacttgcagctgcaagaagtttgaagctgttgggattcaatgctgtcatgtactgaaagtgctggatctcaagaatatcaaagaacttccagaacaatatattttgaagagatggaggaaagatgctcgttctgttcaaattggggaggaacctacctatgggtctggcagtgtcatgcgatcaacctcagaagctcgattcagtaacatgtgtcggttggctagcttgattgcttcaagagctgccaaatccgaggatgtgatgtcatacatcgaaagtcagtcaaatgctattcagaaacatctggatgatattctacacacaagctatcctgatatgggaaatcacactgttgcttcaagtagtcaagcaatttcctttgtaggcacccaacatcctgaccattccacaccagtagtggttgcacagacaacaaatggcctgatggggctttgacggcgcacatttgatcatactggcaacattggtaagtagttagtgatgtagtgttaatttactcaggagagctgattttattgtccattgctaaacatgaaaaattcactggtgtagcaatgacttgaactgcaaagattttactatgtagtggaacctcaagggctgagggtgatatagtagtaatgataagaaacaattttttttttgcttagtgtactgtctgtccatttcactgctgtcagctactcagctgtttggcatcagagaaacgtcctttaaaatgttcactgtgctagctacaaatacaaggctaaattggtatgtatgtggaatgtgccaagttggtatctttcacttctaacgagatttcctaagcagatggtgattcccttctttatgtttgcttgtccttttattttcagttaacttgaacttaggtttagtttgtccacaagcctgagactttggctatttaggtttttccgttaacttttcgcgaatgtggaatgagataggaaaccttgtttgttaggcttaataattttgattacaatcatgtgaaagttttactgaaaattgaattgttctttgataaacctcagggctgcatgattgtcaggaattcctcgtcctccagaacttgtattcgtcagtggacaactgaacgggtcagtcggtctttgtaaatttagttgggcattagttgaagtccgtgtacagtatttatcttggccaagttgatgtagtttagttgaagtcagtgtacagtatttatcttggccaagttgatgtagttgtggtgctaattatattcagttttgatgtaccagtgccttctgtgcatcaaatggcatttttgtacattttagatttctggtccactcctggcaaataaggctaaccctttctttcaatgggattggagtggtaagagagcttatcgattgtacggcgagttttgtgtgttctttcatgagaaattattatgtaggcgccaaaatcttaccattattaaaaaaaagcaaaagttgcgagagcataggaacaatcaatcatcacaactagctttagaatgctattatgtatccaattatagttacagcagctgcacttggaccccaaaatcatacgtggctcctgccgtccagttctgtggtattgtgcttgttggaactagtcgtccagttttgtgcttgttggaactagctatatttcgttgctgccatgtggagctccgctggtaaatagcatccttatggacagaaggccacttggtggggagattgcagcccatacagcatcatgagttcgtcttagaagctggcatgtggggttcacagtctg

SEQ ID NO: 66681 - DNA, 2109 bp, Zea Mays
aaaggctttcgtgtgccctccggtccggccgccttctccgcgcgcgctaggagtaataaacggaaggcaccaatctcggaggcaacggcccagacgcgcaagcggaagaaagggggagcgcaacattcgcggccgcggggagggagagagacaaggggggcggtcacacacacgcggaccgcgcgagctagcgagcgagcgagatccccctctcgcgctgctggatccgatctgacctgaccttacctcgtcgccgccagccgtgagagagagaagaggaagaggaggaggaggcggagatggcaccggtgtcggcgctcgccaagtacaagctcgtcttcctgggggaccagtccgtcggcaagaccagcatcatcacccgcttcatgtacgataagttcgacaacacttaccaggctacaattggtattgatttcctgtcaaagacaatgtaccttgaagatagaactgtgagactccaactctgggatacagctggtcaggaaaggttcaggagtttaattccaagctatatcagagactcttcagttgctgtcattgtattcgatgttgcaagcaggcagtctttcttaaatacatccaagtggatagatgaagttcgcactgagaggggcagtgatgttatcattgtgcttgttgggaacaaaactgaccttgttgacaagaggcaagtctcgatagaggaaggagaaggcaaggcaaaggaccttggtgtcatgtttattgaaaccagtgctaaagctgggtttaacattaagacactctcatcagcgaagcaggaagacatggttgatgtgaacttgaggtctggcaatgcaaactcgtcccagtctcaggctcaggctgggggatgcagttgttagttgcagtctctgacacttgctgctcatgatctctgagaccctgagcatcagaacgcgttaccactgatgcttctctcgggaaggagagttgatcggcattgaacacgcacacgctatagtttttacccggtgaatggaccatttgcattggaacgatacgtttgagttctctagtgttatttccagtggcctaagctagcaacagtgtatagttgggttggcactgcaaacttctaccgttcgagttgggtattagagctagttattggttcatgttgaacttatattattttctatcttgctgcagttatgtttgctatgtgtaccaaacatgtattggaatttttgtaagctataatatggccagcacagcagtagcctcacatgataccccttgaatctgtatcgttcaaaccgtggtatcctaaatttatatcgttcaaaccttttgccttttgcttttgagggtgtgtttggtttgtccaaacctcgcgctcctcctccggactctccccagtccccactccgtctcaaccccccccccccctccctccctccctccctccctccttgtcgcgcccagccggcctccggtccttcttcccggttcctggttgccgcctcggaacgcatggcgttgcacttgcagagcccgagttccttcccctacaggaggaggacacccggttcgtcgtggtaaccttctacaaattcgtgcccctcgacgacccccacgccgagttcgccagacacctcatcttcctccagtactatcgtgtttctgtcgggactcgggaagctcaagagagcgaccaccgcactggaggccgaagggaagggacgagatcgttgaatcgcaggtggacggctaggattggtcgcctgaggcgagaaggatgagtgaagaggataaggctgctacttctgctgagcaccgaagagggcccctaagctcaattaaaggatcctctcttctctgtccaggaggtccgtagctgctcatctttggcatgagcatgatcttgagatcggtaagttggcacaactatcctttcttgctcttctaactctgtcaaataagcatacacaggtcctgatgctcctgttgtattcaatgttgtaagtaccatcattaccttggaaccgtttgaggtgttatatgtttgctgatgtggggaatcaggttctctggaaccttcgattggaagatgaggggtttcaatgg

SEQ ID NO: 66682 - DNA, 1987 bp, Zea Mays
aaaggctttcgtgtgccctccggtccggccgccttctccgcgcgcgctaggagtaataaacggaaggcaccaatctcggaggcaacggcccagacgcgcaagcggaagaaagggggagcgcaacattcgcggccgcggggagggagagagacaaggggggcggtcacacacacgcggaccgcgcgagctagcgagcgagcgagatccccctctcgcgctgctggatccgatctgacctgaccttacctcgtcgccgccagccgtgagagagagaagaggaagaggaggaggaggcggagatggcaccggtgtcggcgctcgccaagtacaagctcgtcttcctgggggaccagtccgtcggcaagaccagcatcatcacccgcttcatgtacgataagttcgacaacacttaccaggctacaattggtattgatttcctgtcaaagacaatgtaccttgaagatagaactgtgagactccaactctgggatacagctggtcaggaaaggttcaggagtttaattccaagctatatcagagactcttcagttgctgtcattgtattcgatgttgcaagcaggcagtctttcttaaatacatccaagtggatagatgaagttcgcactgagaggggcagtgatgttatcattgtgcttgttgggaacaaaactgaccttgttgacaagaggcaagtctcgatagaggaaggagaaggcaaggcaaaggaccttggtgtcatgtttattgaaaccagtgctaaagctgggtttaacattaaggcgctgttccgtaaaattgctgctgcccttcctggtatggagacactctcatcagcgaagcaggaagacatggttgatgtgaacttgaggtctggcaatgcaaactcgtcccagtctcaggctcaggctgggggatgcagttgttagttgcagtctctgacacttgctgctcatgatctctgagaccctgagcatcagaacgcgttaccactgatgcttctctcgggaaggagagttgatcggcattgaacacgcacacgctatagtttttacccggtgaatggaccatttgcattggaacgatacgtttgagttctctagtgttatttccagtggcctaagctagcaacagtgtatagttgggttggcactgcaaacttctaccgttcgagttgggtattagagctagttattggttcatgttgaacttatattattttctatcttgctgcagttatgtttgctatgtgtaccaaacatgtattggaatttttgtaagctataatatggccagcacagcagtagcctcacatgataccccttgaatctgtatcgttcaaaccgtggtatcctaaatttatatcgttcaaaccttttgccttttgcttttgagggtgtgtttggtttgtccaaacctcgcgctcctcctccggactctccccagtccccactccgtctcaaccccccccccccctccctccctccctccctccctccttgtcgcgcccagccggcctccggtccttcttcccggttcctggttgccgcctcggaacgcatggcgttgcacttgcagagcccgagttccttcccctacaggaggaggacacccggttcgtcgtggtaaccttctacaaattcgtgcccctcgacgacccccacgccgagttcgccagacacctcatcttcctccagtactatcgtgtttctgtcgggactcgggaagctcaagagagcgaccaccgcactggaggccgaagggaagggacgagatcgttgaatcgcaggtggacggctaggattggtcgcctgaggcgagaaggatgagtgaagaggataaggctgctacttctgctgagcaccgaagagggcccctaagctcaattaaaggatcctctcttctctgtccaggaggtccgtagctgctcatctttggcatgagcatgatcttgagatcgattcaatcggccatgttgggcccatgcttc

SEQ ID NO: 66683 - DNA, 1435 bp, Zea Mays
attttttagaccaacaatcaattcgatacatcatgtgactagtgaaaaaagcttacaaaaaatcattttatctttcggtcaaatatatgttgtgtaaagtactttattgtttagggggaaaacatggttcttaaggcggtaaggcgagataaggcgttggaccaccgcctagacgcctaggtgatgcctaaggcaagcaaggtgacgccttatcaacttaagaatcagcaaagcaaccccatggaggaggaagaaaaagaaaaaaaaggagaaggaagggtaggaggcccagcccaccagccagccatagtccttcctctggcaaccccaggttgcttctctcccctaccattcagttgctgccccgattgagccaccgccgcctcagattcatcgtcgtcgccgacgatttggatgctaccgccgacgattcggatgtcgccgccctggatttggcctccgccaccctggatttggcctccgccgctcccgattcggcgctgccaaccccgaaatggcgccgccccttccccttccccttcccctatgtcatcttgttgattcttacctaggcggcggggacgccttggatctttcgggcgtctgaacgcctaggtgacgcctttaaaacaggggggaatttgttcccacatattacttgcagtcaaagatcgacaacttagttgctactattatcaatatacttccttattctgaatgcctacatatcaacagtaatgtttttttggttctgaaaatttgtagtctaaactgactcctcgtatttatggcagaaggtacttccatttctgtttctgccccaagccatacctactatgatttatagttattatcacttttttcatgcatttatgctgacgatcagtatataccaactctgttgtttgaactagatgctttcgtacttcgtctgatcaagtccatttaggtttgccctaagtcaaactattttacctttgactatcattttctaaaacttaatagagtgatgacacaatccacattattactaggtttattatgaaaaggggcaatatattcttgacaatatctctactacttattaagtaagcaatagtagtctacctctgattgttctgcctttgacctgttctgccaccgccccgttctgccatcgacagacagtcccgcgccgcccaaaaatatgagtaacagacaacacactaacacttttagtttgagcaacagacaacacacactaacgcttataagccatgtttctacgctctccatggccaatatgggactaataaaaaaacccatagcaatgtcgcggtttatgcagcccagtttgtgcggcccaacagttggtgcggcccattgttgtcgatttgtgcgttcacatcttctccctggcaactgcttccgtcgtctccaccaccgtcccacgttc

SEQ ID NO: 66684 - DNA, 3088 bp, Zea Mays
cgactttcccgccgtgggcgccgtcctagggaagccccacaatgctcgtaggtagtggccgagaagatcggagccgcgaggttcatgttgaaggctcgtccatcctcagcgccgccacctcgcccccgtcctcggagccgtcgtctccaccctgtcctcggagcagcatacaccatcgcgtcctcgagcacccccgagatctcgctccttcctctgcaactgtagccgcccggcgtctccccctccgcgtgagctggcccctcaccgctcgggccccagacctcctcctccagagcttcaccgcccgtcctaccgccgttggccaaccgtttggtggccccagacctcctccagagctaccgacgactacgactgtccaggaaaggtgcattcgagcccccagatctacattgaccccctttcctcgtatatgggctataactgctatcgaatccttgaagccaaagctaaaggagcttctgaagtatagggatgcagcacaaatggttgatgttgaaaccacgcaagaagctgctatggcagagatccttgttcgatgtttaagatgcgcagagggaggagaagaatgtggaaaaaatgtcagggtggctaccaagtgcaatgatatggaatctgcaaagctatggccagtctgatcttcttgttttctattaaagcgttcctttcttgtagcatggattactgggattctgacattagcacaatttgtcaagggagagttttataattattctggttgtggaaataacttcaattgtaatcatcctgtaatccgtggatttatagaggattgcttgagatactgggtaacagaaatgcatgtttatggtgttcgttttgaccttgcattgcatctacaatgaccagaggatgcagaacagcgccgcttcctgatcctgccttcgttgttgtgagtactgcatcaaataaacggagatgatcagatgaatatatcagctgtcttactcgactgctgacctcaggactgagaatatgtggtgccgcttcaatggctatttgcaggtcaggccgtgtgtatgtcgtcgacacagcgacagacccaagggcgccatccttgcaataggtggttgagtccgaggacattgctgagaatactgggcttgggttccctcacatgtctcattgccttgcgtctggcgacattatgatttcttgccttggggacaaggaggggaatgcagctggcaatggcttcctgctgttggattcagagtttaatgtcaaaggacgagggtcaaatagactttttccaatatctaaggagcgcacacatttatatgagaattacgcatggggcttattttggtcatggatccaatgctgctctttgttttatactactggagcagagctcatgtgccttaccgcaagtggggttcatgtcatcagttgcttggacaattatatcatggaagtgattgatgcgtctttgcccttgcaagaccaaacaggagcaaataatccaatattatgtttgagatcaattcattggaaaaacataaaccaagattatggcgtggtggaggtgagctttagcggcagaggcggcagcgaccccgacgcgtacgctgtggtgctcaagaggaagctcgacctgtactatgtcgtcgtcgccaaattcgcggctggtacttcagcaggccgtccaaggaccttcgccaagcatgatgagaaggatgtctacagtagaagggggcaccagaagaagagaatcataagattttatgaaaccagtaagatgttgcagagtctgtgcgctagggagatgcaaggccatttgtagaggaagctgtgctgcaagtatctgactggggtttcaacttatctaacatccaaatgtagaagaaagagtctcaaagattttttgaactcatcaagtctctgttcaatcaggctaaaagagtgggtgggatttctgggcccaatccctatatggcaggtttgtaatctcttctctaaaactaaaagtgatccgagagcatgacagagtttagtagaagctaaagaaaattactccatctatttcacacatagcatgcttgcacataatggcgtcatttagatggtattctgtagttgcctagcatctgagctctttagtttatgtttatttggccatactgtaagagtctatgtataccacattagatggcttcaagaaatctgtaacagcacagttgaaaggctacgccaatagtagttgtagctgatttatcttggttttgcatgatttaggaaacttggcgcacacatgtaggtagtgtcgtaattggttttgtatgtattaacaaatagcaactcccaaatggcataaagaatagggaaatggagacattagaaaagcaccatgtcgtgaaatctcagtcgcatgtgaggtgagttatttttgttgttcatgtatgtcattaatatgtatgtacaagtttgtactccaataatcatgttttacattatgcggggtaattgtaaggactacagtactttcgttttgattaaatggggtctatattttttctatccttgtctttccatgttcttctgaagcaccattgaatctttgcacaagtaattgtcgcctaccttcatgtgccaagtgttactttatgtagctcattgtgtattaacttgctgatttccttaagaaaaatatgaggacgaagcacaagcaaataagtactacatggttcaggtgcaatggtctggcttttgataaactcgaatgtaagggtggctagctacgacaagccttgttgctggcttataaatttggcttccaagtgtggtcctgttgatgatgtaagacagctagaatccaaacattatgacattgtttcgtttattcaaatgctaaaggatccaattttcacaacagagtattgagacagatttgaagatgtacgaccatagctagcttgcgcctatgatcgtgtataattgcaataatcctgacaaaatatggttgtgctttatattttggcatattgtgcacaaaaacaattgtcttctatgaccatcgtgatttatacattttcaaacaaaattttac

SEQ ID NO: 66685 - DNA, 2122 bp, Zea Mays
atgctcgtaggtagtggccgagaagatcggagccgcgaggttcatgttgaaggctcgtccatcctcagcgccgccacctcgcccccgtcctcggagccgtcgtctccaccctgtcctcggagcagcatacaccatcgcgtcctcgagcacccccgagatctcgctccttcctctgcaactgtagccgcccggcgtctccccctccgcgtgagctggcccctcaccgctcgggccccagacctcctcctccagagcttcaccgcccgtcctaccgccgttggccaaccgtttggtggccccagacctcctccagagctaccgacgactacgactgtccaggaaaggtgcattcgagcccccagatctacattgaccccctttcctcgtatatgggctataactgctatcgaatccttgaagccaaagctaaagagaacgccccatcaccagcttccccctcgcaagccgacctatgcgtccaactgagttgaagacaatgcaaaaaaagatctaggagcttctgaagtatagggatgcagcacaaatggttgatgttgaaaccacgcaagaagctgctatggcagagatccttgttcgatgtttaagatgcgcagagggaggagaagaatgtggaaaaaatgtcagggtggctaccaagtgcaatgatatggaatctgcaaagctatggccaggagagttttataattattctggttgtggaaataacttcaattgtaatcatcctgtaatccgtggatttatagaggattgcttgagaacagcgccgcttcctgatcctgccttcgttgttgtggttgagtccgaggacattgctgagaatactgggcttgggttccctcacatgtctcattgccttgcgtctggcgacattatgatttcttgccttggggacaaggaggggaatgcagctggcaatggcttcctgctgttggattcagagtttaatgtcaaaggacgagggtcaaatagactttttccaatatctaaggagcgcacacatttatatgagaattacgcatggggcttattttggtcatggatccaatgctgctctttgttttatactactggagcagagctcatgtgccttaccgcaaggtaattaaattagagatgcatggtaaactgtcaagtgtgtgtttttactacaagtgcatggagagcattaatcaaagagcaacaccaagtaatctttcactattttctttgttgtaacattactactcattactagcatgatggcaaccttttgatgcaattaacatgtccatgattgaatactttgcatgtgtgacagtggggttcatgtcatcagttgcttggacaattatatcatggaagtgattgatgcgtctttgcccttgcaagaccaaacaggagcaaataatccaatattatgtttgagatcaattcattggaaaaacataaaccaagattatggcgtggtggaggtgagctttagcggcagaggcggcagcgaccccgacgcgtacgctgtggtgctcaagaggaagctcgacctgtactatgtcgtcgtcgccaaattcgcggctggtacttcagcaggccgtccaaggaccttcgccaagcatgatgagaaggatgtctacagtagaagggggcaccagaagaagagaatcataagattttatgaaaccagtaagcaactcccaaatggcataaagaatagggaaatggagacattagaaaagcaccatgtcgtgaaatctcagtcgcatgtgaggtgcaatggtctggcttttgataaactcgaatgtaagggtggctagctacgacaagccttgttgctggcttataaatttggcttccaagtgtggtcctgttgatgatgtaagacagctagaatccaaacattatgacattgtttcgtttattcaaatgctaaaggatccaattttcacaacagagtattgagacagatttgaagatgtacgaccatagctagcttgcgcctatgatcgtgtataattgcaataatcctgacaaaatatggttgtgctttatattttggcatattgtgcacaaaaacaattgtcttctatgaccatcgtgatttatacattttcaaacaaaattttac

SEQ ID NO: 66686 - DNA, 2055 bp, Zea Mays
aacatttctaaaaggtattagtaggtggcttgctgcagcaaacttgaacacacaagcaacaaacatatgcttcaggtccttgatgctaccaacaagtttgcaatcctatctttacaaatttcacctatgcatctactcgtctgactgtacaattttcgttttcagaatttatagcagctaaaaatatcatcactttgtgcattgattgggcccatttttatatattttcaattctttgtttgattattacaggtaaacttttttaatacttttgttcaccggatggtaggaacagatgatataccacaaatgttttcgacctaacaaagagggcatagaaagtagaagttggttgctctttaaagcaccagtttcaagtagccatcagctaaaacctgccattgatgaaacaagtggtgatgcctgacgcggagcatattttgtcatcaaccttggttgtgcggttgtgccaatcctaaacggtggtggtttgaatcatcatggttcactggttttcacaatattgggattcttggcaaccatgaggacataatggggttcttggctaccatgaggacattatgagattcttggctaccatgaggataagttgatgcgcagagggaggagaagaatgtggaaaaaatgtcagggtggctaccaagtgcaatgatatggaatctgcaaagctatggccagtctgatcttcttgttttctattaaagcgttcctttcttgtagcatggattactgggattctgacattagcacaatttgtcaagggagagttttataattattctggttgtggaaataacttcaattgtaatcatcctgtaatccgtggatttatagaggattgcttgagatactgggtaacagaaatgcatgtttatggtgttcgttttgaccttgcattgcatctacaatgaccagaggatgcagaacagcgccgcttcctgatcctgccttcgttgttgtggttgagtccgaggacattgctgagaatactgggcttgggttccctcacatgtctcattgccttgcgtctggcgacattatgatttcttgccttggggacaaggaggggaatgcagctggcaatggcttcctgctgttggattcagagtttaatgtcaaaggacgagggtcaaatagactttttccaatatctaaggagcgcacacatttatatgagaattacgcatggggcttattttggtcatggatccaatgctgctctttgttttatactactggagcagagctcatgtgccttaccgcaagtggggttcatgtcatcagttgcttggacaattatatcatggaagtgattgatgcgtctttgcccttgcaagaccaaacaggagcaaataatccaatattatgtttgagatcaattcattggaaaaacataaaccaagattatggcgtggtggaggtgagctttagcggcagaggcggcagcgaccccgacgcgtacgctgtggtgctcaagaggaagctcgacctgtactatgtcgtcgtcgccaaattcggtgtgcatgatgagaaggatgtctacagtagaagggggcaccagaagaagagaatcataagattttatgaaaccagtaagcaactcccaaatggcataaagaatagggaaatggagacattagaaaagcaccatgtcgtgaaatctcagtcgcatgtgaggtgcaatggtctggcttttgataaactcgaatgtaagggtggctagctacgacaagccttgttgctggcttataaatttggcttccaagtgtggtcctgttgatgatgtaagacagctagaatccaaacattatgacattgtttcgtttattcaaatgctaaaggatccaattttcacaacagagtattgagacagatttgaagatgtacgaccatagctagcttgcgcctatgatcgtgtataattgcaataatcctgacaaaatatggttgtgctttatattttggcatattgtgcacaaaaacaattgtcttctatgaccatcgtgatttatacattttcaaacaaaattttac

SEQ ID NO: 66687 - DNA, 4948 bp, Zea Mays
cggagcgtaggctcgaggagggaaggcataccggtgcctctccacttcttccgtgcacagtggaatcctcaacctcaacaaaccaaaccccggccccacaccttcaccatgctacctctccccttttttttcccgattcgccctgtcttcccaagccctgctttgccgctagcgacaaaaccctaaccctaaccgcggggatggcgacgcagtcgcactcctcctccgctgccgcgatagacatgtatgagacggcctctcagccggacgcctccgttgccggcgacgcctacaccttccttgagttcaacactcagggtgacgaattcgactaccccgactttccggagctttctcaaccgccgccccgatcgacgccgctgacgtcttccatccccggcgctggcgcgtcgtcctcgtcgtggcctgccccgccgccgccgccctccgacgcggcctccgctgaacccgatctcacgtctctggacgtccccaccccgccggcctcctcctcctcgccgtcgccgcggtctgcctccaaggcgcgctcgttggctgcggcagatgggctcgcctccggggtagccgcactcagcttcgaggatcctgttggagccggcgccggagaggacgggtacgactacggcaagggagacttcgtggaacacgcctgccggtactgtgggatccacaatcctgcatgcgtggcgaggtgcaacgtgccctcctgccgcaagtggttctgtaactcgcgggggaacacctctggctcccacattgtcaaccacctggttagggcaaagcataaggaagtgtgccttcacaaggatagccctttgggagaaacaatccttgaatgctacaactgtggctgtcggaatgtatttcttcttgggtttatctcagcaaaattggagaatgttgtcgttcttttatgcagagagccgtgtttaagtgttaatgcactgaaggatatgaattgggatctcagccagtggtgccctcttattgatgacaggtgtttcttgtcatggcttgtaaaggtaccttcagagcaggagcagctaagagctcggcaaattagtgcacagcaaattaacaaagtggaagagctttggaagacaaatcctgatgcatctcttgaagatcttgaaaagcctggcgtagatgatgaacctcagccagttgttttgaagtatgaagatgcttaccagtaccaaaatgtttttgcgccactgataaaacttgaggctgattatgacaagatgacgaaagagtcacagagcaaggataatgtaactgtccggtgggatattgggttgaacaagaagcgtgtagcttactttgtctttccaaaggaagacaatgagttgaggcttgtgcctggagatgagctacgcttgagatatcctggtgatagctcacatcccacatggcaatctgtgggacatgtgattaagctcactgcacaagaggaggtggcacttgagcttcgtgcaagtcagggggtgcctactgagctaaacgttggattcagtgttgatttcgtttggaagagtaccagttttgataggatgcaaggagcaatgaaaacttttgctgtggacgagacaagtgtcagtggatacatataccaccaccttttgggacatgaagttgagcatcaaataatacgtaacaccctaccaagacgctttggtgcacctggacttccagaactaaatgcttcccaggttttagcagttaaaagtgtcctgcagaagccagttagtttgattcaaggtccacctggcactggaaaaactgtcacatctggtgcaattgtgtatcacatggccaaacaaggtcaaggacaggttcttgtatgtgccccaagtaatgttgctgttgatcagctggcagagaagataagctcaaccggtctcaaggttgttaggctgtgtgcaaaatctagagaagctgtttcgtctcctgttgagcatctcacacttcattatcaggttaggcaccttgatacctctgaaaagagtgaatttcacaagttacagcaactgaaagatgaacaaggtgaattgtccagcagtgatgagaagaagtacaaggcactaaagcgtgccactgaaagagagatactgcagagtgctgatgtcatttgttgcacctgtgtcggtgctggagatcctcgtctttcaaacttccgtttccgacaagttcttattgatgagtccacacaggcaacagagcctgaatgtcttattcctttggtgcttggtgtcaagcaggttgtccttgtcggagatcattgccaattgggtcctgtcatcatgtgcaaaaaagcagcccgtgcaggattagcacaatctctctttgaacgccttgttatccttggagtgaagccattcaggctacaggtccagtatagaatgcatccatgcctctcagagtttccatccaactgcttttatgaaggcacactgcaaaatggagtgactgttaatgagaggcattcgtctggaattgattttccttggcctgttccaaatcgcccaatgttcttctatgtgcagatgggacaagaagaaatcagtgctagtgggacatcgtatctcaatagaactgaagctgcaaatgttgaaaaaattgtaacaacttttttaagaagtggtgttgtaccaagccagatcggagttatcacaccttatgaagggcaaagggcatacattgtaaattacatgtcaaggaatggctctcttcgccaacaactttacaaggaaatcgaggtcgctagtgtagactcatttcagggtagagagaaagactacattattctatcttgtgttagaagcaatgagcaccagggaattgggtttctcaatgacccgcgcaggttaaacgttgcgttaactcgtgcacgttatggcatagttattcttggtaatccaaaagtactaagcaagcagccactttggaatagcttgttgacacattacaaggagcatgagtgcttggtagaaggacctctgaacaacttaaagcagagcatggtgcagtttcagaagcccaaaaagatatataatgatcggagattgttactgggcggtgctcaaggcatgcatggagctaacttcggggctggggcctcaagccaagcagcagataagagaagtggcagggggaaagcagggcaatcatttgtttcttatggccctccaaatggggtgcacaagcctggtgtgcacccagcaggttatgctgtacctcgtatgccttttcctccatttcctggggctccacattctcaaccatatgcaattccgactcggggtttgcatgggcccattggagctgttccaccggtgcatcaacctggaagtagaagttttggggcacctcgttcaaatactggtgggcctattggtggccaccttgctcatcaacagaattcccagcaagctatgggtggcattgggtcaaattttaactacgctggcatggagaattcgagtagtcagccttctggtgtagcccaaatgtcccaatcgggattaatgacacaggacttcattgtagatgattttaagagccaaggatcacatgtgccatacaacattgcagaattttctacccaggcttctcaaggtggttatggtgttgagtttactcaagcgccccaatctggatactctgggaattatatgaaccaaaacacacatcctggatactcccatattggtacaacaaatgacattgtatctcaggatcacatggcccatggatctcacggaatgtttacgcaagtggggtataatgatccgtcgcaagatgagtcatctcagattcattatggaatggctgctgctggtcccctacattcgcagagcatgatgaaccccttatactctcaatcctatgctcactacaacacccagccacattctcttcaacctcctccccagtgataattaaggcttgtgatatggtgaagccacattttggaagtttggcttgtacaagatggctatggctactgaccaacagccagcgccgaggagcacaaggattgcaatgtatcatgttcttgatcgttgtggttcactacccgtttagaccacaagaggggtcatattgtgcatcggaagaggttggcggcactatcctcatccctcacctgtatataaaggcaatctgggcctatagtggtacaatgtgaacatattccaggatttgctgccactcaagtcaagttgcagcaattgcatgcctccatggtgtagagtggctttgtataaaggtgctataggttgggtggccacaacccttttggatatcacacatgacaagatatttacctttacattttgtatgcatctgatatggttttgatatttatgccagagatgatttaggtgatggtaaaattagttagtgacgactggaaatttgggagtgttctgtgaaagtaaatttgaccctgaatcctgcgaggaatggctgatcatgaagtttattgtataatttggatagtccgttcagagatattcatgcataggtgcatcacatatttgttctttatctttctgcaagtggcacttttctgagtggtcaattctgcaatgaaatgtgcgtgtctgaagtttctgttgccatcgtgccagatcggataaacaagtttatcgaggccacagtttttttaggctacaggggattctgatatctgataagcttgctaatcgcatcgcagttgagcttgtatttcgcggcttgtgcgatcatacgggattatttttagatctgtgacattgataggaaattctagggctcgtttgtttcctttgaattgaattctattataataataataactgggaaataaattaattaagttaatatatttgtatatgtaacatatttatatattattctaaattatatgtatgttatagactag

SEQ ID NO: 66688 - DNA, 4884 bp, Zea Mays
ggaatcctcaacctcaacaaaccaaaccccggccccacaccttcaccatgctacctctccccttttttttcccgattcgccctgtcttcccaagccctgctttgccgctagcgacaaaaccctaaccctaaccgcggggatggcgacgcagtcgcactcctcctccgctgccgcgatagacatgtatgagacggcctctcagccggacgcctccgttgccggcgacgcctacaccttccttgagttcaacactcagggtgacgaattcgactaccccgactttccggagctttctcaaccgccgccccgatcgacgccgctgacgtcttccatccccggcgctggcgcgtcgtcctcgtcgtggcctgccccgccgccgccgccctccgacgcggcctccgctgaacccgatctcacgtctctggacgtccccaccccgccggcctcctcctcctcgccgtcgccgcggtctgcctccaaggcgcgctcgttggctgcggcagatgggctcgcctccggggtagccgcactcagcttcgaggatcctgttggagccggcgccggagaggacgggtacgactacggcaagggagacttcgtggaacacgcctgccggtactgtgggatccacaatcctgcatgcgtggcgaggtgcaacgtgccctcctgccgcaagtggttctgtaactcgcgggggaacacctctggctcccacattgtcaaccacctggttagggcaaagcataaggaagtgtgccttcacaaggatagccctttgggagaaacaatccttgaatgctacaactgtggctgtcggaatgtatttcttcttgggtttatctcagcaaaattggagaatgttgtcgttcttttatgcagagagccgtgtttaagtgttaatgcactgaaggatatgaattgggatctcagccagtggtgccctcttattgatgacaggtgtttcttgtcatggcttgtaaaggtaccttcagagcaggagcagctaagagctcggcaaattagtgcacagcaaattaacaaagtggaagagctttggaagacaaatcctgatgcatctcttgaagatcttgaaaagcctggcgtagatgatgaacctcagccagttgttttgaagtatgaagatgcttaccagtaccaaaatgtttttgcgccactgataaaacttgaggctgattatgacaagatgacgaaagagtcacagagcaaggataatgtaactgtccggtgggatattgggttgaacaagaagcgtgtagcttactttgtctttccaaaggaagacaatgagttgaggcttgtgcctggagatgagctacgcttgagatatcctggtgatagctcacatcccacatggcaatctgtgggacatgtgattaagctcactgcacaagaggaggtggcacttgagcttcgtgcaagtcagggggtgcctactgagctaaacgttggattcagtgttgatttcgtttggaagagtaccagttttgataggatgcaaggagcaatgaaaacttttgctgtggacgagacaagtgtcagtggatacatataccaccaccttttgggacatgaagttgagcatcaaataatacgtaacaccctaccaagacgctttggtgcacctggacttccagaactaaatgcttcccaggttttagcagttaaaagtgtcctgcagaagccagttagtttgattcaaggtccacctggcactggaaaaactgtcacatctggtgcaattgtgtatcacatggccaaacaaggtcaaggacaggttcttgtatgtgccccaagtaatgttgctgttgatcagctggcagagaagataagctcaaccggtctcaaggttgttaggctgtgtgcaaaatctagagaagctgtttcgtctcctgttgagcatctcacacttcattatcaggttaggcaccttgatacctctgaaaagagtgaatttcacaagttacagcaactgaaagatgaacaaggtgaattgtccagcagtgatgagaagaagtacaaggcactaaagcgtgccactgaaagagagatactgcagagtgctgatgtcatttgttgcacctgtgtcggtgctggagatcctcgtctttcaaacttccgtttccgacaagttcttattgatgagtccacacaggcaacagagcctgaatgtcttattcctttggtgcttggtgtcaagcaggttgtccttgtcggagatcattgccaattgggtcctgtcatcatgtgcaaaaaagcagcccgtgcaggattagcacaatctctctttgaacgccttgttatccttggagtgaagccattcaggctacaggtccagtatagaatgcatccatgcctctcagagtttccatccaactgcttttatgaaggcacactgcaaaatggagtgactgttaatgagaggcattcgtctggaattgattttccttggcctgttccaaatcgcccaatgttcttctatgtgcagatgggacaagaagaaatcagtgctagtgggacatcgtatctcaatagaactgaagctgcaaatgttgaaaaaattgtaacaacttttttaagaagtggtgttgtaccaagccagatcggagttatcacaccttatgaagggcaaagggcatacattgtaaattacatgtcaaggaatggctctcttcgccaacaactttacaaggaaatcgaggtcgctagtgtagactcatttcagggtagagagaaagactacattattctatcttgtgttagaagcaatgagcaccagggaattgggtttctcaatgacccgcgcaggttaaacgttgcgttaactcgtgcacgttatggcatagttattcttggtaatccaaaagtactaagcaagcagccactttggaatagcttgttgacacattacaaggagcatgagtgcttggtagaaggacctctgaacaacttaaagcagagcatggtgcagtttcagaagcccaaaaagatatataatgatcggagattgttactgggcggtgctcaaggcatgcatggagctaacttcggggctggggcctcaagccaagcagcagataagagaagtggcagggggaaagggcaatcatttgtttcttatggccctccaaatggggtgcacaagcctggtgtgcacccagcaggttatgctgtacctcgtatgccttttcctccatttcctggggctccacattctcaaccatatgcaattccgactcggggtttgcatgggcccattggagctgttccaccggtgcatcaacctggaagtagaagttttggggcacctcgttcaaatactggtgggcctattggtggccaccttgctcatcaacagaattcccagcaagctatgggtggcattgggtcaaattttaactacgctggcatggagaattcgagtagtcagccttctggtgtagcccaaatgtcccaatcgggattaatgacacaggacttcattgtagatgattttaagagccaaggatcacatgtgccatacaacattgcagaattttctacccaggcttctcaaggtggttatggtgttgagtttactcaagcgccccaatctggatactctgggaattatatgaaccaaaacacacatcctggatactcccatattggtacaacaaatgacattgtatctcaggatcacatggcccatggatctcacggaatgtttacgcaagtggggtataatgatccgtcgcaagatgagtcatctcagattcattatggaatggctgctgctggtcccctacattcgcagagcatgatgaaccccttatactctcaatcctatgctcactacaacacccagccacattctcttcaacctcctccccagtgataattaaggcttgtgatatggtgaagccacattttggaagtttggcttgtacaagatggctatggctactgaccaacagccagcgccgaggagcacaaggattgcaatgtatcatgttcttgatcgttgtggttcactacccgtttagaccacaagaggggtcatattgtgcatcggaagaggttggcggcactatcctcatccctcacctgtatataaaggcaatctgggcctatagtggtacaatgtgaacatattccaggatttgctgccactcaagtcaagttgcagcaattgcatgcctccatggtgtagagtggctttgtataaaggtgctataggttgggtggccacaacccttttggatatcacacatgacaagatatttacctttacattttgtatgcatctgatatggttttgatatttatgccagagatgatttaggtgatggtaaaattagttagtgacgactggaaatttgggagtgttctgtgaaagtaaatttgaccctgaatcctgcgaggaatggctgatcatgaagtttattgtataatttggatagtccgttcagagatattcatgcataggtgcatcacatatttgttctttatctttctgcaagtggcacttttctgagtggtcaattctgcaatgaaatgtgcgtgtctgaagtttctgttgccatcgtgccagatcggataaacaagtttatcgaggccacagtttttttaggctacaggggattctgatatctgataagcttgctaatcgcatcgcagttgagcttgtatttcgcggcttgtgcgatcatacgggattatttttagatctgtgacattgataggaaattctagggctcgtttgtttcctttgaattgaattctattataataataataactgggaaataaattaattaagttaatatatttgtatatgtaacatatttatatattattctaaattatatgtatgttatagactag

SEQ ID NO: 66689 - DNA, 4946 bp, Zea Mays
ggaatcctcaacctcaacaaaccaaaccccggccccacaccttcaccatgctacctctccccttttttttcccgattcgccctgtcttcccaagccctgctttgccgctagcgacaaaaccctaaccctaaccgcggggatggcgacgcagtcgcactcctcctccgctgccgcgatagacatgtatgagacggcctctcagccggacgcctccgttgccggcgacgcctacaccttccttgagttcaacactcagggtgacgaattcgactaccccgactttccggagctttctcaaccgccgccccgatcgacgccgctgacgtcttccatccccggcgctggcgcgtcgtcctcgtcgtggcctgccccgccgccgccgccctccgacgcggcctccgctgaacccgatctcacgtctctggacgtccccaccccgccggcctcctcctcctcgccgtcgccgcggtctgcctccaaggcgcgctcgttggctgcggcagatgggctcgcctccggggtagccgcactcagcttcgaggatcctgttggagccggcgccggagaggacgggtacgactacggcaagggagacttcgtggaacacgcctgccggtactgtgggatccacaatcctgcatgcgtggcgaggtgcaacgtgccctcctgccgcaagtggttctgtaactcgcgggggaacacctctggctcccacattgtcaaccacctggttagggcaaagcataaggaagtgtgccttcacaaggatagccctttgggagaaacaatccttgaatgctacaactgtggctgtcggaatgtatttcttcttgggtttatctcagcaaaattggagaatgttgtcgttcttttatgcagagagccgtgtttaagtgttaatgcactgaaggatatgaattgggatctcagccagtggtgccctcttattgatgacaggtgtttcttgtcatggcttgtaaaggtaccttcagagcaggagcagctaagagctcggcaaattagtgcacagcaaattaacaaagtggaagagctttggaagacaaatcctgatgcatctcttgaagatcttgaaaagcctggcgtagatgatgaacctcagccagttgttttgaagtatgaagatgcttaccagtaccaaaatgtttttgcgccactgataaaacttgaggctgattatgacaagatgacgaaagagtcacagagcaaggataatgtaactgtccggtgggatattgggttgaacaagaagcgtgtagcttactttgtctttccaaaggaagacaatgagttgaggcttgtgcctggagatgagctacgcttgagatatcctggtgatagctcacatcccacatggcaatctgtgggacatgtgattaagctcactgcacaagaggaggtggcacttgagcttcgtgcaagtcagggggtgcctactgagctaaacgttggattcagtgttgatttcgtttggaagagtaccagttttgataggatgcaaggagcaatgaaaacttttgctgtggacgagacaagtgtcagtggatacatataccaccaccttttgggacatgaagttgagcatcaaataatacgtaacaccctaccaagacgctttggtgcacctggacttccagaactaaatgcttcccaggttttagcagttaaaagtgtcctgcagaagccagttagtttgattcaaggtccacctggcactggaaaaactgtcacatctggtgcaattgtgtatcacatggccaaacaaggtcaaggacaggttcttgtatgtgccccaagtaatgttgctgttgatcagctggcagagaagataagctcaaccggtctcaaggttgttaggctgtgtgcaaaatctagagaagctgtttcgtctcctgttgagcatctcacacttcattatcaggttaggcaccttgatacctctgaaaagagtgaatttcacaagttacagcaactgaaagatgaacaaggtgaattgtccagcagtgatgagaagaagtacaaggcactaaagcgtgccactgaaagagagatactgcagagtgctgatgtcatttgttgcacctgtgtcggtgctggagatcctcgtctttcaaacttccgtttccgacaagttgtccttgtcggagatcattgccaattgggtcctgtcatcatgtgcaaaaaagcagcccgtgcaggattagcacaatctctctttgaacgccttgttatccttggagtgaagccattcaggctacaggtccagtatagaatgcatccatgcctctcagagtttccatccaactgcttttatgaaggcacactgcaaaatggagtgactgttaatgagaggcattcgtctggaattgattttccttggcctgttccaaatcgcccaatgttcttctatgtgcagatgggacaagaagaaatcagtgctagtgggacatcgtatctcaatagaactgaagctgcaaatgttgaaaaaattgtaacaacttttttaagaagtggtgttgtaccaagccagatcggagttatcacaccttatgaagggcaaagggcatacattgtaaattacatgtcaaggaatggctctcttcgccaacaactttacaaggaaatcgaggtcgctagtgtagactcatttcagggtagagagaaagactacattattctatcttgtgttagaagcaatgagcaccagggaattgggtttctcaatgacccgcgcaggttaaacgttgcgttaactcgtgcacgttatggcatagttattcttggtaatccaaaagtactaagcaagcagccactttggaatagcttgttgacacattacaaggagcatgagtgcttggtagaaggacctctgaacaacttaaagcagagcatggtgcagtttcagaagcccaaaaagatatataatgatcggagattgttactgggcggtgctcaaggcatgcatggagctaacttcggggctggggcctcaagccaagcagcagataagagaagtggcagggggaaagcagggcaatcatttgtttcttatggccctccaaatggggtgcacaagcctggtgtgcacccagcaggttatgctgtacctcgtatgccttttcctccatttcctggggctccacattctcaaccatatgcaattccgactcggggtttgcatgggcccattggagctgttccaccggtgcatcaacctggaagtagaagttttggggcacctcgttcaaatactggtgggcctattggtggccaccttgctcatcaacagaattcccagcaagctatgggtggcattgggtcaaattttaactacgctggcatggagaattcgagtagtcagccttctggtgtagcccaaatgtcccaatcgggattaatgacacaggacttcattgtagatgattttaagagccaaggatcacatgtgccatacaacattgcagaattttctacccaggcttctcaaggtggttatggtgttgagtttactcaagcgccccaatctggatactctgggaattatatgaaccaaaacacacatcctggatactcccatattggtacaacaaatgacattgtatctcaggatcacatggcccatggatctcacggaatgtttacgcaagtggggtataatgatccgtcgcaagatgagtcatctcagattcattatggaatggctgctgctggtcccctacattcgcagagcatgatgaaccccttatactctcaatcctatgctcactacaacacccagccacattctcttcaacctcctccccagtgataattaaggcttgtgatatggtgaagccacattttggaagtttggtgggttgcatcttttggcccacatgttgtgcccttctctgctatttcagaatcgatggtgcatagacatcagatgcaagcaatgtgaacaagcatatgacacactttgtattggatgtttatcggggcaggcttgtacaagatggctatggctactgaccaacagccagcgccgaggagcacaaggattgcaatgtatcatgttcttgatcgttgtggttcactacccgtttagaccacaagaggggtcatattgtgcatcggaagaggttggcggcactatcctcatccctcacctgtatataaaggcaatctgggcctatagtggtacaatgtgaacatattccaggatttgctgccactcaagtcaagttgcagcaattgcatgcctccatggtgtagagtggctttgtataaaggtgctataggttgggtggccacaacccttttggatatcacacatgacaagatatttacctttacattttgtatgcatctgatatggttttgatatttatgccagagatgatttaggtgatggtaaaattagttagtgacgactggaaatttgggagtgttctgtgaaagtaaatttgaccctgaatcctgcgaggaatggctgatcatgaagtttattgtataatttggatagtccgttcagagatattcatgcataggtgcatcacatatttgttctttatctttctgcaagtggcacttttctgagtggtcaattctgcaatgaaatgtgcgtgtctgaagtttctgttgccatcgtgccagatcggataaacaagtttatcgaggccacagtttttttaggctacaggggattctgatatctgataagcttgctaatcgcatcgcagttgagcttgtatttcgcggcttgtgcgatcatacgggattatttttagatctgtgacattgataggaaattctagggctcgtttgtttcctttgaattgaattctattataataataataactgggaaataaattaattaagttaatatatttgtatatgtaacatatttatatattattctaaattatatgtatgttatagactag

SEQ ID NO: 66690 - DNA, 5014 bp, Zea Mays
ctcaacctcaacaaaccaaaccccggccccacaccttcaccatgctacctctccccttttttttcccgattcgccctgtcttcccaagccctgctttgccgctagcgacaaaaccctaaccctaaccgcggggatggcgacgcagtcgcactcctcctccgctgccgcgatagacatgtatgagacggcctctcagccggacgcctccgttgccggcgacgcctacaccttccttgagttcaacactcagggtgacgaattcgactaccccgactttccggagctttctcaaccgccgccccgatcgacgccgctgacgtcttccatccccggcgctggcgcgtcgtcctcgtcgtggcctgccccgccgccgccgccctccgacgcggcctccgctgaacccgatctcacgtctctggacgtccccaccccgccggcctcctcctcctcgccgtcgccgcggtctgcctccaaggcgcgctcgttggctgcggcagatgggctcgcctccggggtagccgcactcagcttcgaggatcctgttggagccggcgccggagaggacgggtacgactacggcaagggagacttcgtggaacacgcctgccggtactgtgggatccacaatcctgcatgcgtggcgaggtgcaacgtgccctcctgccgcaagtggttctgtaactcgcgggggaacacctctggctcccacattgtcaaccacctggttagggcaaagcataaggaagtgtgccttcacaaggatagccctttgggagaaacaatccttgaatgctacaactgtggctgtcggaatgtatttcttcttgggtttatctcagcaaaattggagaatgttgtcgttcttttatgcagagagccgtgtttaagtgttaatgcactgaaggatatgaattgggatctcagccagtggtgccctcttattgatgacaggtgtttcttgtcatggcttgtaaaggtaccttcagagcaggagcagctaagagctcggcaaattagtgcacagcaaattaacaaagtggaagagctttggaagacaaatcctgatgcatctcttgaagatcttgaaaagcctggcgtagatgatgaacctcagccagttgttttgaagtatgaagatgcttaccagtaccaaaatgtttttgcgccactgataaaacttgaggctgattatgacaagatgacgaaagagtcacagagcaaggataatgtaactgtccggtgggatattgggttgaacaagaagcgtgtagcttactttgtctttccaaaggaagacaatgagttgaggcttgtgcctggagatgagctacgcttgagatatcctggtgatagctcacatcccacatggcaatctgtgggacatgtgattaagctcactgcacaagaggaggtggcacttgagcttcgtgcaagtcagggggtgcctactgagctaaacgttggattcagtgttgatttcgtttggaagagtaccagttttgataggatgcaaggagcaatgaaaacttttgctgtggacgagacaagtgtcagtggatacatataccaccaccttttgggacatgaagttgagcatcaaataatacgtaacaccctaccaagacgctttggtgcacctggacttccagaactaaatgcttcccaggttttagcagttaaaagtgtcctgcagaagccagttagtttgattcaaggtccacctggcactggaaaaactgtcacatctggtgcaattgtgtatcacatggccaaacaaggtcaaggacaggttcttgtatgtgccccaagtaatgttgctgttgatcagctggcagagaagataagctcaaccggtctcaaggttgttaggctgtgtgcaaaatctagagaagctgtttcgtctcctgttgagcatctcacacttcattatcaggttaggcaccttgatacctctgaaaagagtgaatttcacaagttacagcaactgaaagatgaacaaggtgaattgtccagcagtgatgagaagaagtacaaggcactaaagcgtgccactgaaagagagatactgcagagtgctgatgtcatttgttgcacctgtgtcggtgctggagatcctcgtctttcaaacttccgtttccgacaagttcttattgatgagtccacacaggcaacagagcctgaatgtcttattcctttggtgcttggtgtcaagcaggttgtccttgtcggagatcattgccaattgggtcctgtcatcatgtgcaaaaaagcagcccgtgcaggattagcacaatctctctttgaacgccttgttatccttggagtgaagccattcaggctacaggcacactgcaaaatggagtgactgttaatgagaggcattcgtctggaattgattttccttggcctgttccaaatcgcccaatgttcttctatgtgcagatgggacaagaagaaatcagtgctagtgggacatcgtatctcaatagaactgaagctgcaaatgttgaaaaaattgtaacaacttttttaagaagtggtgttgtaccaagccagatcggagttatcacaccttatgaagggcaaagggcatacattgtaaattacatgtcaaggaatggctctcttcgccaacaactttacaaggaaatcgaggtcgctagtgtagactcatttcagggtagagagaaagactacattattctatcttgtgttagaagcaatgagcaccagggaattgggtttctcaatgacccgcgcaggttaaacgttgcgttaactcgtgcacgttatggcatagttattcttggtaatccaaaagtactaagcaagcagccactttggaatagcttgttgacacattacaaggagcatgagtgcttggtagaaggacctctgaacaacttaaagcagagcatggtgcagtttcagaagcccaaaaagatatataatgatcggagattgttactgggcggtgctcaaggcatgcatggagctaacttcggggctggggcctcaagccaagcagcagataagagaagtggcagggggaaagggcaatcatttgtttcttatggccctccaaatggggtgcacaagcctggtgtgcacccagcaggttatgctgtacctcgtatgccttttcctccatttcctggggctccacattctcaaccatatgcaattccgactcggggtttgcatgggcccattggagctgttccaccggtgcatcaacctggaagtagaagttttggggcacctcgttcaaatactggtgggcctattggtggccaccttgctcatcaacagaattcccagcaagctatgggtggcattgggtcaaattttaactacgctggcatggagaattcgagtagtcagccttctggtgtagcccaaatgtcccaatcgggattaatgacacagatgcctgttcaaggactaagtcaaacattccgtgatggtttttccattggtgggatgtctcaggacttcattgtagatgattttaagagccaaggatcacatgtgccatacaacattgcagaattttctacccaggcttctcaaggtggttatggtgttgagtttactcaagcgccccaatctggatactctgggaattatatgaaccaaaacacacatcctggatactcccatattggtacaacaaatgacattgtatctcaggatcacatggcccatggatctcacggaatgtttacgcaagtggggtataatgatccgtcgcaagatgagtcatctcagattcattatggaatggctgctgctggtcccctacattcgcagagcatgatgaaccccttatactctcaatcctatgctcactacaacacccagccacattctcttcaacctcctccccagtgataattaaggcttgtgatatggtgaagccacattttggaagtttggtgggttgcatcttttggcccacatgttgtgcccttctctgctatttcagaatcgatggtgcatagacatcagatgcaagcaatgtgaacaagcatatgacacactttgtattggatgtttatcggggcaggcttgtacaagatggctatggctactgaccaacagccagcgccgaggagcacaaggattgcaatgtatcatgttcttgatcgttgtggttcactacccgtttagaccacaagaggggtcatattgtgcatcggaagaggttggcggcactatcctcatccctcacctgtatataaaggcaatctgggcctatagtggtacaatgtgaacatattccaggatttgctgccactcaagtcaagttgcagcaattgcatgcctccatggtgtagagtggctttgtataaaggtgctataggttgggtggccacaacccttttggatatcacacatgacaagatatttacctttacattttgtatgcatctgatatggttttgatatttatgccagagatgatttaggtgatggtaaaattagttagtgacgactggaaatttgggagtgttctgtgaaagtaaatttgaccctgaatcctgcgaggaatggctgatcatgaagtttattgtataatttggatagtccgttcagagatattcatgcataggtgcatcacatatttgttctttatctttctgcaagtggcacttttctgagtggtcaattctgcaatgaaatgtgcgtgtctgaagtttctgttgccatcgtgccagatcggataaacaagtttatcgaggccacagtttttttaggctacaggggattctgatatctgataagcttgctaatcgcatcgcagttgagcttgtatttcgcggcttgtgcgatcatacgggattatttttagatctgtgacattgataggaaattctagggctcgtttgtttcctttgaattgaattctattataataataataactgggaaataaattaattaagttaatatatttgtatatgtaacatatttatatattattctaaattatatgtatgttatagactag

SEQ ID NO: 66691 - DNA, 5062 bp, Zea Mays
ctcaacctcaacaaaccaaaccccggccccacaccttcaccatgctacctctccccttttttttcccgattcgccctgtcttcccaagccctgctttgccgctagcgacaaaaccctaaccctaaccgcggggatggcgacgcagtcgcactcctcctccgctgccgcgatagacatgtatgagacggcctctcagccggacgcctccgttgccggcgacgcctacaccttccttgagttcaacactcagggtgacgaattcgactaccccgactttccggagctttctcaaccgccgccccgatcgacgccgctgacgtcttccatccccggcgctggcgcgtcgtcctcgtcgtggcctgccccgccgccgccgccctccgacgcggcctccgctgaacccgatctcacgtctctggacgtccccaccccgccggcctcctcctcctcgccgtcgccgcggtctgcctccaaggcgcgctcgttggctgcggcagatgggctcgcctccggggtagccgcactcagcttcgaggatcctgttggagccggcgccggagaggacgggtacgactacggcaagggagacttcgtggaacacgcctgccggtactgtgggatccacaatcctgcatgcgtggcgaggtgcaacgtgccctcctgccgcaagtggttctgtaactcgcgggggaacacctctggctcccacattgtcaaccacctggttagggcaaagcataaggaagtgtgccttcacaaggatagccctttgggagaaacaatccttgaatgctacaactgtggctgtcggaatgtatttcttcttgggtttatctcagcaaaattggagaatgttgtcgttcttttatgcagagagccgtgtttaagtgttaatgcactgaaggatatgaattgggatctcagccagtggtgccctcttattgatgacaggtgtttcttgtcatggcttgtaaaggtaccttcagagcaggagcagctaagagctcggcaaattagtgcacagcaaattaacaaagtggaagagctttggaagacaaatcctgatgcatctcttgaagatcttgaaaagcctggcgtagatgatgaacctcagccagttgttttgaagtatgaagatgcttaccagtaccaaaatgtttttgcgccactgataaaacttgaggctgattatgacaagatgacgaaagagtcacagagcaaggataatgtaactgtccggtgggatattgggttgaacaagaagcgtgtagcttactttgtctttccaaaggaagacaatgagttgaggcttgtgcctggagatgagctacgcttgagatatcctggtgatagctcacatcccacatggcaatctgtgggacatgtgattaagctcactgcacaagaggaggtggcacttgagcttcgtgcaagtcagggggtgcctactgagctaaacgttggattcagtgttgatttcgtttggaagagtaccagttttgataggatgcaaggagcaatgaaaacttttgctgtggacgagacaagtgtcagtggatacatataccaccaccttttgggacatgaagttgagcatcaaataatacgtaacaccctaccaagacgctttggtgcacctggacttccagaactaaatgcttcccaggttttagcagttaaaagtgtcctgcagaagccagttagtttgattcaaggtccacctggcactggaaaaactgtcacatctggtgcaattgtgtatcacatggccaaacaaggtcaaggacaggttcttgtatgtgccccaagtaatgttgctgttgatcagctggcagagaagataagctcaaccggtctcaaggttgttaggctgtgtgcaaaatctagagaagctgtttcgtctcctgttgagcatctcacacttcattatcaggttaggcaccttgatacctctgaaaagagtgaatttcacaagttacagcaactgaaagatgaacaaggtgaattgtccagcagtgatgagaagaagtacaaggcactaaagcgtgccactgaaagagagatactgcagagtgctgatgtcatttgttgcacctgtgtcggtgctggagatcctcgtctttcaaacttccgtttccgacaagttcttattgatgagtccacacaggcaacagagcctgaatgtcttattcctttggtgcttggtgtcaagcaggttgtccttgtcggagatcattgccaattgggtcctgtcatcatgtgcaaaaaagcagcccgtgcaggattagcacaatctctctttgaacgccttgttatccttggagtgaagccattcaggctacaggtccagtatagaatgcatccatgcctctcagagtttccatccaactgcttttatgaaggcacactgcaaaatggagtgactgttaatgagaggcattcgtctggaattgattttccttggcctgttccaaatcgcccaatgttcttctatgtgcagatgggacaagaagaaatcagtgctagtgggacatcgtatctcaatagaactgaagctgcaaatgttgaaaaaattgtaacaacttttttaagaagtggtgttgtaccaagccagatcggagttatcacaccttatgaagggcaaagggcatacattgtaaattacatgtcaaggaatggctctcttcgccaacaactttacaaggaaatcgaggtcgctagtgtagactcatttcagggtagagagaaagactacattattctatcttgtgttagaagcaatgagcaccagggaattgggtttctcaatgacccgcgcaggttaaacgttgcgttaactcgtgcacgttatggcatagttattcttggtaatccaaaagtactaagcaagcagccactttggaatagcttgttgacacattacaaggagcatgagtgcttggtagaaggacctctgaacaacttaaagcagagcatggtgcagtttcagaagcccaaaaagatatataatgatcggagattgttactgggcggtgctcaaggcatgcatggagctaacttcggggctggggcctcaagccaagcagcagataagagaagtggcagggggaaagcagggcaatcatttgtttcttatggccctccaaatggggtgcacaagcctggtgtgcacccagcaggttatgctgtacctcgtatgccttttcctccatttcctggggctccacattctcaaccatatgcaattccgactcggggtttgcatgggcccattggagctgttccaccggtgcatcaacctggaagtagaagttttggggcacctcgttcaaatactggtgggcctattggtggccaccttgctcatcaacagaattcccagcaagctatgggtggcattgggtcaaattttaactacgctggcatggagaattcgagtagtcagccttctggtgtagcccaaatgtcccaatcgggattaatgacacagatgcctgttcaaggactaagtcaaacattccgtgatggtttttccattggtgggatgtctcagatgattttaagagccaaggatcacatgtgccatacaacattgcagaattttctacccaggcttctcaaggtggttatggtgttgagtttactcaagcgccccaatctggatactctgggaattatatgaaccaaaacacacatcctggatactcccatattggtacaacaaatgacattgtatctcaggatcacatggcccatggatctcacggaatgtttacgcaagtggggtataatgatccgtcgcaagatgagtcatctcagattcattatggaatggctgctgctggtcccctacattcgcagagcatgatgaaccccttatactctcaatcctatgctcactacaacacccagccacattctcttcaacctcctccccagtgataattaaggcttgtgatatggtgaagccacattttggaagtttggtgggttgcatcttttggcccacatgttgtgcccttctctgctatttcagaatcgatggtgcatagacatcagatgcaagcaatgtgaacaagcatatgacacactttgtattggatgtttatcggggcaggcttgtacaagatggctatggctactgaccaacagccagcgccgaggagcacaaggattgcaatgtatcatgttcttgatcgttgtggttcactacccgtttagaccacaagaggggtcatattgtgcatcggaagaggttggcggcactatcctcatccctcacctgtatataaaggcaatctgggcctatagtggtacaatgtgaacatattccaggatttgctgccactcaagtcaagttgcagcaattgcatgcctccatggtgtagagtggctttgtataaaggtgctataggttgggtggccacaacccttttggatatcacacatgacaagatatttacctttacattttgtatgcatctgatatggttttgatatttatgccagagatgatttaggtgatggtaaaattagttagtgacgactggaaatttgggagtgttctgtgaaagtaaatttgaccctgaatcctgcgaggaatggctgatcatgaagtttattgtataatttggatagtccgttcagagatattcatgcataggtgcatcacatatttgttctttatctttctgcaagtggcacttttctgagtggtcaattctgcaatgaaatgtgcgtgtctgaagtttctgttgccatcgtgccagatcggataaacaagtttatcgaggccacagtttttttaggctacaggggattctgatatctgataagcttgctaatcgcatcgcagttgagcttgtatttcgcggcttgtgcgatcatacgggattatttttagatctgtgacattgataggaaattctagggctcgtttgtttcctttgaattgaattctattataataataataactgggaaataaattaattaagttaatatatttgtatatgtaacatatttatatattattctaaattatatgtatgttatagactag

SEQ ID NO: 66692 - DNA, 4928 bp, Zea Mays
caaaccccggccccacaccttcaccatgctacctctccccttttttttcccgattcgccctgtcttcccaagccctgctttgccgctagcgacaaaaccctaaccctaaccgcggggatggcgacgcagtcgcactcctcctccgctgccgcgatagacatgtatgagacggcctctcagccggacgcctccgttgccggcgacgcctacaccttccttgagttcaacactcagggtgacgaattcgactaccccgactttccggagctttctcaaccgccgccccgatcgacgccgctgacgtcttccatccccggcgctggcgcgtcgtcctcgtcgtggcctgccccgccgccgccgccctccgacgcggcctccgctgaacccgatctcacgtctctggacgtccccaccccgccggcctcctcctcctcgccgtcgccgcggtctgcctccaaggcgcgctcgttggctgcggcagatgggctcgcctccggggtagccgcactcagcttcgaggatcctgttggagccggcgccggagaggacgggtacgactacggcaagggagacttcgtggaacacgcctgccggtactgtgggatccacaatcctgcatgcgtggcgaggtgcaacgtgccctcctgccgcaagtggttctgtaactcgcgggggaacacctctggctcccacattgtcaaccacctggttagggcaaagcataaggaagtgtgccttcacaaggatagccctttgggagaaacaatccttgaatgctacaactgtggctgtcggaatgtatttcttcttgggtttatctcagcaaaattggagaatgttgtcgttcttttatgcagagagccgtgtttaagtgttaatgcactgaaggatatgaattgggatctcagccagtggtgccctcttattgatgacaggtaccttcagagcaggagcagctaagagctcggcaaattagtgcacagcaaattaacaaagtggaagagctttggaagacaaatcctgatgcatctcttgaagatcttgaaaagcctggcgtagatgatgaacctcagccagttgttttgaagtatgaagatgcttaccagtaccaaaatgtttttgcgccactgataaaacttgaggctgattatgacaagatgacgaaagagtcacagagcaaggataatgtaactgtccggtgggatattgggttgaacaagaagcgtgtagcttactttgtctttccaaaggaagacaatgagttgaggcttgtgcctggagatgagctacgcttgagatatcctggtgatagctcacatcccacatggcaatctgtgggacatgtgattaagctcactgcacaagaggaggtggcacttgagcttcgtgcaagtcagggggtgcctactgagctaaacgttggattcagtgttgatttcgtttggaagagtaccagttttgataggatgcaaggagcaatgaaaacttttgctgtggacgagacaagtgtcagtggatacatataccaccaccttttgggacatgaagttgagcatcaaataatacgtaacaccctaccaagacgctttggtgcacctggacttccagaactaaatgcttcccaggttttagcagttaaaagtgtcctgcagaagccagttagtttgattcaaggtccacctggcactggaaaaactgtcacatctggtgcaattgtgtatcacatggccaaacaaggtcaaggacaggttcttgtatgtgccccaagtaatgttgctgttgatcagctggcagagaagataagctcaaccggtctcaaggttgttaggctgtgtgcaaaatctagagaagctgtttcgtctcctgttgagcatctcacacttcattatcaggttaggcaccttgatacctctgaaaagagtgaatttcacaagttacagcaactgaaagatgaacaaggtgaattgtccagcagtgatgagaagaagtacaaggcactaaagcgtgccactgaaagagagatactgcagagtgctgatgtcatttgttgcacctgtgtcggtgctggagatcctcgtctttcaaacttccgtttccgacaagttcttattgatgagtccacacaggcaacagagcctgaatgtcttattcctttggtgcttggtgtcaagcaggttgtccttgtcggagatcattgccaattgggtcctgtcatcatgtgcaaaaaagcagcccgtgcaggattagcacaatctctctttgaacgccttgttatccttggagtgaagccattcaggctacaggtccagtatagaatgcatccatgcctctcagagtttccatccaactgcttttatgaaggcacactgcaaaatggagtgactgttaatgagaggcattcgtctggaattgattttccttggcctgttccaaatcgcccaatgttcttctatgtgcagatgggacaagaagaaatcagtgctagtgggacatcgtatctcaatagaactgaagctgcaaatgttgaaaaaattgtaacaacttttttaagaagtggtgttgtaccaagccagatcggagttatcacaccttatgaagggcaaagggcatacattgtaaattacatgtcaaggaatggctctcttcgccaacaactttacaaggaaatcgaggtcgctagtgtagactcatttcagggtagagagaaagactacattattctatcttgtgttagaagcaatgagcaccagggaattgggtttctcaatgacccgcgcaggttaaacgttgcgttaactcgtgcacgttatggcatagttattcttggtaatccaaaagtactaagcaagcagccactttggaatagcttgttgacacattacaaggagcatgagtgcttggtagaaggacctctgaacaacttaaagcagagcatggtgcagtttcagaagcccaaaaaggcatgcatggagctaacttcggggctggggcctcaagccaagcagcagataagagaagtggcagggggaaagggcaatcatttgtttcttatggccctccaaatggggtgcacaagcctggtgtgcacccagcaggttatgctgtacctcgtatgccttttcctccatttcctggggctccacattctcaaccatatgcaattccgactcggggtttgcatgggcccattggagctgttccaccggtgcatcaacctggaagtagaagttttggggcacctcgttcaaatactggtgggcctattggtggccaccttgctcatcaacagaattcccagcaagctatgggtggcattgggtcaaattttaactacgctggcatggagaattcgagtagtcagccttctggtgtagcccaaatgtcccaatcgggattaatgacacaggacttcattgtagatgattttaagagccaaggatcacatgtgccatacaacattgcagaattttctacccaggcttctcaaggtggttatggtgttgagtttactcaagcgccccaatctggatactctgggaattatatgaaccaaaacacacatcctggatactcccatattggtacaacaaatgacattgtatctcaggatcacatggcccatggatctcacggaatgtttacgcaagtggggtataatgatccgtcgcaagatgagtcatctcagattcattatggaatggctgctgctggtcccctacattcgcagagcatgatgaaccccttatactctcaatcctatgctcactacaacacccagccacattctcttcaacctcctccccagtgataattaaggcttgtgatatggtgaagccacattttggaagtttggtgggttgcatcttttggcccacatgttgtgcccttctctgctatttcagaatcgatggtgcatagacatcagatgcaagcaatgtgaacaagcatatgacacactttgtattggatgtttatcggggcaggcttgtacaagatggctatggctactgaccaacagccagcgccgaggagcacaaggattgcaatgtatcatgttcttgatcgttgtggttcactacccgtttagaccacaagaggggtcatattgtgcatcggaagaggttggcggcactatcctcatccctcacctgtatataaaggcaatctgggcctatagtggtacaatgtgaacatattccaggatttgctgccactcaagtcaagttgcagcaattgcatgcctccatggtgtagagtggctttgtataaaggtgctataggttgggtggccacaacccttttggatatcacacatgacaagatatttacctttacattttgtatgcatctgatatggttttgatatttatgccagagatgatttaggtgatggtaaaattagttagtgacgactggaaatttgggagtgttctgtgaaagtaaatttgaccctgaatcctgcgaggaatggctgatcatgaagtttattgtataatttggatagtccgttcagagatattcatgcataggtgcatcacatatttgttctttatctttctgcaagtggcacttttctgagtggtcaattctgcaatgaaatgtgcgtgtctgaagtttctgttgccatcgtgccagatcggataaacaagtttatcgaggccacagtttttttaggctacaggggattctgatatctgataagcttgctaatcgcatcgcagttgagcttgtatttcgcggcttgtgcgatcatacgggattatttttagatctgtgacattgataggaaattctagggctcgtttgtttcctttgaattgaattctattataataataataactgggaaataaattaattaagttaatatatttgtatatgtaacatatttatatattattctaaattatatgtatgttatagactag

SEQ ID NO: 66693 - DNA, 4922 bp, Zea Mays
cacaccttcaccatgctacctctccccttttttttcccgattcgccctgtcttcccaagccctgctttgccgctagcgacaaaaccctaaccctaaccgcggggatggcgacgcagtcgcactcctcctccgctgccgcgatagacatgtatgagacggcctctcagccggacgcctccgttgccggcgacgcctacaccttccttgagttcaacactcagggtgacgaattcgactaccccgactttccggagctttctcaaccgccgccccgatcgacgccgctgacgtcttccatccccggcgctggcgcgtcgtcctcgtcgtggcctgccccgccgccgccgccctccgacgcggcctccgctgaacccgatctcacgtctctggacgtccccaccccgccggcctcctcctcctcgccgtcgccgcggtctgcctccaaggcgcgctcgttggctgcggcagatgggctcgcctccggggtagccgcactcagcttcgaggatcctgttggagccggcgccggagaggacgggtacgactacggcaagggagacttcgtggaacacgcctgccggtactgtgggatccacaatcctgcatgcgtggcgaggtgcaacgtgccctcctgccgcaagtggttctgtaactcgcgggggaacacctctggctcccacattgtcaaccacctggttagggcaaagcataaggaagtgtgccttcacaaggatagccctttgggagaaacaatccttgaatgctacaactgtggctgtcggaatgtatttcttcttgggtttatctcagcaaaattggagaatgttgtcgttcttttatgcagagagccgtgtttaagtgttaatgcactgaaggatatgaattgggatctcagccagtggtgccctcttattgatgacaggtgtttcttgtcatggcttgtaaaggtaccttcagagcaggagcagctaagagctcggcaaattagtgcacagcaaattaacaaagtggaagagctttggaagacaaatcctgatgcatctcttgaagatcttgaaaagcctggcgtagatgatgaacctcagccagttgttttgaagtatgaagatgcttaccagtaccaaaatgtttttgcgccactgataaaacttgaggctgattatgacaagatgacgaaagagtcacagagcaaggataatgtaactgtccggtgggatattgggttgaacaagaagcgtgtagcttactttgtctttccaaaggaagacaatgagttgaggcttgtgcctggagatgagctacgcttgagatatcctggtgatagctcacatcccacatggcaatctgtgggacatgtgattaagctcactgcacaagaggaggtggcacttgagcttcgtgcaagtcagggggtgcctactgagctaaacgttggattcagtgttgatttcgtttggaagagtaccagttttgataggatgcaaggagcaatgaaaacttttgctgtggacgagacaagtgtcagtggatacatataccaccaccttttgggacatgaagttgagcatcaaataatacgtaacaccctaccaagacgctttggtgcacctggacttccagaactaaatgcttcccaggttttagcagttaaaagtgtcctgcagaagccagttagtttgattcaaggtccacctggcactggaaaaactgtcacatctggtgcaattgtgtatcacatggccaaacaaggtcaaggacaggttcttgtatgtgccccaagtaatgttgctgttgatcagctggcagagaagataagctcaaccggtctcaaggttgttaggctgtgtgcaaaatctagagaagctgtttcgtctcctgttgagcatctcacacttcattatcaggttaggcaccttgatacctctgaaaagagtgaatttcacaagttacagcaactgaaagatgaacaaggtgaattgtccagcagtgatgagaagaagtacaaggcactaaagcgtgccactgaaagagagatactgcagagtgctgatgtcatttgttgcacctgtgtcggtgctggagatcctcgtctttcaaacttccgtttccgacaagttcttattgatgagtccacacaggcaacagagcctgaatgtcttattcctttggtgcttggtgtcaagcaggttgtccttgtcggagatcattgccaattgggtcctgtcatcatgtgcaaaaaagcagcccgtgcaggattagcacaatctctctttgaacgccttgttatccttggagtgaagccattcaggctacaggcacactgcaaaatggagtgactgttaatgagaggcattcgtctggaattgattttccttggcctgttccaaatcgcccaatgttcttctatgtgcagatgggacaagaagaaatcagtgctagtgggacatcgtatctcaatagaactgaagctgcaaatgttgaaaaaattgtaacaacttttttaagaagtggtgttgtaccaagccagatcggagttatcacaccttatgaagggcaaagggcatacattgtaaattacatgtcaaggaatggctctcttcgccaacaactttacaaggaaatcgaggtcgctagtgtagactcatttcagggtagagagaaagactacattattctatcttgtgttagaagcaatgagcaccagggaattgggtttctcaatgacccgcgcaggttaaacgttgcgttaactcgtgcacgttatggcatagttattcttggtaatccaaaagtactaagcaagcagccactttggaatagcttgttgacacattacaaggagcatgagtgcttggtagaaggacctctgaacaacttaaagcagagcatggtgcagtttcagaagcccaaaaagatatataatgatcggagattgttactgggcggtgctcaaggcatgcatggagctaacttcggggctggggcctcaagccaagcagcagataagagaagtggcagggggaaagggcaatcatttgtttcttatggccctccaaatggggtgcacaagcctggtgtgcacccagcaggttatgctgtacctcgtatgccttttcctccatttcctggggctccacattctcaaccatatgcaattccgactcggggtttgcatgggcccattggagctgttccaccggtgcatcaacctggaagtagaagttttggggcacctcgttcaaatactggtgggcctattggtggccaccttgctcatcaacagaattcccagcaagctatgggtggcattgggtcaaattttaactacgctggcatggagaattcgagtagtcagccttctggtgtagcccaaatgtcccaatcgggattaatgacacaggacttcattgtagatgattttaagagccaaggatcacatgtgccatacaacattgcagaattttctacccaggcttctcaaggtggttatggtgttgagtttactcaagcgccccaatctggatactctgggaattatatgaaccaaaacacacatcctggatactcccatattggtacaacaaatgacattgtatctcaggatcacatggcccatggatctcacggaatgtttacgcaagtggggtataatgatccgtcgcaagatgagtcatctcagattcattatggaatggctgctgctggtcccctacattcgcagagcatgatgaaccccttatactctcaatcctatgctcactacaacacccagccacattctcttcaacctcctccccagtgataattaaggcttgtgatatggtgaagccacattttggaagtttggtgggttgcatcttttggcccacatgttgtgcccttctctgctatttcagaatcgatggtgcatagacatcagatgcaagcaatgtgaacaagcatatgacacactttgtattggatgtttatcggggcaggcttgtacaagatggctatggctactgaccaacagccagcgccgaggagcacaaggattgcaatgtatcatgttcttgatcgttgtggttcactacccgtttagaccacaagaggggtcatattgtgcatcggaagaggttggcggcactatcctcatccctcacctgtatataaaggcaatctgggcctatagtggtacaatgtgaacatattccaggatttgctgccactcaagtcaagttgcagcaattgcatgcctccatggtgtagagtggctttgtataaaggtgctataggttgggtggccacaacccttttggatatcacacatgacaagatatttacctttacattttgtatgcatctgatatggttttgatatttatgccagagatgatttaggtgatggtaaaattagttagtgacgactggaaatttgggagtgttctgtgaaagtaaatttgaccctgaatcctgcgaggaatggctgatcatgaagtttattgtataatttggatagtccgttcagagatattcatgcataggtgcatcacatatttgttctttatctttctgcaagtggcacttttctgagtggtcaattctgcaatgaaatgtgcgtgtctgaagtttctgttgccatcgtgccagatcggataaacaagtttatcgaggccacagtttttttaggctacaggggattctgatatctgataagcttgctaatcgcatcgcagttgagcttgtatttcgcggcttgtgcgatcatacgggattatttttagatctgtgacattgataggaaattctagggctcgtttgtttcctttgaattgaattctattataataataataactgggaaataaattaattaagttaatatatttgtatatgtaacatatttatatattattctaaattatatgtatgttatagactag

SEQ ID NO: 66694 - DNA, 4921 bp, Zea Mays
cacaccttcaccatgctacctctccccttttttttcccgattcgccctgtcttcccaagccctgctttgccgctagcgacaaaaccctaaccctaaccgcggggatggcgacgcagtcgcactcctcctccgctgccgcgatagacatgtatgagacggcctctcagccggacgcctccgttgccggcgacgcctacaccttccttgagttcaacactcagggtgacgaattcgactaccccgactttccggagctttctcaaccgccgccccgatcgacgccgctgacgtcttccatccccggcgctggcgcgtcgtcctcgtcgtggcctgccccgccgccgccgccctccgacgcggcctccgctgaacccgatctcacgtctctggacgtccccaccccgccggcctcctcctcctcgccgtcgccgcggtctgcctccaaggcgcgctcgttggctgcggcagatgggctcgcctccggggtagccgcactcagcttcgaggatcctgttggagccggcgccggagaggacgggtacgactacggcaagggagacttcgtggaacacgcctgccggtactgtgggatccacaatcctgcatgcgtggcgaggtgcaacgtgccctcctgccgcaagtggttctgtaactcgcgggggaacacctctggctcccacattgtcaaccacctggttagggcaaagcataaggaagtgtgccttcacaaggatagccctttgggagaaacaatccttgaatgctacaactgtggctgtcggaatgtatttcttcttgggtttatctcagcaaaattggagaatgttgtcgttcttttatgcagagagccgtgtttaagtgttaatgcactgaaggatatgaattgggatctcagccagtggtgccctcttattgatgacaggtgtttcttgtcatggcttgtaaaggtaccttcagagcaggagcagctaagagctcggcaaattagtgcacagcaaattaacaaagtggaagagctttggaagacaaatcctgatgcatctcttgaagatcttgaaaagcctggcgtagatgatgaacctcagccagttgttttgaagtatgaagatgcttaccagtaccaaaatgtttttgcgccactgataaaacttgaggctgattatgacaagatgacgaaagagtcacagagcaaggataatgtaactgtccggtgggatattgggttgaacaagaagcgtgtagcttactttgtctttccaaagacaatgagttgaggcttgtgcctggagatgagctacgcttgagatatcctggtgatagctcacatcccacatggcaatctgtgggacatgtgattaagctcactgcacaagaggaggtggcacttgagcttcgtgcaagtcagggggtgcctactgagctaaacgttggattcagtgttgatttcgtttggaagagtaccagttttgataggatgcaaggagcaatgaaaacttttgctgtggacgagacaagtgtcagtggatacatataccaccaccttttgggacatgaagttgagcatcaaataatacgtaacaccctaccaagacgctttggtgcacctggacttccagaactaaatgcttcccaggttttagcagttaaaagtgtcctgcagaagccagttagtttgattcaaggtccacctggcactggaaaaactgtcacatctggtgcaattgtgtatcacatggccaaacaaggtcaaggacaggttcttgtatgtgccccaagtaatgttgctgttgatcagctggcagagaagataagctcaaccggtctcaaggttgttaggctgtgtgcaaaatctagagaagctgtttcgtctcctgttgagcatctcacacttcattatcaggttaggcaccttgatacctctgaaaagagtgaatttcacaagttacagcaactgaaagatgaacaaggtgaattgtccagcagtgatgagaagaagtacaaggcactaaagcgtgccactgaaagagagatactgcagagtgctgatgtcatttgttgcacctgtgtcggtgctggagatcctcgtctttcaaacttccgtttccgacaagttcttattgatgagtccacacaggcaacagagcctgaatgtcttattcctttggtgcttggtgtcaagcaggttgtccttgtcggagatcattgccaattgggtcctgtcatcatgtgcaaaaaagcagcccgtgcaggattagcacaatctctctttgaacgccttgttatccttggagtgaagccattcaggctacaggcacactgcaaaatggagtgactgttaatgagaggcattcgtctggaattgattttccttggcctgttccaaatcgcccaatgttcttctatgtgcagatgggacaagaagaaatcagtgctagtgggacatcgtatctcaatagaactgaagctgcaaatgttgaaaaaattgtaacaacttttttaagaagtggtgttgtaccaagccagatcggagttatcacaccttatgaagggcaaagggcatacattgtaaattacatgtcaaggaatggctctcttcgccaacaactttacaaggaaatcgaggtcgctagtgtagactcatttcagggtagagagaaagactacattattctatcttgtgttagaagcaatgagcaccagggaattgggtttctcaatgacccgcgcaggttaaacgttgcgttaactcgtgcacgttatggcatagttattcttggtaatccaaaagtactaagcaagcagccactttggaatagcttgttgacacattacaaggagcatgagtgcttggtagaaggacctctgaacaacttaaagcagagcatggtgcagtttcagaagcccaaaaagatatataatgatcggagattgttactgggcggtgctcaaggcatgcatggagctaacttcggggctggggcctcaagccaagcagcagataagagaagtggcagggggaaagcagggcaatcatttgtttcttatggccctccaaatggggtgcacaagcctggtgtgcacccagcaggttatgctgtacctcgtatgccttttcctccatttcctggggctccacattctcaaccatatgcaattccgactcggggtttgcatgggcccattggagctgttccaccggtgcatcaacctggaagtagaagttttggggcacctcgttcaaatactggtgggcctattggtggccaccttgctcatcaacagaattcccagcaagctatgggtggcattgggtcaaattttaactacgctggcatggagaattcgagtagtcagccttctggtgtagcccaaatgtcccaatcgggattaatgacacaggacttcattgtagatgattttaagagccaaggatcacatgtgccatacaacattgcagaattttctacccaggcttctcaaggtggttatggtgttgagtttactcaagcgccccaatctggatactctgggaattatatgaaccaaaacacacatcctggatactcccatattggtacaacaaatgacattgtatctcaggatcacatggcccatggatctcacggaatgtttacgcaagtggggtataatgatccgtcgcaagatgagtcatctcagattcattatggaatggctgctgctggtcccctacattcgcagagcatgatgaaccccttatactctcaatcctatgctcactacaacacccagccacattctcttcaacctcctccccagtgataattaaggcttgtgatatggtgaagccacattttggaagtttggtgggttgcatcttttggcccacatgttgtgcccttctctgctatttcagaatcgatggtgcatagacatcagatgcaagcaatgtgaacaagcatatgacacactttgtattggatgtttatcggggcaggcttgtacaagatggctatggctactgaccaacagccagcgccgaggagcacaaggattgcaatgtatcatgttcttgatcgttgtggttcactacccgtttagaccacaagaggggtcatattgtgcatcggaagaggttggcggcactatcctcatccctcacctgtatataaaggcaatctgggcctatagtggtacaatgtgaacatattccaggatttgctgccactcaagtcaagttgcagcaattgcatgcctccatggtgtagagtggctttgtataaaggtgctataggttgggtggccacaacccttttggatatcacacatgacaagatatttacctttacattttgtatgcatctgatatggttttgatatttatgccagagatgatttaggtgatggtaaaattagttagtgacgactggaaatttgggagtgttctgtgaaagtaaatttgaccctgaatcctgcgaggaatggctgatcatgaagtttattgtataatttggatagtccgttcagagatattcatgcataggtgcatcacatatttgttctttatctttctgcaagtggcacttttctgagtggtcaattctgcaatgaaatgtgcgtgtctgaagtttctgttgccatcgtgccagatcggataaacaagtttatcgaggccacagtttttttaggctacaggggattctgatatctgataagcttgctaatcgcatcgcagttgagcttgtatttcgcggcttgtgcgatcatacgggattatttttagatctgtgacattgataggaaattctagggctcgtttgtttcctttgaattgaattctattataataataataactgggaaataaattaattaagttaatatatttgtatatgtaacatatttatatattattctaaattatatgtatgttatagactag

SEQ ID NO: 66695 - DNA, 4937 bp, Zea Mays
atggcgacgcagtcgcactcctcctccgctgccgcgatagacatgtatgagacggcctctcagccggacgcctccgttgccggcgacgcctacaccttccttgagttcaacactcagggtgacgaattcgactaccccgactttccggagctttctcaaccgccgccccgatcgacgccgctgacgtcttccatccccggcgctggcgcgtcgtcctcgtcgtggcctgccccgccgccgccgccctccgacgcggcctccgctgaacccgatctcacgtctctggacgtccccaccccgccggcctcctcctcctcgccgtcgccgcggtctgcctccaaggcgcgctcgttggctgcggcagatgggctcgcctccggggtagccgcactcagcttcgaggatcctgttggagccggcgccggagaggacgggtacgactacggcaagggagacttcgtggaacacgcctgccggtactgtgggatccacaatcctgcatgcgtggcgaggtgcaacgtgccctcctgccgcaagtggttctgtaactcgcgggggaacacctctggctcccacattgtcaaccacctggttagggcaaagcataaggaagtgtgccttcacaaggatagccctttgggagaaacaatccttgaatgctacaactgtggctgtcggaatgtatttcttcttgggtttatctcagcaaaattggagaatgttgtcgttcttttatgcagagagccgtgtttaagtgttaatgcactgaaggatatgaattgggatctcagccagtggtgccctcttattgatgacaggtgtttcttgtcatggcttgtaaaggtaccttcagagcaggagcagctaagagctcggcaaattagtgcacagcaaattaacaaagtggaagagctttggaagacaaatcctgatgcatctcttgaagatcttgaaaagcctggcgtagatgatgaacctcagccagttgttttgaagtatgaagatgcttaccagtaccaaaatgtttttgcgccactgataaaacttgaggctgattatgacaagatgacgaaagagtcacagagcaaggataatgtaactgtccggtgggatattgggttgaacaagaagcgtgtagcttactttgtctttccaaaggaagacaatgagttgaggcttgtgcctggagatgagctacgcttgagatatcctggtgatagctcacatcccacatggcaatctgtgggacatgtgattaagctcactgcacaagaggaggtggcacttgagcttcgtgcaagtcagggggtgcctactgagctaaacgttggattcagtgttgatttcgtttggaagagtaccagttttgataggatgcaaggagcaatgaaaacttttgctgtggacgagacaagtgtcagtggatacatataccaccaccttttgggacatgaagttgagcatcaaataatacgtaacaccctaccaagacgctttggtgcacctggacttccagaactaaatgcttcccaggttttagcagttaaaagtgtcctgcagaagccagttagtttgattcaaggtccacctggcactggaaaaactgtcacatctggtgcaattgtgtatcacatggccaaacaaggtcaaggacaggttcttgtatgtgccccaagtaatgttgctgttgatcagctggcagagaagataagctcaaccggtctcaaggttgttaggctgtgtgcaaaatctagagaagctgtttcgtctcctgttgagcatctcacacttcattatcaggttaggcaccttgatacctctgaaaagagtgaatttcacaagttacagcaactgaaagatgaacaaggtgaattgtccagcagtgatgagaagaagtacaaggcactaaagcgtgccactgaaagagagatactgcagagtgctgatgtcatttgttgcacctgtgtcggtgctggagatcctcgtctttcaaacttccgtttccgacaagttcttattgatgagtccacacaggcaacagagcctgaatgtcttattcctttggtgcttggtgtcaagcaggttgtccttgtcggagatcattgccaattgggtcctgtcatcatgtgcaaaaaagcagcccgtgcaggattagcacaatctctctttgaacgccttgttatccttggagtgaagccattcaggctacaggtccagtatagaatgcatccatgcctctcagagtttccatccaactgcttttatgaaggcacactgcaaaatggagtgactgttaatgagaggcattcgtctggaattgattttccttggcctgttccaaatcgcccaatgttcttctatgtgcagatgggacaagaagaaatcagtgctagtgggacatcgtatctcaatagaactgaagctgcaaatgttgaaaaaattgtaacaacttttttaagaagtggtgttgtaccaagccagatcggagttatcacaccttatgaagggcaaagggcatacattgtaaattacatgtcaaggaatggctctcttcgccaacaactttacaaggaaatcgaggtcgctagtgtagactcatttcagggtagagagaaagactacattattctatcttgtgttagaagcaatgagcaccagggaattgggtttctcaatgacccgcgcaggttaaacgttgcgttaactcgtgcacgttatggcatagttattcttggtaatccaaaagtactaagcaagcagccactttggaatagcttgttgacacattacaaggagcatgagtgcttggtagaaggacctctgaacaacttaaagcagagcatggtgcagtttcagaagcccaaaaagatataatgatcggagattgttactgggcggtgctcaaggcatgcatggagctaacttcggggctggggcctcaagccaagcagcagataagagaagtggcagggggaaagggcaatcatttgtttcttatggccctccaaatggggtgcacaagcctggtgtgcacccagcaggttatgctgtacctcgtatgccttttcctccatttcctggggctccacattctcaaccatatgcaattccgactcggggtttgcatgggcccattggagctgttccaccggtgcatcaacctggaagtagaagttttggggcacctcgttcaaatactggtgggcctattggtggccaccttgctcatcaacagaattcccagcaagctatgggtggcattgggtcaaattttaactacgctggcatggagaattcgagtagtcagccttctggtgtagcccaaatgtcccaatcgggattaatgacacagatgcctgttcaaggactaagtcaaacattccgtgatggtttttccattggtgggatgtctcaggacttcattgtagatgattttaagagccaaggatcacatgtgccatacaacattgcagaattttctacccaggcttctcaaggtggttatggtgttgagtttactcaagcgccccaatctggatactctgggaattatatgaaccaaaacacacatcctggatactcccatattggtacaacaaatgacattgtatctcaggatcacatggcccatggatctcacggaatgtttacgcaagtggggtataatgatccgtcgcaagatgagtcatctcagattcattatggaatggctgctgctggtcccctacattcgcagagcatgatgaaccccttatactctcaatcctatgctcactacaacacccagccacattctcttcaacctcctccccagtgataattaaggcttgtgatatggtgaagccacattttggaagtttggtgggttgcatcttttggcccacatgttgtgcccttctctgctatttcagaatcgatggtgcatagacatcagatgcaagcaatgtgaacaagcatatgacacactttgtattggatgtttatcggggcaggcttgtacaagatggctatggctactgaccaacagccagcgccgaggagcacaaggattgcaatgtatcatgttcttgatcgttgtggttcactacccgtttagaccacaagaggggtcatattgtgcatcggaagaggttggcggcactatcctcatccctcacctgtatataaaggcaatctgggcctatagtggtacaatgtgaacatattccaggatttgctgccactcaagtcaagttgcagcaattgcatgcctccatggtgtagagtggctttgtataaaggtgctataggttgggtggccacaacccttttggatatcacacatgacaagatatttacctttacattttgtatgcatctgatatggttttgatatttatgccagagatgatttaggtgatggtaaaattagttagtgacgactggaaatttgggagtgttctgtgaaagtaaatttgaccctgaatcctgcgaggaatggctgatcatgaagtttattgtataatttggatagtccgttcagagatattcatgcataggtgcatcacatatttgttctttatctttctgcaagtggcacttttctgagtggtcaattctgcaatgaaatgtgcgtgtctgaagtttctgttgccatcgtgccagatcggataaacaagtttatcgaggccacagtttttttaggctacaggggattctgatatctgataagcttgctaatcgcatcgcagttgagcttgtatttcgcggcttgtgcgatcatacgggattatttttagatctgtgacattgataggaaattctagggctcgtttgtttcctttgaattgaattctattataataataataactgggaaataaattaattaagttaatatatttgtatatgtaacatatttatatattattctaaattatatgtatgttatagactag

SEQ ID NO: 66696 - DNA, 440 bp, Zea Mays
cttgttgcttcagtgcgtggagattgagatctaaaagctgagattgctagtgatttggcccacgcgcggcggcgcggaagctgttccatgttaagctgcagtcgatgctgctcctcccccttctccacctctcagagcggcgaacgcctgcaaaagaaagcaatcaaactatgatttccccatgcacgagagagattcgatgctaagccgcagtggaatgtaacgtcgaggaatgtcacttttccttgcaacctttttagcgtatatctatatctatgtaactgatacgggctgttgttgcaacaacagaccatggtgattatttaaagtaagcctaggatttagacaaccaaattcttttgaaagtatatatgcaacaatatagaaatcctttcttgctgcaaacatgagacacattgatgttggaattgtagaacaag

SEQ ID NO: 66697 - DNA, 826 bp, Zea Mays
agaaaactcccgacgataaaggtaaaaaatcgagactcctcttcaatctccaccaaagagaggataagatcatcaagtggatcccgaactgtcatttacaataactgttgtaaaagtggcaaagtccctcttcctccttagagaggtggacatggtaattgtaccagctacaactggtcagatgggcgttttgccaggccatgttgccacgattgcagagctcaagcctggtgttctctcagtacatgaggggaacgatgtgaccaagtactttgtgagcagtggatttgctttcgtccatgcaaactccattgctgatattgtggctgttgaggctgtccctgtggatcagatcgacccagcttttgttcagaagggtctcgctgaattcactgccaagcttggttcggcctctactgacctggagaaggctgaggctcagatcggtgtcgatgttcacagtgcgctcaatgctgcattgaccggttaattggtgtcatcttaaattgtctgtcttttagattgagtttaactttgcaaatcctaaataaattatagtccatctaaaacatggacatatgtttcttgttacctgaatcctgcatggatttatttttgtactcgtgaatattttaactctggagctcaaaacccggagttgctttctttttccgttgagttgcggccttggatcagatgaaatcgatgttcctccatagctccagtaaattgttaaatattgttaagtctattttaagagaaatataaaccacatttgattactgcatgagatgttttggatcttgtgtcagaattttcagatttt

SEQ ID NO: 66698 - DNA, 738 bp, Zea Mays
aaactcccgacgataaaggtaaaaaatcgagactcctcttcaatctccaccaaagaggtggacatggtaattgtaccagctacaactggtcagatgggcgttttgccaggccatgttgccacgattgcagagctcaagcctggtgttctctcagtacatgaggggaacgatgtgaccaagtactttgtgagcagtggatttgctttcgtccatgcaaactccattgctgatattgtggctgttgaggctgtccctgtggatcagatcgacccagcttttgttcagaagggtctcgctgaattcactgccaagcttggttcggcctctactgacctggagaaggctgaggctcagatcggtgtcgatgttcacagtgcgctcaatgctgcattgaccggttaattggtgtcatcttaaattgtctgtcttttagattgagtttaactttgcaaatcctaaataaattatagtccatctaaaacatggacatatgtttcttgttacctgaatcctgcatggatttatttttgtactcgtgaatattttaactctggagctcaaaacccggagttgctttctttttccgttgagttgcggccttggatcagatgaaatcgatgttcctccatagctccagtaaattgttaaatattgttaagtctattttaagagaaatataaaccacatttgattactgcatgagatgttttggatcttgtgtcagaattttcagatttt

SEQ ID NO: 66699 - DNA, 2404 bp, Zea Mays
atttcaagtcgcaaagcgcgacgtccgacgagagagagcggcctcagaacaggagcgaagggatccgccagagtccccctgagtccaaccaagctcggtccggcccagtcccaggcccaggcccaggcccgagcggtagcctgtaggtcgccggcgatgccgttcctgtcgacgccgtcgttcgacctatccgccggcgcagagccaaccctgggcccgcgctcagcggccccgccgcctccacccacggcggccgcgcatcatcagccgccggtgtccgaggcggcggcccggcggcttcgggaggcggaggagcggctgcgggaagccatcgaggagctacaccggcaccagggcggtggcgttaagggagatggggacgagcagcgggagggagagcgggggtgcggtcacgacggggagtcatgcgcggcgcacgccgcggggaacctgtgccagagcttcctgctttcgtacggtgtccgcgtcggcatcggcatcctcctccgcgccttcaagctcgtgcgccgcaggtcctatggctcgctcctcgaccttaagggcgtgatggagcagaatattagcaggttcggtggcaggattggccatactagcactggatgattcaagtaggaggcgtactctatctttatatcttctagcaaggctcgctcagtgtgcatataattctgcaaaatctaagaacaaatttcatttttggggaagccattggagacatggagatgcattgcttttttcattagcatgtgcccaggttatgtatgcttttgttatgaggcctgaaagcttacctaagtcgtaccaagaatttatccttaagacaggaccagtagcagaacctgtctacaaggttgtcaaagaatgctgcagaggtggtcctgtggatctaactgccctctcagcccatttatcaaacaagaggaatccggatttgataaatttaacaacaaatccatccattatcccatgttctgtgatccaccctgacagagcatcatgcttggctcaaaatgttaatgttgtttcatcaacattcaagaagacattccctctatatttctcattgacatttgtgccctttgttgtcctacgtcttcaaaagttcttggaatcgccaacgacaacttgttggcgtgctcttgtgggtgcagttcgctccaccacctttttgtctgccttcgtcactgtattccaggctgctatatgtttgcaccgaaaagttgcgaacaaagaccacaaacttgtgtattggtttgctggtttgatgtcgggtctttcaattcttttggaaaagaaagctagaagggctgagctagccctctatgtgcttccacgtgctggagattccctatggtatatattgatcaaccgccacctgctcccaaatattaaaaatgctgaggtggctcttttctgcatgtgcatgggaggaatcatgtattttctggagtacgagccagacacaatggctccattcctcagagggctcatcaggcgcttcctggcaagcaagatcagcaatccaagccccccgcctcccaatcggaatgcctcctactcgtaccttcagacgctgaatgctctggatcaatcaagaacccaaccaggggtggataacggactgacgacatcggagaaatacaacctcgaatcaattcctggactttagagacctcatctgtggtattagtaaattgggtcttgtagcttgggaagatcacgaaaactcgaacacccattacatgtgccatcctgtgatgggtttatactctgttatacgtgtttgtcttgagtgcaaaataaatggataagcagagatggtttgtgcgggagtatggactgatacgaagcaatttgctcgttcttgtacatgcccaagtccacaaggtcaggatttgaatcggtcaccaggggcacgaaggtatttttttcgttgcatcacaacgtcgaagacatgatcctgaattcctgacaaaccgaaaggtcgccccgagcagcctcgcaagggtgtgccgaagctcttgcaatttcgtttttatccctttttaattttgttgtgattttacctctgttctacaaacgaagctcagtcgtattcttgtgttgttacagttgacaatgttaaatctgatatgaaaaaacaaaaatttgcacacaatttattactattttactcgtcattgtattacgtatttgcgattttactcccgtaggatgcaccgtacagaataggagggtcgtttggatctttcgcatattatattttcatatttttatttttctaatcactaattatgatttttcacttttaaaatggatgcataaaatcataaagtagcttcgcttttaaaatggatgcataaaatcataaagttaaaaacag

SEQ ID NO: 66700 - DNA, 2544 bp, Zea Mays
atttcaagtcgcaaagcgcgacgtccgacgagagagagcggcctcagaacaggagcgaagggatccgccagagtccccctgagtccaaccaagctcggtccggcccagtcccaggcccaggcccaggcccgagcggtagcctgtaggtcgccggcgatgccgttcctgtcgacgccgtcgttcgacctatccgccggcgcagagccaaccctgggcccgcgctcagcggccccgccgcctccacccacggcggccgcgcatcatcagccgccggtgtccgaggcggcggcccggcggcttcgggaggcggaggagcggctgcgggaagccatcgaggagctacaccggcaccagggcggtggcgttaagggagatggggacgagcagcgggagggagagcgggggtgcggtcacgacggggagtcatgcgcggcgcacgccgcggggaacctgtgccagagcttcctgctttcgtacggtgtccgcgtcggcatcggcatcctcctccgcgccttcaagctcgtgcgccgcaggtcctatggctcgctcctcgaccttaagcaactggtttcggagaaagatcttatagtaagagaggaagcttgccgggtagggttgctttttggcggattcactggatcatatcatgcacttcgatgtttccttaggagatttaggaaaaaggagacaccattcaatgcggcgtgatggagcagaatattagcaggttcggtggcaggattggccatactagcactggatgattcaagtaggaggcgtactctatctttatatcttctagcaaggctcgctcagtgtgcatataattctgcaaaatctaagaacaaatttcatttttggggaagccattggagacatggagatgcattgcttttttcattagcatgtgcccaggttatgtatgcttttgttatgaggcctgaaagcttacctaagtcgtaccaagaatttatccttaagacaggaccagtagcagaacctgtctacaaggttgtcaaagaatgctgcagaggtggtcctgtggatctaactgccctctcagcccatttatcaaacaagaggaatccggatttgataaatttaacaacaaatccatccattatcccatgttctgtgatccaccctgacagagcatcatgcttggctcaaaatgttaatgttgtttcatcaacattcaagaagacattccctctatatttctcattgacatttgtgccctttgttgtcctacgtcttcaaaagttcttggaatcgccaacgacaacttgttggcgtgctcttgtgggtgcagttcgctccaccacctttttgtctgccttcgtcactgtattccaggctgctatatgtttgcaccgaaaagttgcgaacaaagaccacaaacttgtgtattggtttgctggtttgatgtcgggtctttcaattcttttggaaaagaaagctagaagggctgagctagccctctatgtgcttccacgtgctggagattccctatggtatatattgatcaaccgccacctgctcccaaatattaaaaatgctgaggtggctcttttctgcatgtgcatgggaggaatcatgtattttctggagtacgagccagacacaatggctccattcctcagagggctcatcaggcgcttcctggcaagcaagatcagcaatccaagccccccgcctcccaatcggaatgcctcctactcgtaccttcagacgctgaatgctctggatcaatcaagaacccaaccaggggtggataacggactgacgacatcggagaaatacaacctcgaatcaattcctggactttagagacctcatctgtggtattagtaaattgggtcttgtagcttgggaagatcacgaaaactcgaacacccattacatgtgccatcctgtgatgggtttatactctgttatacgtgtttgtcttgagtgcaaaataaatggataagcagagatggtttgtgcgggagtatggactgatacgaagcaatttgctcgttcttgtacatgcccaagtccacaaggtcaggatttgaatcggtcaccaggggcacgaaggtatttttttcgttgcatcacaacgtcgaagacatgatcctgaattcctgacaaaccgaaaggtcgccccgagcagcctcgcaagggtgtgccgaagctcttgcaatttcgtttttatccctttttaattttgttgtgattttacctctgttctacaaacgaagctcagtcgtattcttgtgttgttacagttgacaatgttaaatctgatatgaaaaaacaaaaatttgcacacaatttattactattttactcgtcattgtattacgtatttgcgattttactcccgtaggatgcaccgtacagaataggagggtcgtttggatctttcgcatattatattttcatatttttatttttctaatcactaattatgatttttcacttttaaaatggatgcataaaatcataaagtagcttcgcttttaaaatggatgcataaaatcataaagttaaaaacag

SEQ ID NO: 66701 - DNA, 2452 bp, Zea Mays
atttcaagtcgcaaagcgcgacgtccgacgagagagagcggcctcagaacaggagcgaagggatccgccagagtccccctgagtccaaccaagctcggtccggcccagtcccaggcccaggcccaggcccgagcggtagcctgtaggtcgccggcgatgccgttcctgtcgacgccgtcgttcgacctatccgccggcgcagagccaaccctgggcccgcgctcagcggccccgccgcctccacccacggcggccgcgcatcatcagccgccggtgtccgaggcggcggcccggcggcttcgggaggcggaggagcggctgcgggaagccatcgaggagctacaccggcaccagggcggtggcgttaagggagatggggacgagcagcgggagggagagcgggggtgcggtcacgacggggagtcatgcgcggcgcacgccgcggggaacctgtgccagagcttcctgctttcgtacggtgtccgcgtcggcatcggcatcctcctccgcgccttcaagctcgtgcgccgcaggtcctatggctcgctcctcgaccttaagcaactggtttcggagaaagatcttatagtaagagaggaagcttgccgggtagggttgctttttggcggattcactggatcatatcatgcacttcgatgtttccttaggagatttaggaaaaaggagacaccattcaatgcaatattagcaggttcggtggcaggattggccatactagcactggatgattcaagtaggaggcgtactctatctttatatcttctagcaaggctcgctcagtgtgcatataattctgcaaaatctaagaacaaatttcatttttggggaagccattggagacatggagatgcattgcttttttcattagcatgtgcccaggttatgtatgcttttgttatgaggcctgaaagcttacctaagtcgtaccaagaatttatccttaagacaggaccagtagcagaacctgtctacaaggttgtcaaagaatgctgcagaggtggtcctgtggatctaactgccctctcagcccatttatcaaacaagaggaatccggatttgataaatttaacaacaaatccatccattatcccatgttctgtgatccaccctgacagagcatcatgcttggctcaaaatgttaatgttgtttcatcaacattcaagaagacattccctctatatttctcattgacatttgtgccctttgttgtcctacgtcttcaaaagttcttggaatcgccaacgacaacttgttggcgtgctcttgtgggtgcagttcgctccaccacctttttgtctgccttcgtcactgtattccaggctgctatatgtttgcaccgaaaagttgcgaacaaagaccacaaacttgtgtattggtttgctggtttgatgtcgggtctttcaattcttttggaaaagaaagctagaagggctgagctagccctctatgtgcttccacgtgctggagattccctatggaatcatgtattttctggagtacgagccagacacaatggctccattcctcagagggctcatcaggcgcttcctggcaagcaagatcagcaatccaagccccccgcctcccaatcggaatgcctcctactcgtaccttcagacgctgaatgctctggatcaatcaagaacccaaccaggggtggataacggactgacgacatcggagaaatacaacctcgaatcaattcctggactttagagacctcatctgtggtattagtaaattgggtcttgtagcttgggaagatcacgaaaactcgaacacccattacatgtgccatcctgtgatgggtttatactctgttatacgtgtttgtcttgagtgcaaaataaatggataagcagagatggtttgtgcgggagtatggactgatacgaagcaatttgctcgttcttgtacatgcccaagtccacaaggtcaggatttgaatcggtcaccaggggcacgaaggtatttttttcgttgcatcacaacgtcgaagacatgatcctgaattcctgacaaaccgaaaggtcgccccgagcagcctcgcaagggtgtgccgaagctcttgcaatttcgtttttatccctttttaattttgttgtgattttacctctgttctacaaacgaagctcagtcgtattcttgtgttgttacagttgacaatgttaaatctgatatgaaaaaacaaaaatttgcacacaatttattactattttactcgtcattgtattacgtatttgcgattttactcccgtaggatgcaccgtacagaataggagggtcgtttggatctttcgcatattatattttcatatttttatttttctaatcactaattatgatttttcacttttaaaatggatgcataaaatcataaagtagcttcgcttttaaaatggatgcataaaatcataaagttaaaaacag

SEQ ID NO: 66702 - DNA, 2518 bp, Zea Mays
atttcaagtcgcaaagcgcgacgtccgacgagagagagcggcctcagaacaggagcgaagggatccgccagagtccccctgagtccaaccaagctcggtccggcccagtcccaggcccaggcccaggcccgagcggtagcctgtaggtcgccggcgatgccgttcctgtcgacgccgtcgttcgacctatccgccggcgcagagccaaccctgggcccgcgctcagcggccccgccgcctccacccacggcggccgcgcatcatcagccgccggtgtccgaggcggcggcccggcggcttcgggaggcggaggagcggctgcgggaagccatcgaggagctacaccggcaccagggcggtggcgttaagggagatggggacgagcagcgggagggagagcgggggtgcggtcacgacggggagtcatgcgcggcgcacgccgcggggaacctgtgccagagcttcctgctttcgtacggtgtccgcgtcggcatcggcatcctcctccgcgccttcaagctcgtgcgccgcaggtcctatggctcgctcctcgaccttaagcaactggtttcggagaaagatcttatagtaagagaggaagcttgccgggtagggttgctttttggcggattcactggatcatatcatgcacttcgatgtttccttaggagatttaggaaaaaggagacaccattcaatgcgttcggtggcaggattggccatactagcactggatgattcaagtaggaggcgtactctatctttatatcttctagcaaggctcgctcagtgtgcatataattctgcaaaatctaagaacaaatttcatttttggggaagccattggagacatggagatgcattgcttttttcattagcatgtgcccaggttatgtatgcttttgttatgaggcctgaaagcttacctaagtcgtaccaagaatttatccttaagacaggaccagtagcagaacctgtctacaaggttgtcaaagaatgctgcagaggtggtcctgtggatctaactgccctctcagcccatttatcaaacaagaggaatccggatttgataaatttaacaacaaatccatccattatcccatgttctgtgatccaccctgacagagcatcatgcttggctcaaaatgttaatgttgtttcatcaacattcaagaagacattccctctatatttctcattgacatttgtgccctttgttgtcctacgtcttcaaaagttcttggaatcgccaacgacaacttgttggcgtgctcttgtgggtgcagttcgctccaccacctttttgtctgccttcgtcactgtattccaggctgctatatgtttgcaccgaaaagttgcgaacaaagaccacaaacttgtgtattggtttgctggtttgatgtcgggtctttcaattcttttggaaaagaaagctagaagggctgagctagccctctatgtgcttccacgtgctggagattccctatggtatatattgatcaaccgccacctgctcccaaatattaaaaatgctgaggtggctcttttctgcatgtgcatgggaggaatcatgtattttctggagtacgagccagacacaatggctccattcctcagagggctcatcaggcgcttcctggcaagcaagatcagcaatccaagccccccgcctcccaatcggaatgcctcctactcgtaccttcagacgctgaatgctctggatcaatcaagaacccaaccaggggtggataacggactgacgacatcggagaaatacaacctcgaatcaattcctggactttagagacctcatctgtggtattagtaaattgggtcttgtagcttgggaagatcacgaaaactcgaacacccattacatgtgccatcctgtgatgggtttatactctgttatacgtgtttgtcttgagtgcaaaataaatggataagcagagatggtttgtgcgggagtatggactgatacgaagcaatttgctcgttcttgtacatgcccaagtccacaaggtcaggatttgaatcggtcaccaggggcacgaaggtatttttttcgttgcatcacaacgtcgaagacatgatcctgaattcctgacaaaccgaaaggtcgccccgagcagcctcgcaagggtgtgccgaagctcttgcaatttcgtttttatccctttttaattttgttgtgattttacctctgttctacaaacgaagctcagtcgtattcttgtgttgttacagttgacaatgttaaatctgatatgaaaaaacaaaaatttgcacacaatttattactattttactcgtcattgtattacgtatttgcgattttactcccgtaggatgcaccgtacagaataggagggtcgtttggatctttcgcatattatattttcatatttttatttttctaatcactaattatgatttttcacttttaaaatggatgcataaaatcataaagtagcttcgcttttaaaatggatgcataaaatcataaagttaaaaacag

SEQ ID NO: 66703 - DNA, 2521 bp, Zea Mays
atttcaagtcgcaaagcgcgacgtccgacgagagagagcggcctcagaacaggagcgaagggatccgccagagtccccctgagtccaaccaagctcggtccggcccagtcccaggcccaggcccaggcccgagcggtagcctgtaggtcgccggcgatgccgttcctgtcgacgccgtcgttcgacctatccgccggcgcagagccaaccctgggcccgcgctcagcggccccgccgcctccacccacggcggccgcgcatcatcagccgccggtgtccgaggcggcggcccggcggcttcgggaggcggaggagcggctgcgggaagccatcgaggagctacaccggcaccagggcggtggcgttaagggagatggggacgagcagcgggagggagagcgggggtgcggtcacgacggggagtcatgcgcggcgcacgccgcggggaacctgtgccagagcttcctgctttcgtacggtgtccgcgtcggcatcggcatcctcctccgcgccttcaagctcgtgcgccgcaggtcctatggctcgctcctcgaccttaagcaactggtttcggagaaagatcttatagtaagagaggaagcttgccgggtagggttgctttttggcggattcactggatcatatcatgcacttcgatgtttccttaggagatttaggaaaaaggagacaccattcaatgccaggttcggtggcaggattggccatactagcactggatgattcaagtaggaggcgtactctatctttatatcttctagcaaggctcgctcagtgtgcatataattctgcaaaatctaagaacaaatttcatttttggggaagccattggagacatggagatgcattgcttttttcattagcatgtgcccaggttatgtatgcttttgttatgaggcctgaaagcttacctaagtcgtaccaagaatttatccttaagacaggaccagtagcagaacctgtctacaaggttgtcaaagaatgctgcagaggtggtcctgtggatctaactgccctctcagcccatttatcaaacaagaggaatccggatttgataaatttaacaacaaatccatccattatcccatgttctgtgatccaccctgacagagcatcatgcttggctcaaaatgttaatgttgtttcatcaacattcaagaagacattccctctatatttctcattgacatttgtgccctttgttgtcctacgtcttcaaaagttcttggaatcgccaacgacaacttgttggcgtgctcttgtgggtgcagttcgctccaccacctttttgtctgccttcgtcactgtattccaggctgctatatgtttgcaccgaaaagttgcgaacaaagaccacaaacttgtgtattggtttgctggtttgatgtcgggtctttcaattcttttggaaaagaaagctagaagggctgagctagccctctatgtgcttccacgtgctggagattccctatggtatatattgatcaaccgccacctgctcccaaatattaaaaatgctgaggtggctcttttctgcatgtgcatgggaggaatcatgtattttctggagtacgagccagacacaatggctccattcctcagagggctcatcaggcgcttcctggcaagcaagatcagcaatccaagccccccgcctcccaatcggaatgcctcctactcgtaccttcagacgctgaatgctctggatcaatcaagaacccaaccaggggtggataacggactgacgacatcggagaaatacaacctcgaatcaattcctggactttagagacctcatctgtggtattagtaaattgggtcttgtagcttgggaagatcacgaaaactcgaacacccattacatgtgccatcctgtgatgggtttatactctgttatacgtgtttgtcttgagtgcaaaataaatggataagcagagatggtttgtgcgggagtatggactgatacgaagcaatttgctcgttcttgtacatgcccaagtccacaaggtcaggatttgaatcggtcaccaggggcacgaaggtatttttttcgttgcatcacaacgtcgaagacatgatcctgaattcctgacaaaccgaaaggtcgccccgagcagcctcgcaagggtgtgccgaagctcttgcaatttcgtttttatccctttttaattttgttgtgattttacctctgttctacaaacgaagctcagtcgtattcttgtgttgttacagttgacaatgttaaatctgatatgaaaaaacaaaaatttgcacacaatttattactattttactcgtcattgtattacgtatttgcgattttactcccgtaggatgcaccgtacagaataggagggtcgtttggatctttcgcatattatattttcatatttttatttttctaatcactaattatgatttttcacttttaaaatggatgcataaaatcataaagtagcttcgcttttaaaatggatgcataaaatcataaagttaaaaacag

SEQ ID NO: 66704 - DNA, 903 bp, Zea Mays
agacttaaataaacatagtttaatattatttgtaacccatcacgttataattatgtggaccaaacattattaaaaatgacaaaccattactagatggagtgagtactgtttgtgacgaagtgtactcatcaataaataaaacaaaataagagcaagtctagcttcccggtcaacggctcctcgtataaggcacccctacttgtatcacaaattcacaaccagaagcagctctcaggattcgtagcgcctgcatgcagctccaggatggcggaggccatcgttggtccgctggtggggaagctccaggagatggcggtgagcgaggcgaaggctctagtggcagtgaacgacgacatccgcggcctccgggaccggctcatgtggatgcaggccttcttgcggcatgccgacccgcggcgacgcgacacctccgacgagctcatcagggtgtggctcaagcagacccgcgatgttgccttcgacgccgaggacgccattgacgactactccctcaaggtcgacctctcaagatatccaaattggagccagtccattgtttgttttttctctggattcactacacaagtaagcattcgacacaatctatcaagaaagatcgcagagatcaacttaaggcttgaagacatcattaacaataaggagaaatacaagattgaagctgcacccaatgattttccattggtgacatggaaaccttctacggacatctctactgtggcaaaaagtttaatagaaaaggcgacacagacagcgacgagacagtttgggagccgcatgtatttgagcatgcgtagagccggccgctccccgcgtttgtcgtccagcctctgcatactcttgcctccctccctagctccgtccagttggccaagccagatcgag

SEQ ID NO: 66705 - DNA, 1430 bp, Zea Mays
gtttcttgcaaaatagtcgatcatccatacccctatccctatacctctcagctttggcttcccccgccgcctgctgggtcgcagatgagctcctccagtccgctcccctgcgctgcagagacaagccttgctgggttggaggcggctcctcatccactcccccgcactgcggtcggtcggaagcgctcccatccactccgtatctgacttccacccatcgctccgtcggaggcgcctctcgagggtgacgtgaggcgtgtgagctctcccgtttgcttcccgccctggctcaatcggaggacggtggtgcgctcgaggtcataggagatcgaacagatggtgatttgacgaaggacacgaagatatccaaattggagccagtccattgtttgttttttctctggattcactacacaagtaagcattcgacacaatctatcaagaaagatcgcagagatcaacttaaggcttgaagacatcattaacaataaggagaaatacaagattgaagctgcacccaatgattttccattggtgacatggaaaccttctacggacatctctactgtggcaaaaagtttaaagtcaagtcaagtataaaataccgcacgatcaatccggaatggaacgaggaactcaccctgtccatcacaaacatgatgaacccggtcaagattgaactcttcgaccatgacacgttcaccaaggacgacagcatgggcaacgccgagttctccatcctcaacttcgtggagatcgccaagcaggacctgagcgacgtccccgacggcacggtgatgaagacgatccacacggagaagggcagctgcctcgccaccgacagccacatcacgtgcaaggacggcaaggtctcccaggacatcctgctcaggctcagggacaccgagaccggcgacctcgtcctgcgcctgacctgggtcaacatccccggcgtcgcgcggtgaatcatcccctcgatcggcggggacggggccagggcatgaggcggcggcgacccgaccgacgcctgcccagctgattatacatccgtttacctggtattggcataaggagacccttggatgcgtgtaatgtttgtttgcagttctgataaggtgtgcaagaaggctcatgctactgggagcaatgcttctgcgggttttttatccacaaattacatttgttctcgttgatcacatttccataaaaccatttatcagtaggtcaccatgtagagcaaaagaaaaaaaaaattgcttcaaacatcacagatataggaaggactggatattcagattcaacctattggtgaggttgcgtgcaccgaccaaaagtttaaactgatagaaaaagaaatggacaattcatgttgtaattcaacactcctaatagaagagggctgcaactatgtttatgtaattgtgtcaact

SEQ ID NO: 66706 - DNA, 920 bp, Zea Mays
ccatacccctatccctatacctctcagctttggcttcccccgccgcctgctgggtcgcagatgagctcctccagtccgctcccctgcgctgcagagacaagccttgctgggttggaggcggctcctcatccactcccccgcactgcggtcggtcggaagcgctcccatccactccgtatctgacttccacccatcgctccgtcggaggcgcctctcgagggtgacgtgaggcgtgtgagctctcccgtttgcttcccgccctggctcaatcggaggacggtggtgcgctcgaggtcataggagatcgaacagatggtgatttgacgaaggacacgaagatatccaaattggagccagtccattgtttgttttttctctggattcactacacaagtaagcattcgacacaatctatcaagaaagatcgcagagatcaacttaaggcttgaagacatcattaacaataaggagaaatacaagattgaagctgcacccaatgattttccattggtgacatggaaaccttctacggacatctctactgtggcaaaaagtttattggcatgtctacataataattgctggccgcacctgtctacagtatgcatgtattcctaaattgtaaaataagtgaaaaaacgcatatgtgcgcgtgtatcatggtgtgtactcctaaattgtaaaataagtgaaagaaaaaacaagtggatcattgaatgttgaaggatgtttttgtaaccagatgttctttagactctgttttttgtttagagaaatataatcccttatgtagttacttgtgcatccatatcatgtacacattggctcttacgggcttgccctttttctttgtacattcccattctatctatgctgtgctaaaccttaaattcattactccacatagattaatattgaag

SEQ ID NO: 66707 - DNA, 711 bp, Zea Mays
ccatacccctatccctatacctctcagctttggcttcccccgccgcctgctgggtcgcagatgagctcctccagtccgctcccctgcgctgcagagacaagccttgctgggttggaggcggctcctcatccactcccccgcactgcggtcggtcggaagcgctcccatccactccgtatctgacttccacccatcgctccgtcggaggcgcctctcgagggtgacgtgaggcgtgtgagctctcccgtttgcttcccgccctggctcaatcggaggacggtggtgcgctcgaggtcataggagatcgaacagatggtgatttgacgaaggacacgaagatatccaaattggagccagtccattgtttgttttttctctggattcactacacaagtaagcattcgacacaatctatcaagaaagatcgcagagatcaacttaaggcttgaagacatcattaacaataaggagaaatacaagattgaagctgcacccaatgattttccattggtgacatggaaaccttctacggacatctctactgtggcaaaaagtttaatagaaaaggcgacacagacagcgacgagacagtttgggagccgcatgtatttgagcatgcgtagagccggccgctccccgcgtttgtcgtccagcctctgcatactcttgcctccctccctagctccgtccagttggccaagccagatcgag

SEQ ID NO: 66708 - DNA, 1713 bp, Zea Mays
aaaaggaagggagacagggaggcagggcataaggtagaaggtgatggcgatggagaggtagaggtagaagaagatgaaaatactgagattgtgttatgtggagacaatgaaaacaatggggaggttgaggggtcatttgaaattactgaggaaggaggggaaaatgaaacaagtgaagaagcaaaacaggatgtgatgcccagtacaacaatgccattattaccaaacttgcttcagtgttgggtgacgccactatcaggcttgcttcgttgttgtggggaacatggcagccctcaagagagcaccaactcatacataaaagaaatgttgcaagtatccaagtttcttcgtgtcatcaatctacaaggcatcgagatcggtgagagcttaccaacaactattgggaatgtagcacaccttcagtacctcggtgtcactgcttgttccttgaaatatatcccatcgacaattgaaaaccttaaaaatcttcagacgttggatgttcgagacacgtttgtttataaacttccagaagcattttggagtataacgacactgcggcatgtatttggtgagggtcttttcttgcctaagcaggtgggtgacttgaaacacctgcagacacttgaaagcatagatcctgataaggataatggttgggacagcagcacttttgagaaaatggctcaccttcagtcccttcatgtttgggattctaaggagaatggagttaatgctgaggctctatctgctgttattgataaagctaatttcctcgaacacctagataccctcactcttgatgttcatgacatcccattgagtgtgttcaccagttcttccctgaggcgtcttcgtaccctaaacttagacggcaagttggacatgttggtgctgcaatctaaagaaaaggagtcaaaatttcatttccccaaccttagcttcctatcattggcaaacacagaggtgtcgcagaactttatcaacaagcttgggaagctgccttcgctcaccactctaatattggatgtaaaatcctacaaggatgatcaagatcaacttgccttccaagctggtggatttacaagccttacaaagctgatactttctgatctggaaattgtgaaactcgagataaagaaatatgcacttccagaactcacagatttggaggttgagttgtactacgacgaaatcgaaatcgaggtatatggcgagcatgagtttgtgaagaaaattgaacaagtggatgaatacctctatggccgtatcactcaagttccggttgctccaaagaaaattggtcagcttcctagcatgaagcaacgcgtggctagctgaagatcacagattggcatgtctacataataattgctggccgcacctgtctacagtatgcatgtattcctaaattgtaaaataagtgaaaaaacgcatatgtgcgcgtgtatcatggtgtgtactcctaaattgtaaaataagtgaaagaaaaaacaagtggatcattgaatgttgaaggatgtttttgtaaccagatgttctttagactctgttttttgtttagagaaatataatcccttatgtagttacttgtgcatccatatcatgtacacattggctcttacgggcttgccctttttctttgtacattcccattctatctatgctgtgctaaaccttaaattcattactccacatagattaatattgaag

SEQ ID NO: 66709 - DNA, 1358 bp, Zea Mays
ccgagattcaatatccgggtaatatccgtatccgtcccgataaacaaaatacccgtatccgtatccgaaattacgtcccgttttggtacccgtatccgatacacgttccgggtactcgtcccgttttcatccctagacacggagtagagaagagaaaagtagatggaaggtggcgaactggcgatggaagcacagtacaacgtgtacggtatcataaacatatgatacctccgagcgagtagacatggagatcgatcattacacaagacataaaacctgaagtcccacggcgataccgataagcactagctgcaaactgctctctctcgttttctctctctctctctgtgtgtgtgactgactgactgtcgactccgggaagctcaaacacggaagtccactccttccatgacgaagcggacagccggacaccgtcgcgaacgtctggaatcttggactcattcaattctcaaatgagcggctgcggcgccttgaaatgagcagtagctgtatttgcacccttgcgaatcgcatgacgcagcctctccagcgccgcgtacgacgacccgcgctcctcaacggccttgcggcacgcggccttcatctcgtgggccttctcccgcgccttgcgcccctcctcgccgccgcccatgagggccctcaccgcccgctccagctccgcggcctcgacgaagttgtcgcgcctcctgtccacctccatggccacggccacgcccacgacggccacgagctcgaacgcgttcaggtgctgctccgcgtacagcggccacggcgccagcggcacgccgtgccacaggctctccatcgtcgagttccacccgcagtgggtcacgaagccgcccacggccgggtgggcgagcaccgccttctgcggcgcccaccgcggccacacgaggcccctgcccctggtccgctccaggaaccccgcggggaggagctcgtccaggtcggcgtccgacgggtgccgcgatccggccgcgggaggcccgcgcagcgcccacaggaaccggtgcccgctccgctccagccccgccgcggcctcgcgcgccttcgccgcgtcgaaccagcccaggctcccgaagcagaggaacaccaccgacgcacgcggctgcgcgtcgagccaccggacgcacgcctcgtcgccggacgcacctccccccgcaccgaggttgagaaccggaccgatcgggtacagcggcggcgccggccgtcccggcacgcaccggcctccggcgatggcggcgagcagccccggttcgagctcggccaccgtgttgacgacgatgccgtcggcgtccatgaaacgccggccgtggtaaacgaaccacgtgaagttg

SEQ ID NO: 66710 - DNA, 1866 bp, Zea Mays
tagcgagcgagcacgagcacagaacacaagaaggatcggggggcagtctgaactctgcagagtccagtgcgttcacagtccggtctctttcgttgttccatttcttttgttgagaaaatcggtcttgcactctagctctgcacagagagacacggtattggggacagagctagtagggagtgagcacatgtataaccttttttggtacaaagagaggagcaaccaaccacttcatgctccacgcggccgggctcaccaccggcctccttccatagcgggagagcgttgcttaaattattaaatgctttgcgttgaccccttcggtcccatttgtactcacatggttggcacagagattcaaatgcctcccacctcccacgttgttgcacagtgttttgcccatcagaatatttcatgacacttcctaagacagatcacgcggcgtgcatgtttttgtcaaaaacttatcccaattcccatcccaaccatgtggcatgctcgctcccattatacccacatagttggcacggagattcaccgactcccacgtcccacgttatcgcacaatgatttgcccattttagaatatttcataacacgtacatactctccctaatacaaatcgcgttacgtgcttgttttgtcaaaaaaaaaacttatcctaaaaccatgtggcaacaaggcaggagaaaaagaatgttatattgcacgcatgtgctacgtcgtgcctgttgttttgataaaaaaaatggtgtctccctaaccaccttgtgtgagaaaacgcaatagaaaaagctcaccgagaaaaaaaaaatgtagaacaattttgatcattcttcagcacatatttgtaggctttaggtctttagaacatattggtcttcaagcccataattatggaatacatggagttaaggggtttttctctccctgcatcatgtagctttctaattaagttgtcttatgccaattcctcgaatgtatttgtggaacctagagactaccatagaatttgccagcaaatttgctgcggacacaaactttgctgcgaacacaatatcaggtcttgtgtagttcgtcaggtatattagtgcttcaatggttctcaagtagggggactctaggtctaaatgggtccctccactttgtatgagtagattggtgcacacaaacattccttcctccagcaggtgctcaagctgcagtctcaagctgagcttcattttaccaaagtccctttatctcatattctttcttgaggtaagacattgcttcctcaatgtcatttgtagtgctaatgatattcaaatcattgacattaactaagatgatgcaggagcctttcaaggagttcaccgtttgtgtaacccctctctaaaagaaaattactcgaacggttgaaccatatccttttgaattgtttcaacccggacaatttaccgctacatgcagactctagacataaagcagtttggatatagtttcgggatcttccaaaacaacagtaaaaaactatacaggattaatatttcgaactttttatataagtaaataggtgccttagaaaatgatctaaatgaatcaaaacaacagtaacaattaaaatcaaagaatcaatctagaattaaaatatacatgtaattaatcaagagagagaaacaatgttaatacactaatctagcatattcaactcttgccaccagcccctcctctgagctgctgcctgctgggctcccgctgctacaggccgcgccctcaggctaccacgggcctgcgtcagcagcgtgggcccctcttcacacacgtctgggccggtgccacctttgggctgtgcctattcactacgtgggccgcacgccccttatg

SEQ ID NO: 66711 - DNA, 2147 bp, Zea Mays
tacggacaagcttggacagccacggtccaagattgaggcgtggtgcagcgtggcttacacggcgctgcgacacctgcgtgcgaattgcgatgcctcgcggtagaatcacttggccacaggcgtggccaagtccacgaagaaaagtgttgcctatggttcaggatttcatcggacatagcagattgtttcggagaaacatgcgtcgcatctgctgaagaaaagtacggttccaagtcccgtgctcgcccatcctgtcatcctgggcgactgatcgggccccgtgggtggtggtggaaaaaagcactgaagtaacggttacggccaaacaccgactgttccaatggcgacgcccgcgctggtgctcctaccggagtgggggtccggccacctcatgtccatgctcgagtcctgtaagcgcgtcctcctcagcagcagcggcggcaaggccttctccatcaccctgctcgtgatgcgcccgccgacggccgaggccacctccgaggtggaggcgcacgtgcggcgcgaggccgcgtgcgggctggacatccgcttccaccgcctccccgccgtggaggcccccaccgacgccgtcggggtcgaggagttcatcgcgcgctacatcggcctccacgcgccgcacgtccgtgacgccgtggccgccatggcgtgccccgtggccgcgctcgtgctcgacctcttcgccgcgccgctggtggacgtggcgcggggcctcggggtgccgtcctacgtcttcatgtcgtccacgggggccatgctcgcgctcatgctgcacctgcccgtgctccacgagtccgtccccgccgtggacttcgacgagatggagggggacgtgccgctgccggggctgccgccggtgccgccggactccatgccgtgccccgtggcggacaagaggagccccaactacgcgtgcttcgtgcgcctcggcgaccgcttcatggacgccacgggggtcatcgccaacacagcggacgagctcgagccggggcccctggcggccgtcgcccggggccggtgcgtgcccggccggcccgcgccgccggtgtacccgatcggccccgtgctgtcgctcggcggccgctcgccgtctcacgagtgcgtcgcgtggctggacgcgcagccgccggggtccgttgcgttcctctgtttcgggagcatggggtggttcgacccgccgcaggttgcggagatcactgccgcgctcgagcggtgcggccaccgcttcctgtgggtcctgcggggaccaccctcggacgcgtccgggtcggagcacccgacggacgcgaacctcgacgagctgctcccggaggggttcttggagaggacggggggcaagggcctggtgtggccgacgtgggcgccgcagaaggagatcctggcgcaccccgccgtgggcggcttcgtgacgcacggcggctggaactcggtgctggagagcctgtggcacggcgtgcccatggcgccgtggccgctgtacgcggagcagcacctgaacgcgtttcagctggtggccgacatgggcgtggccgtgccgctcaaggtggacaggaaacggggcaacttcgtggtggccgcggagctcgagcgcgctgtgcggtccctgatggacgccgacggcgagcaggggaggagggcgagggagaaggccgcgcgtatgaaggccgtgtgccggaaggccgtggaggagggcgggtcgtcgcacgcggcgctgcagagactcgcagaggcgctccacgacggcgccgtgatcccgaagaagtgaaacgcggccgctccatgttcctttgtttggtgatgtttcatggaatactatgcgcgcgtaattgtttttttataccaatagcgcaataacagtaataatacaaatttagattacaataagtagcaagttgcatcaaactaacatacttagtgtccaataataatgtatctgcaaaatttacataggcaagcatagttgtaaaaaggctccaacagttagagccgcagaacaagacatgtctggtgtggcaccggactggtgccacaagaagacaacaacgcaaacagtcgacagctctcgaaccctaacggttgggtgacgtggcgacgcaccggactgtccggtgcgcccatcgacagcagcc

SEQ ID NO: 66712 - DNA, 997 bp, Zea Mays
acagcccagtatgggcccaacatagtttcgtcagtgcctgcgccgtcgacgagccggcgcccggcggcactggagcgacgcgagcgcggatcaggtcggactcccggccgccgcctcgccaaagtgggagcgcaaatgggcgccagcgccactcacggggtgcggccgcggcgtgcgtgttcggctgctgggagccgcacaaggtggcccacgggccacgacgcacgtgtacgtgctgctgccacggcagctggcaaagcatcggtcggcgccgtcgcgctggttgcctgcgtcggccactctagttcagttgagcagtgaggactcctgctatctgcaggtaccgccggatgagtcaaggattgctgctcatcagtggcacgcctgacacgacacgggctgctgaccaggcgtcgactcgcaacgcaagcagccggttagatgctgttgctgccccgggactcgcaagcaggcgggtccgttccaattccgtggactcgatccaggcggaccacgccccgggccagccgatccatctttgttccaaggcgcaagggccacggggatgctggcggatggagggcgtgtgcggcatcgacgttgtctgtggtagactggtacgattcatgcacaacattattatctccaggttattttgcatgctgtctccgtcacacggaagcatgatcattcatcagaacttagaagttgcctactagagcttaaagtcagctaagagatcatatacaatccaaaggtgacaaggaactatggattgcaaacacccaattttcccaaggttttgtctggttgtaggaaaacagctatagaagaacctacaagtatagttttcattttatgttttaataaaatcgtttaaaaaattgcggatccgacttgttttgtctaggcctctagggggacgcgacaaaatcacgctggtatatggcaagatttgtcagatgaaactgtgttttctatatgaaataaaaaaaat

SEQ ID NO: 66713 - DNA, 1074 bp, Zea Mays
ttcgtcagtgcctgcgccgtcgacgagccggcgcccggcggcactggagcgacgcgagcgcggatcaggtcggactcccggccgccgcctcgccaaagtgggagcgcaaatgggcgccagcgccactcacggggtgcggccgcggcgtgcgtgttcggctgctgggagccgcacaaggtggcccacgggccacgacgcacgtgtacgtgctgctgccacggcagctggcaaagcatcggtcggcgccgtcgcgctggttgcctgcgtcggccactctagttcagttgagcagtgaggactcctgctgtgaattcatggagcagtaaccactaatcaacaagtcaatagggtcaaacgaagcttgatctcagaactagaagtgggtgttactttcagtctgtcaccacactataatataaggtaaatacacaatcacatacagacatactgcatgcgcatgagtgttccatttagaattcctcaagcaagatttgaggagtgagcgaaatttcaatcgctagctatgaattgcatgcagcactctcactgtcatctgagcttcatttttttggtgaggcattgccattgtaacctgccaatcaacgtgtgtgacactgcaaccacaacaaagatgctacctcaaccatgataattttagcagttcttatttagtcgttaaataaatcctttgcgattcctagaaggtccaaaactatattgtacctgatgcgacctcctcttgctggtctcttgggtgaccgcaggggagagaggagaaggagactagaaccagggacagatctcagggggtaggaacagtggctaggcaggcggacgtcgtcaccgcggctggcagctggccgagccacgttgaccgagatagtcccgcccactatagggagactttattcctcgatgatgcttaatacaaactacgggtctgcctttatagtatgaggcgacctctttaaaaggaactaaataactgaatctggaagtaaactaatgcatatcttttattctggaaataaactaatgcatatctccctacaataaaagcttgcctactaaccc

SEQ ID NO: 66714 - DNA, 975 bp, Zea Mays
ttcgtcagtgcctgcgccgtcgacgagccggcgcccggcggcactggagcgacgcgagcgcggatcaggtcggactcccggccgccgcctcgccaaagtgggagcgcaaatgggcgccagcgccactcacggggtgcggccgcggcgtgcgtgttcggctgctgggagccgcacaaggtggcccacgggccacgacgcacgtgtacgtgctgctgccacggcagctggcaaagcatcggtcggcgccgtcgcgctggttgcctgcgtcggccactctagttcagttgagcagtgaggactcctgctgtgaatctgcaggtaccgccggatgagtcaaggattgctgctcatcagtggcacgcctgacacgacacgggctgctgaccaggcgtcgactcgcaacgcaagcagccggttagatgctgttgctgccccgggactcgcaagcaggcgggtccgttccaattccgtggactcgatccaggcggaccacgccccgggccagccgatccatctttgttccaaggcgcaagggccacggggatgctggcggatggagggcgtgtgcggcatcgacgttgtctgtggtagactggtacgattcatgcacaacattattatctccaggttattttgcatgctgtctccgtcacacggaagcatgatcattcatcagaacttagaagttgcctactagagcttaaagtcagctaagagatcatatacaatccaaaggtgacaaggaactatggattgcaaacacccaattttcccaaggttttgtctggttgtaggaaaacagctatagaagaacctacaagtatagttttcattttatgttttaataaaatcgtttaaaaaattgcggatccgacttgttttgtctaggcctctagggggacgcgacaaaatcacgctggtatatggcaagatttgtcagatgaaactgtgttttctatatgaaataaaaaaaat

SEQ ID NO: 66715 - DNA, 1081 bp, Zea Mays
ttcgtcagtgcctgcgccgtcgacgagccggcgcccggcggcactggagcgacgcgagcgcggatcaggtcggactcccggccgccgcctcgccaaagtgggagcgcaaatgggcgccagcgccactcacggggtgcggccgcggcgtgcgtgttcggctgctgggagccgcacaaggtggcccacgggccacgacgcacgtgtacgtgctgctgccacggcagctggcaaagcatcggtcggcgccgtcgcgctggttgcctgcgtcggccactctagttcagttgagcagtgaggactcctgctattcatggagcagtaaccactaatcaacaagtcaatagggtcaaacgaagcttgatctcagaactagaagtgggtgttactttcagtctgtcaccacactataatataagatctgcaggtaccgccggatgagtcaaggattgctgctcatcagtggcacgcctgacacgacacgggctgctgaccaggcgtcgactcgcaacgcaagcagccggttagatgctgttgctgccccgggactcgcaagcaggcgggtccgttccaattccgtggactcgatccaggcggaccacgccccgggccagccgatccatctttgttccaaggcgcaagggccacggggatgctggcggatggagggcgtgtgcggcatcgacgttgtctgtggtagactggtacgattcatgcacaacattattatctccaggttattttgcatgctgtctccgtcacacggaagcatgatcattcatcagaacttagaagttgcctactagagcttaaagtcagctaagagatcatatacaatccaaaggtgacaaggaactatggattgcaaacacccaattttcccaaggttttgtctggttgtaggaaaacagctatagaagaacctacaagtatagttttcattttatgttttaataaaatcgtttaaaaaattgcggatccgacttgttttgtctaggcctctagggggacgcgacaaaatcacgctggtatatggcaagatttgtcagatgaaactgtgttttctatatgaaataaaaaaaat

SEQ ID NO: 66716 - DNA, 2743 bp, Zea Mays
ccagacactaacgcgcccgagatcgcgtcactgaaggcgcagctgaacgctgcggcggccaagaactctgcgctggaggaccgcctcgtccacctggacggcgccctcaaggaatgcgtccggcagctccggcgcgccaaggacgagcaggaccagacggtgcagggcgcgctagcacagcaagcgcggcagtgggagtcgcacaaggccgacctcgagctgcgcgtcgtcgagctcacggcgaggttggaggccaagtccgagcgctcggtggccgccgccgactgcgacaccggctccaggctagccgcgctggagaaggagaactcggcgctcaggacgcagctgctcgccaagacggaggagctggagctcaggacgatcgagaaggagctcaaccggcgggcggcggagactgcgagcaagcagcagctggagggcatcaagaaggtggccaagctccaagttgagtgcaggaggctgcaggccgcggcacaacggaggccctccgtgaacgtcgaactcaggcgttctccgagctcggcctgcgccgagtcggtgacggattgccagtcggactgctccgactcatgggcctcggtcctcgtcgccgagctcgaccagttcaggatcgacaggagcggcgcgagcagcagggccgccagcctcgcgaccgcggacattggcgtgatggacgacttcctcgagatggagaagctcgcctctgcgtcaaaaggcgacgccgtcgaggacgcgagcgggcaggtgctcaggctcgaggagaaggtcaagaagctggcagccgagaaggccgagcgggagaaggcgctgcacgaggctcagcgcgagctgaggacttcccgccagcgggtaatggtggcagaggagagatcagctgagctacagcggcagctgaaccttgccaatggcgagaaacatgccatgggggccgaggtgaaagctgctgaggcgaagagaggagagctggagggcttgctcgagctcgcccgcgccgagatcgcggggttgctggacaaggggcgcatcctggaggaacggctcgagtctgagaaggcgctgacacttgagctcgcagcaaagtaccaggacatggaggcgctgagggcagagaagagggagctgagcgctcagctggagacgtcacggtccgaagccaagaagctcggtgacaagatcgccctgatggagaggaagctggaggtggagaaggccttgtcgatccgactggcgacgaaatgccatggcattgatgctctggaagcaaagaagaagggagtcgagctcgagctggagacggcgcgcgaggaaatcgcttcgctgcaaaacaaggctagcagcttggaactgcgacgagtcgaggaagagaaagcgtcgtctgctgcactcgcactgcggtgccaagaactggatgaccttagatcccagctggagtcttcgaattcacggatcgttgagctcaatgagaaggttaaaacgctcgaggatgtagtcgaggaacagaggccagtgacggtggaattggagtctcagctccggtcgaggcgcgctgaaatcagtagcctgaaggaggatataagcctgttgcagaagaagctggagagccagaagaacctgtcatcagcttacatatctgcacttggtgcttctgaaacagagaagaaggagctggctagtcggtttgagctcggagagaaagaagccgaggaattacgtgggaagatgagcttgcttgaggaacagatccgtaaagagaaggcacggtcatccgagtttgcggtaaaatgtcagaagatggaggaacaaatctcctgtagatctcttcttggccaccaaccagtgaaatcatctgcggcgatcaaagatcttcagctcagaaaggagacagagctggccaaggctgcagagaaactggccgactgccagaagacgatagcttcactgagcagccagctgaaatcgttggctgatttcgacgaattcccccctgaaactgagaccagtggcgctgactcagacgacgcctgggacagcgatctgaagcttctccaacccgcaagctatcccacgcagattggctgtttggcagtcacatgattcacgatcctcgttggcaagtggatagcgaaactgtttttgcttggcttccgccgcatgattgctgtgatgagattgccatgatgttccaccacatgtcatatagagttaagttaataggtgagcaaatgttcatatggaagctgtttatagagttgtttggtgaagcctcaaagggactcatattgaatattatctttgatcttccaatctccctgtcccttggaaacatcctcactgtcagaagactgcaaatagtgaaatacacatggcatgtcaatcaaagaatgtaagaataaaaaccaggggcaggttcatatgacggcacgttcccacccgacatgctaccacatgttcataaggatcttggatttgcaaattccaattgaaagtttgtacataattcagttctagcatcttgtatctgtcaagagaaaatccgggtcttagtaagctaacttctcgactgacaggacgcctagtagctggatgtatacacttcgtggtcgaatctgaatgttcgcatgattggcgttcaaatgtttttatttgagttaatgcatgttcgacattatatatcagaaaaactgtggtcacgttatttttttaaaaaaatgtgatcaggatg

SEQ ID NO: 66717 - DNA, 3211 bp, Zea Mays
ggcttcggcgcctctgtcgccctgtctgtctgtctgtctgtctgcctgtccgtgctgacggacggttttaaaagggccggtgcggcgtaaaggattctcgggtcggcgagcaaccgcagcggagacatgccccgttgcacaggggctggggttgtgccgcgccgaggaggagccgggaggcggtgacgaacgcaacggaagccgcgggcggcgggtcttgttggcagagggcgaccgcgtggttccggggtcttgttgggcggcggatcgtgtgggattgaggatactgccaagagctccccaaactcgactcagtcgccggaggtcacatcgaaggaactggaagacggtgacaatgtgaaggtgaaggtattgagtgagaggctctcatccgtagttctggatattcgtgcgaaggatgatctcgtgaagcagcattccaaggttgcagaggaggctgttctaggatgggagaaggccgagacagagatcgcgtcactgaaggcgcagctgaacgctgcggcggccaagaactctgcgctggaggaccgcctcgtccacctggacggcgccctcaaggaatgcgtccggcagctccggcgcgccaaggacgagcaggaccagacggtgcagggcgcgctagcacagcaagcgcggcagtgggagtcgcacaaggccgacctcgagctgcgcgtcgtcgagctcacggcgaggttggaggccaagtccgagcgctcggtggccgccgccgactgcgacaccggctccaggctagccgcgctggagaaggagaactcggcgctcaggacgcagctgctcgccaagacggaggagctggagctcaggacgatcgagaaggagctcaaccggcgggcggcggagactgcgagcaagcagcagctggagggcatcaagaaggtggccaagctccaagttgagtgcaggaggctgcaggccgcggcacaacggaggccctccgtgaacgtcgaactcaggcgttctccgagctcggcctgcgccgagtcggtgacggattgccagtcggactgctccgactcatgggcctcggtcctcgtcgccgagctcgaccagttcaggatcgacaggagcggcgcgagcagcagggccgccagcctcgcgaccgcggacattggcgtgatggacgacttcctcgagatggagaagctcgcctctgcgtcaaaaggcgacgccgtcgaggacgcgagcgggcaggtgctcaggctcgaggagaaggtcaagaagctggcagccgagaaggccgagcgggagaaggcgctgcacgaggctcagcgcgagctgaggacttcccgccagcgggtaatggtggcagaggagagatcagctgagctacagcggcagctgaaccttgccaatggcgagaaacatgccatgggggccgaggtgaaagctgctgaggcgaagagaggagagctggagggcttgctcgagctcgcccgcgccgagatcgcggggttgctggacaaggggcgcatcctggaggaacggctcgagtctgagaaggcgctgacacttgagctcgcagcaaagtaccaggacatggaggcgctgagggcagagaagagggagctgagcgctcagctggagacgtcacggtccgaagccaagaagctcggtgacaagatcgccctgatggagaggaagctggaggtggagaaggccttgtcgatccgactggcgacgaaatgccatggcattgatgctctggaagcaaagaagaagggagtcgagctcgagctggagacggcgcgcgaggaaatcgcttcgctgcaaaacaaggctagcagcttggaactgcgacgagtcgaggaagagaaagcgtcgtctgctgcactcgcactgcggtgccaagaactggatgaccttagatcccagctggagtcttcgaattcacggatcgttgagctcaatgagaaggttaaaacgctcgaggatgtagtcgaggaacagaggccagtgacggtggaattggagtctcagctccggtcgaggcgcgctgaaatcagtagcctgaaggaggatataagcctgttgcagaagaagctggagagccagaagaacctgtcatcagcttacatatctgcacttggtgcttctgaaacagagaagaaggagctggctagtcggtttgagctcggagagaaagaagccgaggaattacgtgggaagatgagcttgcttgaggaacagatccgtaaagagaaggcacggtcatccgagtttgcggtaaaatgtcagaagatggaggaacaaatctcctgtagatctcttcttggccaccaaccagtgaaatcatctgcggcgatcaaagatcttcagctcagaaaggagacagagctggccaaggctgcagagaaactggccgactgccagaagacgatagcttcactgagcagccagctgaaatcgttggctgatttcgacgaattcccccctgaaactgagaccagtggcgctgactcagacgacgcctgggacagcgatctgaagcttctccaacccgcaagctatcccacgcagattggctgtttggcagtcacatgattcacgatcctcgttggcaagtggatagcgaaactgtttttgcttggcttccgccgcatgattgctgtgatgagattgccatgatgttccaccacatgtcatatagagttaagttaataggtgagcaaatgttcatatggaagctgtttatagagttgtttggtgaagcctcaaagggactcatattgaatattatctttgatcttccaatctccctgtcccttggaaacatcctcactgtcagaagactgcaaatagtgaaatacacatggcatgtcaatcaaagaatgtaagaataaaaaccaggggcaggttcatatgacggcacgttcccacccgacatgctaccacatgttcataaggatcttggatttgcaaattccaattgaaagtttgtacataattcagttctagcatcttgtatctgtcaagagaaaatccgggtcttagtaagctaacttctcgactgacaggacgcctagtagctggatgtatacacttcgtggtcgaatctgaatgttcgcatgattggcgttcaaatgtttttatttgagttaatgcatgttcgacattatatatcagaaaaactgtggtcacgttatttttttaaaaaaatgtgatcaggatg

SEQ ID NO: 66718 - DNA, 3294 bp, Zea Mays
atcccgtttctttcatggaggacttgtcctgctgctactcggcgctctctcttctcgccgactctactctgctcgcgcttctttttatcggcggtgtgccgtgtgcgcgagcggtgccgcggtgggggtacagtggcgcccgaattgtgcgcggtttcttgcgaagatcgtcgtcaactttcggcgctcgctgggggcgcagggcggggaggaaagcagatagggcacggaaggatcggcattgaggcaggcgtccggagatggaccgtcggagctggctgtggcggcgcaagtcgacggacaagagccccgcagagacggagacctcggcgtcctcggcgtccgagaggatcactgatgaacaggatactgccaagagctccccaaactcgactcagtcgccggaggtcacatcgaaggaactggaagacggtgacaatgtgaaggtgaaggtattgagtgagaggctctcatccgtagttctggatattcgtgcgaaggatgatctcgtgaagcagcattccaaggttgcagaggaggctgttctaggatgggagaaggccgagacagagatcgcgtcactgaaggcgcagctgaacgctgcggcggccaagaactctgcgctggaggaccgcctcgtccacctggacggcgccctcaaggaatgcgtccggcagctccggcgcgccaaggacgagcaggaccagacggtgcagggcgcgctagcacagcaagcgcggcagtgggagtcgcacaaggccgacctcgagctgcgcgtcgtcgagctcacggcgaggttggaggccaagtccgagcgctcggtggccgccgccgactgcgacaccggctccaggctagccgcgctggagaaggagaactcggcgctcaggacgcagctgctcgccaagacggaggagctggagctcaggacgatcgagaaggagctcaaccggcgggcggcggagactgcgagcaagcagcagctggagggcatcaagaaggtggccaagctccaagttgagtgcaggaggctgcaggccgcggcacaacggaggccctccgtgaacgtcgaactcaggcgttctccgagctcggcctgcgccgagtcggtgacggattgccagtcggactgctccgactcatgggcctcggtcctcgtcgccgagctcgaccagttcaggatcgacaggagcggcgcgagcagcagggccgccagcctcgcgaccgcggacattggcgtgatggacgacttcctcgagatggagaagctcgcctctgcgtcaaaaggcgacgccgtcgaggacgcgagcgggcaggtgctcaggctcgaggagaaggtcaagaagctggcagccgagaaggccgagcgggagaaggcgctgcacgaggctcagcgcgagctgaggacttcccgccagcgggtaatggtggcagaggagagatcagctgagctacagcggcagctgaaccttgccaatggcgagaaacatgccatgggggccgaggtgaaagctgctgaggcgaagagaggagagctggagggcttgctcgagctcgcccgcgccgagatcgcggggttgctggacaaggggcgcatcctggaggaacggctcgagtctgagaaggcgctgacacttgagctcgcagcaaagtaccaggacatggaggcgctgagggcagagaagagggagctgagcgctcagctggagacgtcacggtccgaagccaagaagctcggtgacaagatcgccctgatggagaggaagctggaggtggagaaggccttgtcgatccgactggcgacgaaatgccatggcattgatgctctggaagcaaagaagaagggagtcgagctcgagctggagacggcgcgcgaggaaatcgcttcgctgcaaaacaaggctagcagcttggaactgcgacgagtcgaggaagagaaagcgtcgtctgctgcactcgcactgcggtgccaagaactggatgaccttagatcccagctggagtcttcgaattcacggatcgttgagctcaatgagaaggttaaaacgctcgaggatgtagtcgaggaacagaggccagtgacggtggaattggagtctcagctccggtcgaggcgcgctgaaatcagtagcctgaaggaggatataagcctgttgcagaagaagctggagagccagaagaacctgtcatcagcttacatatctgcacttggtgcttctgaaacagagaagaaggagctggctagtcggtttgagctcggagagaaagaagccgaggaattacgtgggaagatgagcttgcttgaggaacagatccgtaaagagaaggcacggtcatccgagtttgcggtaaaatgtcagaagatggaggaacaaatctcctgtagatctcttcttggccaccaaccagtgaaatcatctgcggcgatcaaagatcttcagctcagaaaggagacagagctggccaaggctgcagagaaactggccgactgccagaagacgatagcttcactgagcagccagctgaaatcgttggctgatttcgacgaattcccccctgaaactgagaccagtggcgctgactcagacgacgcctgggacagcgatctgaagcttctccaacccgcaagctatcccacgcagattggctgtttggcagtcacatgattcacgatcctcgttggcaagtggatagcgaaactgtttttgcttggcttccgccgcatgattgctgtgatgagattgccatgatgttccaccacatgtcatatagagttaagttaataggtgagcaaatgttcatatggaagctgtttatagagttgtttggtgaagcctcaaagggactcatattgaatattatctttgatcttccaatctccctgtcccttggaaacatcctcactgtcagaagactgcaaatagtgaaatacacatggcatgtcaatcaaagaatgtaagaataaaaaccaggggcaggttcatatgacggcacgttcccacccgacatgctaccacatgttcataaggatcttggatttgcaaattccaattgaaagtttgtacataattcagttctagcatcttgtatctgtcaagagaaaatccgggtcttagtaagctaacttctcgactgacaggacgcctagtagctggatgtatacacttcgtggtcgaatctgaatgttcgcatgattggcgttcaaatgtttttatttgagttaatgcatgttcgacattatatatcagaaaaactgtggtcacgttatttttttaaaaaaatgtgatcaggatg

SEQ ID NO: 66719 - DNA, 2997 bp, Zea Mays
ggtggtttccacggcagggcaaaagccctacctggcctggccgctgccggcccatggacaacgaggatgatactgccaagagctccccaaactcgactcagtcgccggaggtcacatcgaaggaactggaagacggtgacaatgtgaaggtgaaggtattgagtgagaggctctcatccgtagttctggatattcgtgcgaaggatgatctcgtgaagcagcattccaaggttgcagaggaggctgttctaggatgggagaaggccgagacagagatcgcgtcactgaaggcgcagctgaacgctgcggcggccaagaactctgcgctggaggaccgcctcgtccacctggacggcgccctcaaggaatgcgtccggcagctccggcgcgccaaggacgagcaggaccagacggtgcagggcgcgctagcacagcaagcgcggcagtgggagtcgcacaaggccgacctcgagctgcgcgtcgtcgagctcacggcgaggttggaggccaagtccgagcgctcggtggccgccgccgactgcgacaccggctccaggctagccgcgctggagaaggagaactcggcgctcaggacgcagctgctcgccaagacggaggagctggagctcaggacgatcgagaaggagctcaaccggcgggcggcggagactgcgagcaagcagcagctggagggcatcaagaaggtggccaagctccaagttgagtgcaggaggctgcaggccgcggcacaacggaggccctccgtgaacgtcgaactcaggcgttctccgagctcggcctgcgccgagtcggtgacggattgccagtcggactgctccgactcatgggcctcggtcctcgtcgccgagctcgaccagttcaggatcgacaggagcggcgcgagcagcagggccgccagcctcgcgaccgcggacattggcgtgatggacgacttcctcgagatggagaagctcgcctctgcgtcaaaaggcgacgccgtcgaggacgcgagcgggcaggtgctcaggctcgaggagaaggtcaagaagctggcagccgagaaggccgagcgggagaaggcgctgcacgaggctcagcgcgagctgaggacttcccgccagcgggtaatggtggcagaggagagatcagctgagctacagcggcagctgaaccttgccaatggcgagaaacatgccatgggggccgaggtgaaagctgctgaggcgaagagaggagagctggagggcttgctcgagctcgcccgcgccgagatcgcggggttgctggacaaggggcgcatcctggaggaacggctcgagtctgagaaggcgctgacacttgagctcgcagcaaagtaccaggacatggaggcgctgagggcagagaagagggagctgagcgctcagctggagacgtcacggtccgaagccaagaagctcggtgacaagatcgccctgatggagaggaagctggaggtggagaaggccttgtcgatccgactggcgacgaaatgccatggcattgatgctctggaagcaaagaagaagggagtcgagctcgagctggagacggcgcgcgaggaaatcgcttcgctgcaaaacaaggctagcagcttggaactgcgacgagtcgaggaagagaaagcgtcgtctgctgcactcgcactgcggtgccaagaactggatgaccttagatcccagctggagtcttcgaattcacggatcgttgagctcaatgagaaggttaaaacgctcgaggatgtagtcgaggaacagaggccagtgacggtggaattggagtctcagctccggtcgaggcgcgctgaaatcagtagcctgaaggaggatataagcctgttgcagaagaagctggagagccagaagaacctgtcatcagcttacatatctgcacttggtgcttctgaaacagagaagaaggagctggctagtcggtttgagctcggagagaaagaagccgaggaattacgtgggaagatgagcttgcttgaggaacagatccgtaaagagaaggcacggtcatccgagtttgcggtaaaatgtcagaagatggaggaacaaatctcctgtagatctcttcttggccaccaaccagtgaaatcatctgcggcgatcaaagatcttcagctcagaaaggagacagagctggccaaggctgcagagaaactggccgactgccagaagacgatagcttcactgagcagccagctgaaatcgttggctgatttcgacgaattcccccctgaaactgagaccagtggcgctgactcagacgacgcctgggacagcgatctgaagcttctccaacccgcaagctatcccacgcagattggctgtttggcagtcacatgattcacgatcctcgttggcaagtggatagcgaaactgtttttgcttggcttccgccgcatgattgctgtgatgagattgccatgatgttccaccacatgtcatatagagttaagttaataggtgagcaaatgttcatatggaagctgtttatagagttgtttggtgaagcctcaaagggactcatattgaatattatctttgatcttccaatctccctgtcccttggaaacatcctcactgtcagaagactgcaaatagtgaaatacacatggcatgtcaatcaaagaatgtaagaataaaaaccaggggcaggttcatatgacggcacgttcccacccgacatgctaccacatgttcataaggatcttggatttgcaaattccaattgaaagtttgtacataattcagttctagcatcttgtatctgtcaagagaaaatccgggtcttagtaagctaacttctcgactgacaggacgcctagtagctggatgtatacacttcgtggtcgaatctgaatgttcgcatgattggcgttcaaatgtttttatttgagttaatgcatgttcgacattatatatcagaaaaactgtggtcacgttatttttttaaaaaaatgtgatcaggatg

SEQ ID NO: 66720 - DNA, 2956 bp, Zea Mays
ataactaatactgctccaagcgtaatggatactgccaagagctccccaaactcgactcagtcgccggaggtcacatcgaaggaactggaagacggtgacaatgtgaaggtgaaggtattgagtgagaggctctcatccgtagttctggatattcgtgcgaaggatgatctcgtgaagcagcattccaaggttgcagaggaggctgttctaggatgggagaaggccgagacagagatcgcgtcactgaaggcgcagctgaacgctgcggcggccaagaactctgcgctggaggaccgcctcgtccacctggacggcgccctcaaggaatgcgtccggcagctccggcgcgccaaggacgagcaggaccagacggtgcagggcgcgctagcacagcaagcgcggcagtgggagtcgcacaaggccgacctcgagctgcgcgtcgtcgagctcacggcgaggttggaggccaagtccgagcgctcggtggccgccgccgactgcgacaccggctccaggctagccgcgctggagaaggagaactcggcgctcaggacgcagctgctcgccaagacggaggagctggagctcaggacgatcgagaaggagctcaaccggcgggcggcggagactgcgagcaagcagcagctggagggcatcaagaaggtggccaagctccaagttgagtgcaggaggctgcaggccgcggcacaacggaggccctccgtgaacgtcgaactcaggcgttctccgagctcggcctgcgccgagtcggtgacggattgccagtcggactgctccgactcatgggcctcggtcctcgtcgccgagctcgaccagttcaggatcgacaggagcggcgcgagcagcagggccgccagcctcgcgaccgcggacattggcgtgatggacgacttcctcgagatggagaagctcgcctctgcgtcaaaaggcgacgccgtcgaggacgcgagcgggcaggtgctcaggctcgaggagaaggtcaagaagctggcagccgagaaggccgagcgggagaaggcgctgcacgaggctcagcgcgagctgaggacttcccgccagcgggtaatggtggcagaggagagatcagctgagctacagcggcagctgaaccttgccaatggcgagaaacatgccatgggggccgaggtgaaagctgctgaggcgaagagaggagagctggagggcttgctcgagctcgcccgcgccgagatcgcggggttgctggacaaggggcgcatcctggaggaacggctcgagtctgagaaggcgctgacacttgagctcgcagcaaagtaccaggacatggaggcgctgagggcagagaagagggagctgagcgctcagctggagacgtcacggtccgaagccaagaagctcggtgacaagatcgccctgatggagaggaagctggaggtggagaaggccttgtcgatccgactggcgacgaaatgccatggcattgatgctctggaagcaaagaagaagggagtcgagctcgagctggagacggcgcgcgaggaaatcgcttcgctgcaaaacaaggctagcagcttggaactgcgacgagtcgaggaagagaaagcgtcgtctgctgcactcgcactgcggtgccaagaactggatgaccttagatcccagctggagtcttcgaattcacggatcgttgagctcaatgagaaggttaaaacgctcgaggatgtagtcgaggaacagaggccagtgacggtggaattggagtctcagctccggtcgaggcgcgctgaaatcagtagcctgaaggaggatataagcctgttgcagaagaagctggagagccagaagaacctgtcatcagcttacatatctgcacttggtgcttctgaaacagagaagaaggagctggctagtcggtttgagctcggagagaaagaagccgaggaattacgtgggaagatgagcttgcttgaggaacagatccgtaaagagaaggcacggtcatccgagtttgcggtaaaatgtcagaagatggaggaacaaatctcctgtagatctcttcttggccaccaaccagtgaaatcatctgcggcgatcaaagatcttcagctcagaaaggagacagagctggccaaggctgcagagaaactggccgactgccagaagacgatagcttcactgagcagccagctgaaatcgttggctgatttcgacgaattcccccctgaaactgagaccagtggcgctgactcagacgacgcctgggacagcgatctgaagcttctccaacccgcaagctatcccacgcagattggctgtttggcagtcacatgattcacgatcctcgttggcaagtggatagcgaaactgtttttgcttggcttccgccgcatgattgctgtgatgagattgccatgatgttccaccacatgtcatatagagttaagttaataggtgagcaaatgttcatatggaagctgtttatagagttgtttggtgaagcctcaaagggactcatattgaatattatctttgatcttccaatctccctgtcccttggaaacatcctcactgtcagaagactgcaaatagtgaaatacacatggcatgtcaatcaaagaatgtaagaataaaaaccaggggcaggttcatatgacggcacgttcccacccgacatgctaccacatgttcataaggatcttggatttgcaaattccaattgaaagtttgtacataattcagttctagcatcttgtatctgtcaagagaaaatccgggtcttagtaagctaacttctcgactgacaggacgcctagtagctggatgtatacacttcgtggtcgaatctgaatgttcgcatgattggcgttcaaatgtttttatttgagttaatgcatgttcgacattatatatcagaaaaactgtggtcacgttatttttttaaaaaaatgtgatcaggatg

SEQ ID NO: 66721 - DNA, 1671 bp, Zea Mays
gaggatggtggtcatctgattaaagcatgcctcctcgcccctcgctcatccacctgaagctgtggcgacttcggtcttgtcacctgcttcgtcgatctgtgagaaaagcaatcaccggtctgtgagatcaagttcaagaggctggacactggggaagagaaagtttggctgtgtttttgctgtactcacttctgtggtcggaatggtttgtcaaacttggggacctgccgggcatgtggcaccatggttctcctcagctgcttcagcgccttctcctcctcaatctacagaaacagatattgcgtcggtcgatcagcagcagaaggtaaatttgttgtcaaggggcagggaatgcatctgtaccttttgcgcgaattcgttctcctctctcaaccttttccctctcatcaacatgcaacacaaattgttgaacttcagtgagaggtttccgctctttctccggaagtgggatagggtccctgtgacaaagattacaagaggctgtttacatatctcgctcacagagaaaggacgaattcttaagagaaatggctgcatgtgttactcactctttcagtacagggcttaggttcaggcttcggcggcacctgaacaaggattatgtttagacaggatgaatcaaagattgtggtgccaactgaaaacgtccagagtaaaattttcacatgccatcggatagtctgtggtgtatgggtaagggttagctttgtgaaccctggccttttcctcctccaccttcttttgtaagagttgtgcttctagctgcctctcttttaattgacctctttcctgcaaaaagggatgcataattattctgttgcacacacattatgagaaatgctgtgactcaaaaaagaattacatctcacgaacctctgtttgtagactgaaagggtttggtatggtgcatctaggcacaccttgcctgttactgtttgaagaacattcagagtgaagagagagctgcaaaataggacaagagcttaataagatcttgacaaaaaaacagtatagtgactataccaccgtatggctgtcgataaataaataccttgtcaaataagtcagcaactgatggaggacccaagcgaacatcggtacaaaaacggaattctttgggagctgtgacctgagacttaggatggacaaacactccaatgtctcccttactctcaagaatctgcatgacatgaggccccaaacttaagctccaacttcataatctaatcaaatgtatgttcatctatgacatgtgttagtacctttttgtttagtggcttggccctgaacttgggggccttctccagctcctccagttcaagttcctgagaacttttcacactgttgaaagaggatgttagaatctatcttttttttaaaaaaaaagacgtctgctaaaatgactttggttcatcaattttgtgtggcaaaagcaaaccttggtggcctagctctatttgctgtatgaagttgcggtggctttcgttgtgtcgatttcagtggcttatttcgactctgcaagattgaaacattgaactctgtaggtaaaaaaaaaaaaacactagcatcctaagatgcaggatgcagcagctaggcaactaggacctacccggatagtatctgcacaagatacttccgaacaggtgtccg

SEQ ID NO: 66722 - DNA, 2820 bp, Zea Mays
caagcccaagagacaattcagcacctccttactacgtgcatttttgcccggcaattttggcatacaattcttgctgctattggcttggggcatctcactccgactgctgatgagggaaatttttcagaatggtggggaaaggtgtgccttagagttaccaagacaaggaaaaagggacttaactctctgataatcctgggggcttggtgcctatggcttcagagaaacagagcagtgtttcatggggagtctccttcattgcccaggattcttagatgtttctcagatgagtgtgtttgctgggttttagcaggagctaaggaggtcggtagtatgggcttagttgctgccctgggcgaggtcgggtctagtttcagtacttctatgtaatttctttcggaattttgtgggtctttgggagatttgctttgcaacatctcctcttttgtaatgtttctcttcctctttattatataagatgcgcagttctcctgcgcgttctcaaaaaaaaaaaaaaaaaaaaaacttgtcgtgttgtgtcatctcggtccataaacttttaaagtatgtctatgtcatcttggtacataaacttttaaagtatgtctgataaaactttattcgttgttcgggtctttcttaggtccaaactgattgtggttttaccatgcagcctacaactgacatatgaaccccatatgtcagactatgtatctactattttcttacgaacccattcttgggataccagcgttccaaaaaaacctcaatccagtcaccactcccgaccaaaagccacaccaagcccgcttcacccaatttatcgacgggatgacctcgccggcgagagtgacaaatggagacggcagcggcggcggccggcgtggagctaggctcctcgaagccccaaatcgccacgcaggcagagatggcggaggcccaggtgctgctcgcctaccacgaccagtgcgcgcacggcgcacctcatcccgatcaacaagtgtcgtgtcgccgagttgtacctcccctggaagtgctagcccgagcgtcgtgcctatgagaagtttcagtaagagctcgtcatggagcggatgctccagatgcagaatatccgtgaggcgcaggagaccaaggtcaagggaggcgcctccattggcctcatcgcagccatcgccaagctcccctgatccggtcccgctccgatccgcttgattaaggtgagctctgactccatcacgccgtttcgtgtcatgtaaccgatggctgaacgacaccttgaagttttgaatacaaatccgtggtttagactgacagactcgcctctgtttggctgggatgttgcctagaaccaactgttgcggcatggccaccgcagcgatttgtgcctcggcatgtcgctggagatggaggagcagcagcgacaggtacatcatggcgagcaacggcgatgggcaaaacacgggaaggtgagagagaaccgagaaaagaaagagaagaggtacataggctgacatatggggtccatatgccagttctagtctgtatggtgaaacaaaaatccgtttagacctaagagagacccgaacaacgaataaggctttaagagacatactttgaaagtttatggaccgggatgacacaacacgacaagtttaaggaccagaaatgtattttactaaatttctaattgaaacgacactcctaacttgagttccaactgttcaaatatattataagtgaattgttcacctcttcctatcaacttaagcttttgagctaaattggttggtgcatgcaacattgcaacttaatatggtattagagccagaggtctctagtttgaatcctagttagcgcaattaaaataaaataattgtttctcgctcatattccacgtctgggacccaagagaggctcgacgtaagagggagtgttgaaatacaatataagtgaattgtccacctcctcctatcagcttaaactgttgggttgcacgtgcatgcagcttaataccaacaacaataataataacaataacaataagggtggaccatataagtgggagcaggggcgaacccacaggggttcctagtgggccacggcacaccctaagcttgcccaccaagaccccccagcccacagtgtcttcaagccagtgttgcatgttgcctgatgccttggccggttggcccttgttacgtagcggtagtcttcagagctcccgccatcgccgcctgcagagctcgcactagcgcttctcgtctcacgtcgccgccgtagcactcgccaaccacgctcacacaaatttgtaggttcctgtcacgccacacccatgctcccgctgtcctgcaggttcgtcacgctcccgcagccgtcagcccacacaggttcgctgcgcgccgccgccatagcagctcgcaaagccactagacgccagacgaggctggccagcgccagccgccaggctgccgcgcctgttgctccggcagacagctatcccagtcttgaacaatgtttgtgatttttaattcccagtttttaaggtttgtagtgtgatttctaaacccttgatgctagttttgattgtaaatgtgcaactaatgatttgtgctgcaatttagaaatgtatctcattttttattgttgtgatagttttcactatgatttttttattgcggcacacactatatcaaaatcctaggtctgccactgagtgggagtttgaaaaaggaataaactcaggcaaagccttcccgctgcaaatgcagagaggctgcttcgaacctgtgacctggtgactcaacagctctcaccggtcac

SEQ ID NO: 66723 - DNA, 2234 bp, Zea Mays
gttacatgttatctataaaattgtgttataaaacttttaatcgagagaacatattttattcttcatttcattttattcttactgatgtagtaacattagttttctaaatgtgatgaaactagtgaggatggccttgaaatgtcagtattcccccaaagaagggagtactaattcctaaaacacgtttcggggcgaagcaattctatcctcatcaatcatcggtagggttccggcgattccccatggccggccgccaccgaaacccgctgccaccttcctacccccgcttcacccccacctcccgccacaccatcccctcgacgactaccgcgacccgccgcgcctccccccgcaccaccatatcgacgacttccgcgatccgtcccgcctgccgcctggccaccccgacagcttccaggagccgccgccaccgcatcttcgtcatttcgtgggccacggccacggcggtgccggtggccccctgccacctcagccgcatgtggtagcagcgctggaggagcggctgggcgccgagatcgacgaggcgcatgcgctgctcgcgcagaaccagcgactggctgcgacccacgtggcgctcgtgcaggaggtcgctgccgcgcggcacgagctcggccgcaccgcgaacgcgctcacttccgctcaggaggagagcgacctacgccttcgcgaggtttatgagaggtcactgaagatggaagcagagcttcgggcagtacatgaaatgagagcagatcttgcccaagttcgtatggacattcaaaacctgggtgcagagaggcaggaactcatgggccaagttcagggattaacacaagatttggctcggtctgcagaagacttgcagaaggtatctgcattaaaatctgagatccaagagatcaaacatgaaacacaacatttgaggtacattctgttaaatctttgacctactcttttttgaatatagagaaggtttaaggatttttggcatgcatacaaactcgttattaatgatgcaattatgcacaagagaagcaatgatgcgcaacctgtgtatccgagaaaaaaaatcattattaatgttttatctgctcttccctgctttggcttacgcctttagctcttcccaagcagcatttatgagtgaacattgtcattgttcccttccttttcacctggacaacctagtcaaaacacccctcactcgaaactggaatgatatgttcaaaaagggatttgatggaattttgattgtatgttgagtaatagagagaaaggcgaatctgcaatgaatacctttgcttttattcaactgtatggcatttgttatgacccaatatgcagatcttgtattgagcttgagaagaaaggatatgcagagagttatgagcagggacaggagatgcagaaaaatttgatttcagtggcttctgaggtggagaaacttcgagctgaggttgctaacgcggagaagaggtcacgggccattgtgtctgcaggcaatcaaggttataatggaagctatgggaaccccaaggccaattatgctgcaaacccttataactctggatatggcatgaatcaagcaactgctgccactgattctggttctcagtatggaactggtgcaacgcatggttcttggggtgcctatgacttgcaaagggcgtccgggcgtagataagtactgcgaattcgtcaggtctttcacggaagctttggccatgcctctatgattgttgtggtggatcagatgttgaacaggtggggcacaggtatagatgaatagcgcacacatttgctttagtttagcttctatcggcctgtgcaagggaacatatatctgttgcatcgagtgtcaatgtattggaagttttctatcgagcatgaatatattaaggatacgagcgtcgtgatgtttaactaattattattagttcccctcactctcacccaagaaaataataatgaaactttgaactagttaggtggttattaggtctatataagttgaactggacattttaacatgatatatacatggacgggattcttaggatcgtacacagcccaagtaagatgatgagcagccgattttaagatgaatttctatgttgtcacagcgatatcactaaaaatctcgtacgccgtgagttcatccaaatgttctccgctacttaaccgtacaatgagcctttagacgactaccatggctgaaacaggcggaaaacaac

SEQ ID NO: 66724 - DNA, 2677 bp, Zea Mays
agtactaattcctaaaacacgtttcggggcgaagcaattctatcctcatcaatcatcggtagggttccggcgattccccatggccggccgccaccgaaacccgctgccaccttcctacccccgcttcacccccacctcccgccacaccatcccctcgacgactaccgcgacccgccgcgcctccccccgcaccaccatatcgacgacttccgcgatccgtcccgcctgccgcctggccaccccgacagcttccaggagccgccgccaccgcatcttcgtcatttcgtgggccacggccacggcggtgccggtggccccctgccacctcagccgcatgtggtagcagcgctggaggagcggctgggcgccgagatcgacgaggcgcatgcgctgctcgcgcagaaccagcgactggctgcgacccacgtggcgctcgtgcaggaggtcgctgccgcgcggcacgagctcggccgcaccgcgaacgcgctcacttccgctcaggaggagagcgacctacgccttcgcgaggtttatgagaggtcactgaagatggaagcagagcttcgggcagtacatgaaatgagagcagatcttgcccaagttcgtatggacattcaaaacctgggtgcagagaggcaggaactcatgggccaagttcagggattaacacaagatttggctcggtctgcagaagacttgcagaaggtatctgcattaaaatctgagatccaagagatcaaacatgaaacacaacatttgaggtacattctgttaaatctttgacctactcttttttgaatatagagaaggtttaaggatttttggcatgcatacaaactcgttattaatgatgcaattatgcacaagagaagcaatgatgcgcaacctgtgtatccgagaaaaaaaatcattattaatgttttatctgctcttccctgctttggcttacgcctttagctcttcccaagcagcatttatgagtgaacattgtcattgttcccttccttttcacctggacaacctagtcaaaacacccctcactcgaaactggaatgatatgttcaaaaagggatttgatggaattttgattgtatgttgagtaatagagagaaaggcgaatctgcaatgaatacctttgcttttattcaactgtatggcatttgttatgacccaatatgcagatcttgtattgagcttgagaagaaaggatatgcagagagttatgagcagggacaggagatgcagaaaaatttgatttcagtggcttctgaggtggagaaacttcgagctgaggttgctaacgcggagaagaggtcacgggccattgtgtctgcaggcaatcaaggtatgatctaagtaggaggttatctatttttagtatatcgcttctgttccaaatgtctgctacgtatgtgatcaattaggtgacatgaccttgtcaacaaaactacccaagttttaagataatgctccaaaagattgcttccagagtgattgtgaatttgagagttgaaaaatctatatgctaaaacctaagctatccatatatattagtgctgaactatcagcctgttgtaaaatgtgatgtgttagctgattcgtgatctgactataggcgaagttgattagtaatctggcatagtaggtgaaactggtttgtaatctggcataataggcgtaggattactaggtgaagctgatctgtctctgtgtcagggattgatttactgaccggaaagtccagtttctcggtaaaatattttgttaccgctcaagtacgagagatgtttctcgctacggtttttggtgttttccgattctaaattaaaaaaaatatgaagtcaatattttttagtcaaaatgaaatttcgctacagtaaaaacgaaaaggtaatccctgctctgtttatgtggcatgtgtgctactcataatgcagcgactatcctgcaggttataatggaagctatgggaaccccaaggccaattatgctgcaaacccttataactctggatatggcatgaatcaagcaactgctgccactgattctggttctcagtatggaactggtgcaacgcatggttcttggggtgcctatgacttgcaaagggcgtccgggcgtagataagtactgcgaattcgtcaggtctttcacggaagctttggccatgcctctatgattgttgtggtggatcagatgttgaacaggtggggcacaggtatagatgaatagcgcacacatttgctttagtttagcttctatcggcctgtgcaagggaacatatatctgttgcatcgagtgtcaatgtattggaagttttctatcgagcatgaatatattaaggatacgagcgtcgtgatgtttaactaattattattagttcccctcactctcacccaagaaaataataatgaaactttgaactagttaggtggttattaggtctatataagttgaactggacattttaacatgatatatacatggacgggattcttaggatcgtacacagcccaagtaagatgatgagcagccgattttaagatgaatttctatgttgtcacagcgatatcactaaaaatctcgtacgccgtgagttcatccaaatgttctccgctacttaaccgtacaatgagcctttagacgactaccatggctgaaacaggcggaaaacaac

SEQ ID NO: 66725 - DNA, 1258 bp, Zea Mays
ggtgactctccttgcgccaagcaagctaccacacaaaggagaagctagagctcatgcacgggtgacctcaacggtgacagtggctaccatggaggccgttgctacttcctcctcgtcgacgatgtgtcccactacgtttatgagaggtcactgaagatggaagcagagcttcgggcagtacatgaaatgagagcagatcttgcccaagttcgtatggacattcaaaacctgggtgcagagaggcaggaactcatgggccaagttcagggattaacacaagatttggctcggtctgcagaagacttgcagaaggtatctgcattaaaatctgagatccaagagatcaaacatgaaacacaacatttgagatcttgtattgagcttgagaagaaaggatatgcagagagttatgagcagggacaggagatgcagaaaaatttgatttcagtggcttctgaggtggagaaacttcgagctgaggttgctaacgcggagaagaggtcacgggccattgtgtctgcaggcaatcaaggttataatggaagctatgggaaccccaaggccaattatgctgcaaacccttataactctggatatggcatgaatcaagcaactgctgccactgattctggttctcagtatggaactggtgcaacgcatggttcttggggtgcctatgacttgcaaagggcgtccgggcgtagataagtactgcgaattcgtcaggtctttcacggaagctttggccatgcctctatgattgttgtggtggatcagatgttgaacaggtggggcacaggtatagatgaatagcgcacacatttgctttagtttagcttctatcggcctgtgcaagggaacatatatctgttgcatcgagtgtcaatgtattggaagttttctatcgagcatgaatatattaaggatacgagcgtcgtgatgtttaactaattattattagttcccctcactctcacccaagaaaataataatgaaactttgaactagttaggtggttattaggtctatataagttgaactggacattttaacatgatatatacatggacgggattcttaggatcgtacacagcccaagtaagatgatgagcagccgattttaagatgaatttctatgttgtcacagcgatatcactaaaaatctcgtacgccgtgagttcatccaaatgttctccgctacttaaccgtacaatgagcctttagacgactaccatggctgaaacaggcggaaaacaac

SEQ ID NO: 66726 - DNA, 1153 bp, Zea Mays
aacaatcttggtatggatccatggctgttggtttatgagaggtcactgaagatggaagcagagcttcgggcagtacatgaaatgagagcagatcttgcccaagttcgtatggacattcaaaacctgggtgcagagaggcaggaactcatgggccaagttcagggattaacacaagatttggctcggtctgcagaagacttgcagaaggtatctgcattaaaatctgagatccaagagatcaaacatgaaacacaacatttgagatcttgtattgagcttgagaagaaaggatatgcagagagttatgagcagggacaggagatgcagaaaaatttgatttcagtggcttctgaggtggagaaacttcgagctgaggttgctaacgcggagaagaggtcacgggccattgtgtctgcaggcaatcaaggttataatggaagctatgggaaccccaaggccaattatgctgcaaacccttataactctggatatggcatgaatcaagcaactgctgccactgattctggttctcagtatggaactggtgcaacgcatggttcttggggtgcctatgacttgcaaagggcgtccgggcgtagataagtactgcgaattcgtcaggtctttcacggaagctttggccatgcctctatgattgttgtggtggatcagatgttgaacaggtggggcacaggtatagatgaatagcgcacacatttgctttagtttagcttctatcggcctgtgcaagggaacatatatctgttgcatcgagtgtcaatgtattggaagttttctatcgagcatgaatatattaaggatacgagcgtcgtgatgtttaactaattattattagttcccctcactctcacccaagaaaataataatgaaactttgaactagttaggtggttattaggtctatataagttgaactggacattttaacatgatatatacatggacgggattcttaggatcgtacacagcccaagtaagatgatgagcagccgattttaagatgaatttctatgttgtcacagcgatatcactaaaaatctcgtacgccgtgagttcatccaaatgttctccgctacttaaccgtacaatgagcctttagacgactaccatggctgaaacaggcggaaaacaac

SEQ ID NO: 66727 - DNA, 2577 bp, Zea Mays
ctttttcaaattttttgggtgccaaatatttgccctccagtgctgtccacggctcagcctcacacacgcgcgagagcaaattgcagagctgctcgtcgccggcgatcgccgcagggttcgtccgagaggggagaggctctctgtatcggggcatggtgatcctggaccgcactccggccgcggcgcagggggccgcctgtagcccgctcccgaagtcgcctaggttttcgtgggaggtggcctcgccgccctcggaccccatcctcccgtacctcaggtctattagcagggccatggatgagctcggaacagggcctcagtatgacacgacagccttagacaggctcaagcattacttgactgaatgcattgcaaaatatggggatgactaccaatactccactgatccacggttgctcaagatttggatcctctatgcagatgcaattgaggacttccccagtgtttacaaccagctggaggagaaaggaatgtttcaggagcatgcactattgtatgactcatatgcacaatatctaattgctcatgggaaattggttgaggctgataaggtgtatggaatcggtatttctaggaaagcagagccccttgataatttgaagaagatgcacttgacatttctaaaacatctggagaatattttagaagaagcagatgcggaagaacagtgcaaatcatcaaacatacagaagaatgaaccttctgtgatagatccatggtctccttctactaggaatactttactggagaaaattaatggtggcttgaggaagttttctggctattataagagtaacaaggtgtactgtggaaaggtgcctttgacttcttcgttgaatgttttaagaaacaagggcatcaagttaggtataactgcaattgttttgtttttcagtattgcagaatgttgccgtacattctgaatcatgttcctaatttgactacttaaatgattaatgctcccaagttacaatgagtacattatttgacaaatgtatcctcttctttgtttcaaaggattcgaacctcgagtaacgggaccaaaacccgctgccttaacacttggccatgccccatgtcatttcattttatgagacactaataaacacttattatttttatatattattcgtcaatcccacttcaattacctaaaaatgtttatttatgttgttattacaaaatgcaactacaattccttgtgtcaaggtggtagaaagtatcaaatcaaaggatctactggcactggtgcttttgctaaagtatacaaagccactgttgacagtaatgcggaagaaatggttgctttgaagattcagaatccctcatttactttggaattttacatgtattgccaacttgatctgcgtatatctgatgtcgagagaccaagctttggctacgcacatgaaatgcatatcttctctgatgtcagtgtgttagtttgtgattacctgccgtatggaactctcctggatgtcataaattctcacttagtagtcggtcgatacatggatgaagttctatgcatgtattataccatagagatgctgaacatgctggaaacactgcatagtgttggcataatccatggtgatttcaaacctgacaacatccttgtttgctacccgagtggagagatcacagaggacaatttccgaagtgaaaaacgagtagagaggaatcaggggctctgccttgttgattggggccgtggcattgatctggctcttttcccctcctgcacggagttccacggggactgtggaacctcaggattcagatgcatcgagatgcaagaacatagaaactggacttatcaggtcgacacatacggcctctgcgtcgttgtgcacatgatgctacacgggtcaggcatgaacgtcaagaaggttcccaggattggtggaggctacgaatggcaacctaaacagccgtttaaaaggtactggaacgttgatctgtggcagaagctcttctcgacgctgctgaacccgccctcgaacgacagcgacgtggccgcgctccagagcctgcgagcgtcattccggcagtacatgtgcagcaaccggcagctggtcggcaagctgaaccagctgctggcgaaacaaaaggcctcgctgtgctcgtcctaggctgcgtgacaaagccgaaacgcggctggtgcctgtgccccccatgtaatgtaactccggctaggctaatacgaactcacatgtatccttaagtaatttactagctagttacccgtgatttggtagggttgttatatatcattaaaataagtattaagatatttatttaaatataattattgtttatttttatacactatggaatgtgtggtggtttagtggttagtcccaaatttctatgttaggaagcgtggtttgagtgctcactttgcactgttttttttaggctatgatagatgtacgagcgggtcagacgttagataggtgtgcagtagttggttgcatgggtgctggggttcatagacattagctgagaaagcgtgggcgctgggcgtgggacctaaagggcacaggcgccgag

SEQ ID NO: 66728 - DNA, 2288 bp, Zea Mays
ctttttcaaattttttgggtgccaaatatttgccctccagtgctgtccacggctcagcctcacacacgcgcgagagcaaattgcagagctgctcgtcgccggcgatcgccgcagggttcgtccgagaggggagaggctctctgtatcggggcatggtgatcctggaccgcactccggccgcggcgcagggggccgcctgtagcccgctcccgaagtcgcctaggttttcgtgggaggtggcctcgccgccctcggaccccatcctcccgtacctcaggtctattagcagggccatggatgagctcggaacagggcctcagtatgacacgacagccttagacaggctcaagcattacttgactgaatgcattgcaaaatatggggatgactaccaatactccactgatccacggttgctcaagatttggatcctctatgtaacctgattgattttatatatcatttctgataccattcctcctgggttgttgtttattattttccttatctttttggggtcttttgtgattcttgcgttttaggcagatgcaattgaggacttccccagtgtttacaaccagctggaggagaaaggaatgtttcaggagcatgcactattgtatgactcatatgcacaatatctaattgctcatgggaaattggttgaggctgataaggtgtatggaatcggtatttctaggaaagcagagccccttgataatttgaagaagatgcacttgacatttctaaaacatctggagaatattttagaagaagcagatgcggaagaacagtgcaaatcatcaaacatacagaagaatgaaccttctgtgatagatccatggtctccttctactaggaatactttactggagaaaattaatggtggcttgaggaagttttctggctattataagagtaacaaggtgtactgtggaaaggtggtagaaagtatcaaatcaaaggatctactggcactggtgcttttgctaaagtatacaaagccactgttgacagtaatgcggaagaaatggttgctttgaagattcagaatccctcatttactttggaattttacatgtattgccaacttgatctgcgtatatctgatgtcgagagaccaagctttggctacgcacatgaaatgcatatcttctctgatgtcagtgtgttagtttgtgattacctgccgtatggaactctcctggatgtcataaattctcacttagtagtcggtcgatacatggatgaagttctatgcatgtattataccatagagatgctgaacatgctggaaacactgcatagtgttggcataatccatggtgatttcaaacctgacaacatccttgtttgctacccgagtggagagatcacagaggacaatttccgaagtgaaaaacgagtagagaggaatcaggggctctgccttgttgattggggccgtggcattgatctggctcttttcccctcctgcacggagttccacggggactgtggaacctcaggattcagatgcatcgagatgcaagaacatagaaactggacttatcaggtcgacacatacggcctctgcgtcgttgtgcacatgatgctacacgggtcaggcatgaacgtcaagaaggttcccaggattggtggaggctacgaatggcaacctaaacagccgtttaaaaggtactggaacgttgatctgtggcagaagctcttctcgacgctgctgaacccgccctcgaacgacagcgacgtggccgcgctccagagcctgcgagcgtcattccggcagtacatgtgcagcaaccggcagctggtcggcaagctgaaccagctgctggcgaaacaaaaggcctcgctgtgctcgtcctaggctgcgtgacaaagccgaaacgcggctggtgcctgtgccccccatgtaatgtaactccggctaggctaatacgaactcacatgtatccttaagtaatttactagctagttacccgtgatttggtagggttgttatatatcattaaaataagtattaagatatttatttaaatataattattgtttatttttatacactatggaatgtgtggtggtttagtggttagtcccaaatttctatgttaggaagcgtggtttgagtgctcactttgcactgttttttttaggctatgatagatgtacgagcgggtcagacgttagataggtgtgcagtagttggttgcatgggtgctggggttcatagacattagctgagaaagcgtgggcgctgggcgtgggacctaaagggcacaggcgccgag

SEQ ID NO: 66729 - DNA, 2288 bp, Zea Mays
ctttttcaaattttttgggtgccaaatatttgccctccagtgctgtccacggctcagcctcacacacgcgcgagagcaaattgcagagctgctcgtcgccggcgatcgccgcagggttcgtccgagaggggagaggctctctgtatcggggcatggtgatcctggaccgcactccggccgcggcgcagggggccgcctgtagcccgctcccgaagtcgcctaggttttcgtgggaggtggcctcgccgccctcggaccccatcctcccgtacctcaggtctattagcagggccatggatgagctcggaacagggcctcagtatgacacgacagccttagacaggctcaagcattacttgactgaatgcattgcaaaatatggggatgactaccaatactccactgatccacggttgctcaagatttggatcctctatgtaacctgattgattttatatatcatttctgataccattcctcctgggttgttgtttattattttccttatctttttggggtcttttgtgattcttgcgttttaggcagatgcaattgaggacttccccagtgtttacaaccagctggaggagaaaggaatgtttcaggagcatgcactattgtatgactcatatgcacaatatctaattgctcatgggaaattggttgaggctgataaggtgtatggaatcggtatttctaggaaagcagagccccttgataatttgaagaagatgcacttgacatttctaaaacatctggagaatattttagaagaagcagatgcggaagaacagtgcaaatcatcaaacatacagaagaatgaaccttctgtgatagatccatggtctccttctactaggaatactttactggagaaaattaatggtggcttgaggaagttttctggctattataagagtaacaaggtgtactgtggaaaggtgcctttgacttcttcgttgaatgttttaagaaacaagggcatcaagttaggtggtagaaagtatcaaatcaaaggatctactggcactggtgcttttgctaaagtatacaaagccactgttgacagtaatgcggaagaaatggttgctttgaagattcagaatccctcatttactttggaattttacatgtattgccaacttgatctgcgtatatctgatgtcgagagaccaagctttggctacgcacatgaaatgcatatcttctctgatgtcagtgtgttagtttgtgattacctgccgtatggaactctcctggatgtcataaattctcacttagtagtcggtcgatacatggatgaagttctatgcatgtattataccatagagatgctgaacatgctggaaacactgcatagtgttggcataatccatggtgatttcaaacctgacaacatccttgtttgctacccgagtggagagatcacagaggacaatttccgaagtgaaaaacgagtagagaggaatcaggggctctgccttgttgattggggccgtggcattgatctggctcttttcccctcctgcacggagttccacggggactgtggaacctcaggattcagatgcatcgagatgcaagaacatagaaactggacttatcaggcatgaacgtcaagaaggttcccaggattggtggaggctacgaatggcaacctaaacagccgtttaaaaggtactggaacgttgatctgtggcagaagctcttctcgacgctgctgaacccgccctcgaacgacagcgacgtggccgcgctccagagcctgcgagcgtcattccggcagtacatgtgcagcaaccggcagctggtcggcaagctgaaccagctgctggcgaaacaaaaggcctcgctgtgctcgtcctaggctgcgtgacaaagccgaaacgcggctggtgcctgtgccccccatgtaatgtaactccggctaggctaatacgaactcacatgtatccttaagtaatttactagctagttacccgtgatttggtagggttgttatatatcattaaaataagtattaagatatttatttaaatataattattgtttatttttatacactatggaatgtgtggtggtttagtggttagtcccaaatttctatgttaggaagcgtggtttgagtgctcactttgcactgttttttttaggctatgatagatgtacgagcgggtcagacgttagataggtgtgcagtagttggttgcatgggtgctggggttcatagacattagctgagaaagcgtgggcgctgggcgtgggacctaaagggcacaggcgccgag

SEQ ID NO: 66730 - DNA, 2524 bp, Zea Mays
ctttttcaaattttttgggtgccaaatatttgccctccagtgctgtccacggctcagcctcacacacgcgcgagagcaaattgcagagctgctcgtcgccggcgatcgccgcagggttcgtccgagaggggagaggctctctgtatcggggcatggtgatcctggaccgcactccggccgcggcgcagggggccgcctgtagcccgctcccgaagtcgcctaggttttcgtgggaggtggcctcgccgccctcggaccccatcctcccgtacctcaggtctattagcagggccatggatgagctcggaacagggcctcagtatgacacgacagccttagacaggctcaagcattacttgactgaatgcattgcaaaatatggggatgactaccaatactccactgatccacggttgctcaagatttggatcctctatgtaacctgattgattttatatatcatttctgataccattcctcctgggttgttgtttattattttccttatctttttggggtcttttgtgattcttgcgttttaggcagatgcaattgaggacttccccagtgtttacaaccagctggaggagaaaggaatgtttcaggagcatgcactattgtatgactcatatgcacaatatctaattgctcatgggaaattggttgaggctgataaggtgtatggaatcggtatttctaggaaagcagagccccttgataatttgaagaagatgcacttgacatttctaaaacatctggagaatattttagaagaagcagatgcggaagaacagtgcaaatcatcaaacatacagaagaatgaaccttctgtgatagatccatggtctccttctactaggaatactttactggagaaaattaatggtggcttgaggaagttttctggctattataagagtaacaaggtgtactgtggaaaggtgcctttgacttcttcgttgaatgttttaagaaacaagggcatcaagttaggtataactgcaattgttttgtttttcagtattgcagaatgttgccgtacattctgaatcatgttcctaatttgactacttaaatgattaatgctcccaagttacaatgagtacattatttgacaaatgtatcctcttctttgtttcaaaggattcgaacctcgagtaacgggaccaaaacccgctgccttaacacttggccatgccccatgtcatttcattttatgagacactaataaacacttattatttttatatattattcgtcaatcccacttcaattacctaaaaatgtttatttatgttgttattacaaaatgcaactacaattccttgtgtcaaggtggtagaaagtatcaaatcaaaggatctactggcactggtgcttttgctaaagtatacaaagccactgttgacagtaatgcggaagaaatggttgctttgaagattcagaatccctcatttactttggaattttacatgtattgccaacttgatctgcgtatatctgatgtcgagagaccaagctttggctacgcacatgaaatgcatatcttctctgatgtcagtgtgttagtttgtgattacctgccgtatggaactctcctgtggagagatcacagaggacaatttccgaagtgaaaaacgagtagagaggaatcaggggctctgccttgttgattggggccgtggcattgatctggctcttttcccctcctgcacggagttccacggggactgtggaacctcaggattcagatgcatcgagatgcaagaacatagaaactggacttatcaggtcgacacatacggcctctgcgtcgttgtgcacatgatgctacacgggtcaggcatgaacgtcaagaaggttcccaggattggtggaggctacgaatggcaacctaaacagccgtttaaaaggtactggaacgttgatctgtggcagaagctcttctcgacgctgctgaacccgccctcgaacgacagcgacgtggccgcgctccagagcctgcgagcgtcattccggcagtacatgtgcagcaaccggcagctggtcggcaagctgaaccagctgctggcgaaacaaaaggcctcgctgtgctcgtcctaggctgcgtgacaaagccgaaacgcggctggtgcctgtgccccccatgtaatgtaactccggctaggctaatacgaactcacatgtatccttaagtaatttactagctagttacccgtgatttggtagggttgttatatatcattaaaataagtattaagatatttatttaaatataattattgtttatttttatacactatggaatgtgtggtggtttagtggttagtcccaaatttctatgttaggaagcgtggtttgagtgctcactttgcactgttttttttaggctatgatagatgtacgagcgggtcagacgttagataggtgtgcagtagttggttgcatgggtgctggggttcatagacattagctgagaaagcgtgggcgctgggcgtgggacctaaagggcacaggcgccgag

SEQ ID NO: 66731 - DNA, 3161 bp, Zea Mays
atgaggacactccagcccattaggcccatcaatggaaccgagaatattgccgccgcgatgctggctgttggtaaaaagtcaagtcaaccaccagagtgctttgagattggagatcgaaggttgaaggctgaggacgggtcgcttgtgggcttccttttcccttctcttcgctttgttttttatcttctcgacaaaacctccaaggcacctccgttccccgttcgtcctccacacctgtatctcttccccatggccgggctcggcgctggactgggagcacgcccttccgcgaccttctaggccgggccttctaggacggaaggctccggccactcactgtcgctgcccctctccgtcccgtcggctccggcattttttttgtgtgcaggttacaactaaggtcgttttgctataactaggcctaactaatcctcccagtttgcattgttggcttgttgccggcaaattcgtagtgccaaaacgatgctttactgtgtcaagcaggctcacatgggtggaagatgagcttatggagaagcagaatatctccaaggaatgacttgggacgaggtacctaagagatatgagtggaatatcttcaagatgttagctaaggataggtgcgctcggagactagcaattaacataaaaggccacctttgaggcgtggaaaggccgaccatcttatgttagttcaaaaggattgccagaactatgcaagggcttaatggattactggaacgagagctgcttgcaaacttgttgcccatgttcttgactttgctgggacttcagttaagccatccattacttcaaatgaaattgacgcagcagttcatgatatgatcattgaggctgctacctatccttctccacttggatatcgtggatttctatatgtacatcagtaaatgagtctgtcaagggatacctgattcagctcctcagatgcagaatggggatattataaatattgatgtaaatgtgttccagaatggataccatgggggtaccttcagaacatttgcatgtggacaggaccagctccatccatccagcaccaagcggcaagcacgcacgctcccactcccacgccaacgccacgcagcagaaatcagcaatcttgggggtgggagggaaggagattcctggagaaagcgatcgagtgcgcatcaaaagaagcagtcttggacgaaagaagcagtcccggaggccggcacgagcaggagcaggcgcagcagggcacactaccaaatcccaatggggagcaggagcggaggagggagtgtcagtggcagctgcttgctactcttccccttcctcctcttgctccacctcatctctcttcgctcaggcccatcggcggtgctggtgtcggcggcggggtccggcgagccgtacgtgggcgtgacgatcggcacgcaggtgacgaacctgctgtcgccgtcggacctggcgtcgttcctgcgcgcgcagcgcatcacccgcgtgcggctgtacgacgcggacccgcggctgctgtcggcgctagcggcctccggcgtgcgtgccatcgtgggggtccccaacgacgagctcctggcgctggggtcctccccggcgacggccgcctcctgggtgtcccgccgcgtggtccccttcgcgggcgtgaactccagcaccccgaacgtcgtctccgccatcgccgtcggggacgaggtcccgaccgcgctcccgtcggcgctgcccgtgctgctcccggccatccggtccctggcggccgcgctcgccgccgccaacctctcgtccatcccggtgtcgacgccgctgcccttctccgtggtggtggacccgttcccgccgtcgcaggccttcttcaaccagtccctggacaagtcgttcgtggcgccgctgctggcgcacctcgccaacacgtcggcgccgctgatgctgaacctgtacccctactactcgctgatgcagagcaagggcgtgatcccgctggacaacgcgctgttccggccgctgccgccgtcgatggagatggtggacccgaacacgctgctccggtacacgaacgtgttcgacgcgatgctggacgcggtgcgcgtggccgtgcggaacctgaacgcgacgggcggcgcgggcgtgccgatcctggtgacggagacggggtggccgtcgtacggggaccggcgcgcggagccgtacgcgggaagggacaacgcggacgcgtacaactcgaacctgatcaagcacgtgctggaggagaaggccggcacgcccatggcgcccggcgccggcgcgcagtccagcgcctacatctacgagctcttcaacgaggacctccgggcgggccccgtgtcggaggcgaactggggcctgttctacgggaacggcaccccggtgtacctcctgcacgtgtccggcgcggacgggttcctggggaacgacacgacggaccggaccttctgcgtggccgccgacgacgcggaccagaaggcggtgcaggcggccatggactgggcgtgcgggcccgggcgcgccgactgcacggcgatacagcccgggcaggcgtgctaccagcccgacgacgtgcgcagccacgcgtcgttcgcgttcgacgcctactaccagtcccagggccgcgccgccggctcgtgctacttccagggcgccggcatggtcaccaccgtggatccgagtcatgacagctgtttatttcctggaagtaagctgctgaacaacgccactggatccggcaacacgaacacatcttcgacacctacaagtgacgctgagggatctgcgatatggagactaagaactgggagggacaaagggctgttgctcttccttcggttggtacttagcattgcggtggctatcgtggtggattcgaacttttggacatgacaagaggttgctagctgtataataaactaaagccagaaattttgggtggtatgttagaggaggaaggaaggaggtgggcgggggattgggttatgcttagtgattctttattgttagataagcattaataaattgctcatttttcttcatctgatgaaatgtgtctataatttgttgaaatgtcccgatatttcaatctgctgggttcatgtccatacaatagttttttttatcaaattactgtaggattggcctacagttttttt

SEQ ID NO: 66732 - DNA, 3152 bp, Zea Mays
atgaggacactccagcccattaggcccatcaatggaaccgagaatattgccgccgcgatgctggctgttggtaaaaagtcaagtcaaccaccagagtgctttgagattggagatcgaaggttgaaggctgaggacgggtcgcttgtgggcttccttttcccttctcttcgctttgttttttatcttctcgacaaaacctccaaggcacctccgttccccgttcgtcctccacacctgtatctcttccccatggccgggctcggcgctggactgggagcacgcccttccgcgaccttctaggccgggccttctaggacggaaggctccggccactcactgtcgctgcccctctccgtcccgtcggctccggcattttttttgtgtgcaggttacaactaaggtcgttttgctataactaggcctaactaatcctcccagtttgcattgttggcttgttgccggcaaattcgtagtgccaaaacgatgctttactgtgtcaagcaggctcacatgggtggaagatgagcttatggagaatatctccaaggaatgacttgggacgaggtacctaagagatatgagtggaatatcttcaagatgttagctaaggataggtgcgctcggagactagcaattaacataaaaggccacctttgaggcgtggaaaggccgaccatcttatgttagttcaaaaggattgccagaactatgcaagggcttaatggattactggaacgagagctgcttgcaaacttgttgcccatgttcttgactttgctgggacttcagttaagccatccattacttcaaatgaaattgacgcagcagttcatgatatgatcattgaggctgctacctatccttctccacttggatatcgtggatttctatatgtacatcagtaaatgagtctgtcaagggatacctgattcagctcctcagatgcagaatggggatattataaatattgatgtaaatgtgttccagaatggataccatgggggtaccttcagaacatttgcatgtggacaggaccagctccatccatccagcaccaagcggcaagcacgcacgctcccactcccacgccaacgccacgcagcagaaatcagcaatcttgggggtgggagggaaggagattcctggagaaagcgatcgagtgcgcatcaaaagaagcagtcttggacgaaagaagcagtcccggaggccggcacgagcaggagcaggcgcagcagggcacactaccaaatcccaatggggagcaggagcggaggagggagtgtcagtggcagctgcttgctactcttccccttcctcctcttgctccacctcatctctcttcgctgcccatcggcggtgctggtgtcggcggcggggtccggcgagccgtacgtgggcgtgacgatcggcacgcaggtgacgaacctgctgtcgccgtcggacctggcgtcgttcctgcgcgcgcagcgcatcacccgcgtgcggctgtacgacgcggacccgcggctgctgtcggcgctagcggcctccggcgtgcgtgccatcgtgggggtccccaacgacgagctcctggcgctggggtcctccccggcgacggccgcctcctgggtgtcccgccgcgtggtccccttcgcgggcgtgaactccagcaccccgaacgtcgtctccgccatcgccgtcggggacgaggtcccgaccgcgctcccgtcggcgctgcccgtgctgctcccggccatccggtccctggcggccgcgctcgccgccgccaacctctcgtccatcccggtgtcgacgccgctgcccttctccgtggtggtggacccgttcccgccgtcgcaggccttcttcaaccagtccctggacaagtcgttcgtggcgccgctgctggcgcacctcgccaacacgtcggcgccgctgatgctgaacctgtacccctactactcgctgatgcagagcaagggcgtgatcccgctggacaacgcgctgttccggccgctgccgccgtcgatggagatggtggacccgaacacgctgctccggtacacgaacgtgttcgacgcgatgctggacgcggtgcgcgtggccgtgcggaacctgaacgcgacgggcggcgcgggcgtgccgatcctggtgacggagacggggtggccgtcgtacggggaccggcgcgcggagccgtacgcgggaagggacaacgcggacgcgtacaactcgaacctgatcaagcacgtgctggaggagaaggccggcacgcccatggcgcccggcgccggcgcgcagtccagcgcctacatctacgagctcttcaacgaggacctccgggcgggccccgtgtcggaggcgaactggggcctgttctacgggaacggcaccccggtgtacctcctgcacgtgtccggcgcggacgggttcctggggaacgacacgacggaccggaccttctgcgtggccgccgacgacgcggaccagaaggcggtgcaggcggccatggactgggcgtgcgggcccgggcgcgccgactgcacggcgatacagcccgggcaggcgtgctaccagcccgacgacgtgcgcagccacgcgtcgttcgcgttcgacgcctactaccagtcccagggccgcgccgccggctcgtgctacttccagggcgccggcatggtcaccaccgtggatccgagtcatgacagctgtttatttcctggaagtaagctgctgaacaacgccactggatccggcaacacgaacacatcttcgacacctacaagtgacgctgagggatctgcgatatggagactaagaactgggagggacaaagggctgttgctcttccttcggttggtacttagcattgcggtggctatcgtggtggattcgaacttttggacatgacaagaggttgctagctgtataataaactaaagccagaaattttgggtggtatgttagaggaggaaggaaggaggtgggcgggggattgggttatgcttagtgattctttattgttagataagcattaataaattgctcatttttcttcatctgatgaaatgtgtctataatttgttgaaatgtcccgatatttcaatctgctgggttcatgtccatacaatagttttttttatcaaattactgtaggattggcctacagttttttt

SEQ ID NO: 66733 - DNA, 3686 bp, Zea Mays
atgaggacactccagcccattaggcccatcaatggaaccgagaatattgccgccgcgatgctggctgttggtaaaaagtcaagtcaaccaccagagtgctttgagattggagatcgaaggttgaaggctgaggacgggtcgcttgtgggcttccttttcccttctcttcgctttgttttttatcttctcgacaaaacctccaaggcacctccgttccccgttcgtcctccacacctgtatctcttccccatggccgggctcggcgctggactgggagcacgcccttccgcgaccttctaggccgggccttctaggacggaaggctccggccactcactgtcgctgcccctctccgtcccgtcggctccgtgttcttcccaccgggtggacattgatacgagatcatgtgctaggcttcagagaaccgcggcacatttcgcggcgcatgcttactggtaaagtggtaaatttaattgttgcactgtacttctatccaatttatgtcagttccacatacagacatacttgccttttgtgccagtaatagttgagttttgagtgaacctatttttttacttgcttgggttggttacatgcctcccttatatgttttaggactcagattgaaaattaattttatgccgactcacgtgacatcgtgctgtttaaatgattttattgccacctgtccttaacactctgcatggttatcagacacttctagtaaacaatacactcatgactcatctagtcatctccatatctgtttctgcacatatctagtttgctttctccttgctgtttcaaggtgcaactatggacccatcgggtggctttggatggagtgtactgctctagatagttgtgaagttggagttcctaatgtcattgtccgcgaaggcattttttttgtgtgcaggttacaactaaggtcgttttgctataactaggcctaactaatcctcccagtttgcattgttggcttgttgccggcaaattcgtagtgccaaaacgatgctttactgtgtcaagcaggctcacatgggtggaagatgagcttatggagaatatctccaaggaatgacttgggacgaggtacctaagagatatgagtggaatatcttcaagatgttagctaaggataggtgcgctcggagactagcaattaacataaaaggccacctttgaggcgtggaaaggccgaccatcttatgttagttcaaaaggattgccagaactatgcaagggcttaatggattactggaacgagagctgcttgcaaacttgttgcccatgttcttgactttgctgggacttcagttaagccatccattacttcaaatgaaattgacgcagcagttcatgatatgatcattgaggctgctacctatccttctccacttggatatcgtggatttctatatgtacatcagtaaatgagtctgtcaagggatacctgattcagctcctcagatgcagaatggggatattataaatattgatgtaaatgtgttccagaatggataccatgggggtaccttcagaacatttgcatgtggacaggaccagctccatccatccagcaccaagcggcaagcacgcacgctcccactcccacgccaacgccacgcagcagaaatcagcaatcttgggggtgggagggaaggagattcctggagaaagcgatcgagtgcgcatcaaaagaagcagtcttggacgaaagaagcagtcccggaggccggcacgagcaggagcaggcgcagcagggcacactaccaaatcccaatggggagcaggagcggaggagggagtgtcagtggcagctgcttgctactcttccccttcctcctcttgctccacctcatctctcttcgctcaggcccatcggcggtgctggtgtcggcggcggggtccggcgagccgtacgtgggcgtgacgatcggcacgcaggtgacgaacctgctgtcgccgtcggacctggcgtcgttcctgcgcgcgcagcgcatcacccgcgtgcggctgtacgacgcggacccgcggctgctgtcggcgctagcggcctccggcgtgcgtgccatcgtgggggtccccaacgacgagctcctggcgctggggtcctccccggcgacggccgcctcctgggtgtcccgccgcgtggtccccttcgcgggcgtgaactccagcaccccgaacgtcgtctccgccatcgccgtcggggacgaggtcccgaccgcgctcccgtcggcgctgcccgtgctgctcccggccatccggtccctggcggccgcgctcgccgccgccaacctctcgtccatcccggtgtcgacgccgctgcccttctccgtggtggtggacccgttcccgccgtcgcaggccttcttcaaccagtccctggacaagtcgttcgtggcgccgctgctggcgcacctcgccaacacgtcggcgccgctgatgctgaacctgtacccctactactcgctgatgcagagcaagggcgtgatcccgctggacaacgcgctgttccggccgctgccgccgtcgatggagatggtggacccgaacacgctgctccggtacacgaacgtgttcgacgcgatgctggacgcggtgcgcgtggccgtgcggaacctgaacgcgacgggcggcgcgggcgtgccgatcctggtgacggagacggggtggccgtcgtacggggaccggcgcgcggagccgtacgcgggaagggacaacgcggacgcgtacaactcgaacctgatcaagcacgtgctggaggagaaggccggcacgcccatggcgcccggcgccggcgcgcagtccagcgcctacatctacgagctcttcaacgaggacctccgggcgggccccgtgtcggaggcgaactggggcctgttctacgggaacggcaccccggtgtacctcctgcacgtgtccggcgcggacgggttcctggggaacgacacgacggaccggaccttctgcgtggccgccgacgacgcggaccagaaggcggtgcaggcggccatggactgggcgtgcgggcccgggcgcgccgactgcacggcgatacagcccgggcaggcgtgctaccagcccgacgacgtgcgcagccacgcgtcgttcgcgttcgacgcctactaccagtcccagggccgcgccgccggctcgtgctacttccagggcgccggcatggtcaccaccgtggatccgagtcatgacagctgtttatttcctggaagtaagctgctgaacaacgccactggatccggcaacacgaacacatcttcgacacctacaagtgacgctgagggatctgcgatatggagactaagaactgggagggacaaagggctgttgctcttccttcggttggtacttagcattgcggtggctatcgtggtggattcgaacttttggacatgacaagaggttgctagctgtataataaactaaagccagaaattttgggtggtatgttagaggaggaaggaaggaggtgggcgggggattgggttatgcttagtgattctttattgttagataagcattaataaattgctcatttttcttcatctgatgaaatgtgtctataatttgttgaaatgtcccgatatttcaatctgctgggttcatgtccatacaatagttttttttatcaaattactgtaggattggcctacagttttttt

SEQ ID NO: 66734 - DNA, 1521 bp, Zea Mays
atgaggacactccagcccattaggcccatcaatggaaccgagaatattgccgccgcgatgctggctgttggtaaaaagtcaagtcaaccaccagagtgctttgagattggagatcgaaggttgaaggctgaggacgggtcgcttgtgggcttccttttcccttctcttcgctttgttttttatcttctcgacaaaacctccaaggcacctccgttccccgttcgtcctccacacctgtatctcttccccatggccgggctcggcgctggactgggagcacgcccttccgcgaccttctaggccgggccttctaggacggaaggctccggccactcactgtcgctgcccctctccgtcccgtcggctccggttacaactaaggtcgttttgctataactaggcctaactaatcctcccagtttgcattgttggcttgttgccggcaaattcgtagtgccaaaacgatgctttactgtgtcaagcaggctcacatgggtggaagatgagcttatggagaatatctccaaggaatgacttgggacgaggtacctaagagatatgagtggaatatcttcaagatgttagctaaggataggtgcgctcggagactagcaattaacataaaaggccacctttgaggcgtggaaaggccgaccatcttatgttagttcaaaaggattgccagaactatgcaagggcttaatggattactggaacgagagctgcttgcaaacttgttgcccatgttcttgactttgctgggacttcagttaagccatccattacttcaaatgaaattgacgcagcagttcatgatatgatcattgaggctgctacctatccttctccacttggatatcgtggatttctatatgtacatcagtaaatgagtctgtcaagggatacctgattcagctcctcagatgcagaatggggatattataaatattgatgtaaatgtgttccagaatggataccatgggggtaccttcagaacatttgcatgtggacaggtgaatgattctatcaagcattttctcaatgtcatgacagctgtttatttcctggaagtaagctgctgaacaacgccactggatccggcaacacgaacacatcttcgacacctacaagtgacgctgagggatctgcgatatggagactaagaactgggagggacaaagggctgttgctcttccttcggttggtacttagcattgcggtggctatcgtggtggattcgaacttttggacatgacaagaggttgctagctgtataataaactaaagccagaaattttgggtggtatgttagaggaggaaggaaggaggtgggcgggggattgggttatgcttagtgattctttattgttagataagcattaataaattgctcatttttcttcatctgatgaaatgtgtctataatttgttgaaatgtcccgatatttcaatctgctgggttcatgtccatacaatagttttttttatcaaattactgtaggattggcctacagttttttt

SEQ ID NO: 66735 - DNA, 1491 bp, Zea Mays
atgaggacactccagcccattaggcccatcaatggaaccgagaatattgccgccgcgatgctggctgttggtaaaaagtcaagtcaaccaccagagtgctttgagattggagatcgaaggttgaaggctgaggacgggtcgcttgtgggcttccttttcccttctcttcgctttgttttttatcttctcgacaaaacctccaaggcacctccgttccccgttcgtcctccacacctgtatctcttccccatggccgggctcggcgctggactgggagcacgcccttccgcgaccttctaggccgggccttctaggacggaaggctccggccactcactgtcgctgcccctctccgtcccgtcggctccggttacaactaaggtcgttttgctataactaggcctaactaatcctcccagtttgcattgttggcttgttgccggcaaattcgtagtgccaaaacgatgctttactgtgtcaagcaggctcacatgggtggaagatgagcttatggagaatatctccaaggaatgacttgggacgaggtacctaagagatatgagtggaatatcttcaagatgttagctaaggataggtgcgctcggagactagcaattaacataaaaggccacctttgaggcgtggaaaggccgaccatcttatgttagttcaaaaggattgccagaactatgcaagggcttaatggattactggaacgagagctgcttgcaaacttgttgcccatgttcttgactttgctgggacttcagttaagccatccattacttcaaatgaaattgacgcagcagttcatgatatgatcattgaggctgctacctatccttctccacttggatatcgtggatttctatatgtacatcagtaaatgagtctgtcaagggatacctgattcagctcctcagatgcagaatggggatattataaatattgatgtaaatgtgttccagaatggataccatgggggtaccttcagaacatttgcatgtggacaggtcatgacagctgtttatttcctggaagtaagctgctgaacaacgccactggatccggcaacacgaacacatcttcgacacctacaagtgacgctgagggatctgcgatatggagactaagaactgggagggacaaagggctgttgctcttccttcggttggtacttagcattgcggtggctatcgtggtggattcgaacttttggacatgacaagaggttgctagctgtataataaactaaagccagaaattttgggtggtatgttagaggaggaaggaaggaggtgggcgggggattgggttatgcttagtgattctttattgttagataagcattaataaattgctcatttttcttcatctgatgaaatgtgtctataatttgttgaaatgtcccgatatttcaatctgctgggttcatgtccatacaatagttttttttatcaaattactgtaggattggcctacagttttttt

SEQ ID NO: 66736 - DNA, 1802 bp, Zea Mays
atgaggacactccagcccattaggcccatcaatggaaccgagaatattgccgccgcgatgctggctgttggtaaaaagtcaagtcaaccaccagagtgctttgagattggagatcgaaggttgaaggctgaggacgggtcgcttgtgggcttccttttcccttctcttcgctttgttttttatcttctcgacaaaacctccaaggcacctccgttccccgttcgtcctccacacctgtatctcttccccatggccgggctcggcgctggactgggagcacgcccttccgcgaccttctaggccgggccttctaggacggaaggctccggccactcactgtcgctgcccctctccgtcccgtcggctccggttacaactaaggtcgttttgctataactaggcctaactaatcctcccagtttgcattgttggcttgttgccggcaaattcgtagtgccaaaacgatgctttactgtgtcaagcaggctcacatgggtggaagatgagcttatggagaatatctccaaggaatgacttgggacgaggtacctaagagatatgagtggaatatcttcaagatgttagctaaggataggtgcgctcggagactagcaattaacatgggcggtctatctgagtcaccaggttgcgggttgtatttgtgggggaacgtttgcctcgttttatgccttccccagacccaactcatgggaacctccaatgctggattctggatttcgtaatatttgactgtctatcagttcgtacgcgtcttcttatgataatcttgtagtttgtgggttatctacattaaactaatacaccaaattctccgcaaaaaaaaaacctaatacaccatgaccaactttcatcacgggtcacatttaatgattctgctaacatatcaatacacttccacatttggtatcaaagaaaaggccacctttgaggcgtggaaaggccgaccatcttatgttagttcaaaaggattgccagaactatgcaagggcttaatggattactggaacgagagctgcttgcaaacttgttgcccatgttcttgactttgctgggacttcagttaagccatccattacttcaaatgaaattgacgcagcagttcatgatatgatcattgaggctgctacctatccttctccacttggatatcgtggatttctatatgtacatcagtaaatgagtctgtcaagggatacctgattcagctcctcagatgcagaatggggatattataaatattgatgtaaatgtgttccagaatggataccatgggggtaccttcagaacatttgcatgtggacaggtcatgacagctgtttatttcctggaagtaagctgctgaacaacgccactggatccggcaacacgaacacatcttcgacacctacaagtgacgctgagggatctgcgatatggagactaagaactgggagggacaaagggctgttgctcttccttcggttggtacttagcattgcggtggctatcgtggtggattcgaacttttggacatgacaagaggttgctagctgtataataaactaaagccagaaattttgggtggtatgttagaggaggaaggaaggaggtgggcgggggattgggttatgcttagtgattctttattgttagataagcattaataaattgctcatttttcttcatctgatgaaatgtgtctataatttgttgaaatgtcccgatatttcaatctgctgggttcatgtccatacaatagttttttttatcaaattactgtaggattggcctacagttttttt

SEQ ID NO: 66737 - DNA, 2041 bp, Zea Mays
atgaggacactccagcccattaggcccatcaatggaaccgagaatattgccgccgcgatgctggctgttggtaaaaagtcaagtcaaccaccagagtgctttgagattggagatcgaaggttgaaggctgaggacgggtcgcttgtgggcttccttttcccttctcttcgctttgttttttatcttctcgacaaaacctccaaggcacctccgttccccgttcgtcctccacacctgtatctcttccccatggccgggctcggcgctggactgggagcacgcccttccgcgaccttctaggccgggccttctaggacggaaggctccggccactcactgtcgctgcccctctccgtcccgtcggctccgtgttcttcccaccgggtggacattgatacgagatcatgtgctaggcttcagagaaccgcggcacatttcgcggcgcatgcttactggtaaagtggtaaatttaattgttgcactgtacttctatccaatttatgtcagttccacatacagacatacttgccttttgtgccagtaatagttgagttttgagtgaacctatttttttacttgcttgggttggttacatgcctcccttatatgttttaggactcagattgaaaattaattttatgccgactcacgtgacatcgtgctgtttaaatgattttattgccacctgtccttaacactctgcatggttatcagacacttctagtaaacaatacactcatgactcatctagtcatctccatatctgtttctgcacatatctagtttgctttctccttgctgtttcaaggtgcaactatggacccatcgggtggctttggatggagtgtactgctctagatagttgtgaagttggagttcctaatgtcattgtccgcgaaggcattttttttgtgtgcaggttacaactaaggtcgttttgctataactaggcctaactaatcctcccagtttgcattgttggcttgttgccggcaaattcgtagtgccaaaacgatgctttactgtgtcaagcaggctcacatgggtggaagatgagcttatggagaatatctccaaggaatgacttgggacgaggtacctaagagatatgagtggaatatcttcaagatgttagctaaggataggtgcgctcggagactagcaattaacataaaaggccacctttgaggcgtggaaaggccgaccatcttatgttagttcaaaaggattgccagaactatgcaagggcttaatggattactggaacgagagctgcttgcaaacttgttgcccatgttcttgactttgctgggacttcagttaagccatccattacttcaaatgaaattgacgcagcagttcatgatatgatcattgaggctgctacctatccttctccacttggatatcgtggatttctatatgtacatcagtaaatgagtctgtcaagggatacctgattcagctcctcagatgcagaatggggatattataaatattgatgtaaatgtgttccagaatggataccatgggggtaccttcagaacatttgcatgtggacaggtcatgacagctgtttatttcctggaagtaagctgctgaacaacgccactggatccggcaacacgaacacatcttcgacacctacaagtgacgctgagggatctgcgatatggagactaagaactgggagggacaaagggctgttgctcttccttcggttggtacttagcattgcggtggctatcgtggtggattcgaacttttggacatgacaagaggttgctagctgtataataaactaaagccagaaattttgggtggtatgttagaggaggaaggaaggaggtgggcgggggattgggttatgcttagtgattctttattgttagataagcattaataaattgctcatttttcttcatctgatgaaatgtgtctataatttgttgaaatgtcccgatatttcaatctgctgggttcatgtccatacaatagttttttttatcaaattactgtaggattggcctacagttttttt

SEQ ID NO: 66738 - DNA, 2618 bp, Zea Mays
atgaggacactccagcccattaggcccatcaatggaaccgagaatattgccgccgcgatgctggctgttggtaaaaagtcaagtcaaccaccagagtgctttgagattggagatcgaaggttgaaggctgaggacgggtcgcttgtgggcttccttttcccttctcttcgctttgttttttatcttctcgacaaaacctccaaggcacctccgttccccgttcgtcctccacacctgtatctcttccccatggccgggctcggcgctggactgggagcacgcccttccgcgaccttctaggccgggccttctaggacggaaggctccggccactcactgtcgctgcccctctccgtcccgtcggctccggtacggataggcacgatcgctctgcccatgttctctgcatctgcgtgccaattcgtaaaaaaatagcttcgctgcctgctctcgtgtcagtgttcttcccaccgggtggacattgatacgagatcatgtgctaggcttcagagaaccgcggcacatttcgcggcgcatgcttactggtaaagtggtaaatttaattgttgcactgtacttctatccaatttatgtcagttccacatacagacatacttgccttttgtgccagtaatagttgagttttgagtgaacctatttttttacttgcttgggttggttacatgcctcccttatatgttttaggactcagattgaaaattaattttatgccgactcacgtgacatcgtgctgtttaaatgattttattgccacctgtccttaacactctgcatggttatcagacacttctagtaaacaatacactcatgactcatctagtcatctccatatctgtttctgcacatatctagtttgctttctccttgctgtttcaaggtgcaactatggacccatcgggtggctttggatggagtgtactgctctagatagttgtgaagttggagttcctaatgtcattgtccgcgaaggcattttttttgtgtgcaggttacaactaaggtcgttttgctataactaggcctaactaatcctcccagtttgcattgttggcttgttgccggcaaattcgtagtgccaaaacgatgctttactgtgtcaagcaggctcacatgggtggaagatgagcttatggagaatatctccaaggaatgacttgggacgaggtacctaagagatatgagtggaatatcttcaagatgttagctaaggataggtgcgctcggagactagcaattaacatgtatgaaccatgatctttgtctctttttctatttacccttaactctactgtattgtcttttactcttttggtgttttttccttctattcttgtttcttgtgtgtttaatctctagcttaccctaacttatttgggacaaaaaggttatgttgttgttgtattgttttgcactgaaggggcggtctatctgagtcaccaggttgcgggttgtatttgtgggggaacgtttgcctcgttttatgccttccccagacccaactcatgggaacctccaatgctggattctggatttcgtaatatttgactgtctatcagttcgtacgcgtcttcttatgataatcttgtagtttgtgggttatctacattaaactaatacaccaaattctccgcaaaaaaaaaacctaatacaccatgaccaactttcatcacgggtcacatttaatgattctgctaacatatcaatacacttccacatttggtatcaaagaaaaggccacctttgaggcgtggaaaggccgaccatcttatgttagttcaaaaggattgccagaactatgcaagggcttaatggattactggaacgagagctgcttgcaaacttgttgcccatgttcttgactttgctgggacttcagttaagccatccattacttcaaatgaaattgacgcagcagttcatgatatgatcattgaggctgctacctatccttctccacttggatatcgtggatttctatatgtacatcagtaaatgagtctgtcaagggatacctgattcagctcctcagatgcagaatggggatattataaatattgatgtaaatgtgttccagaatggataccatgggggtaccttcagaacatttgcatgtggacaggtcatgacagctgtttatttcctggaagtaagctgctgaacaacgccactggatccggcaacacgaacacatcttcgacacctacaagtgacgctgagggatctgcgatatggagactaagaactgggagggacaaagggctgttgctcttccttcggttggtacttagcattgcggtggctatcgtggtggattcgaacttttggacatgacaagaggttgctagctgtataataaactaaagccagaaattttgggtggtatgttagaggaggaaggaaggaggtgggcgggggattgggttatgcttagtgattctttattgttagataagcattaataaattgctcatttttcttcatctgatgaaatgtgtctataatttgttgaaatgtcccgatatttcaatctgctgggttcatgtccatacaatagttttttttatcaaattactgtaggattggcctacagttttttt

SEQ ID NO: 66739 - DNA, 3639 bp, Zea Mays
atgaggacactccagcccattaggcccatcaatggaaccgagaatattgccgccgcgatgctggctgttggtaaaaagtcaagtcaaccaccagagtgctttgagattggagatcgaaggttgaaggctgaggacgggtcgcttgtgggcttccttttcccttctcttcgctttgttttttatcttctcgacaaaacctccaaggcacctccgttccccgttcgtcctccacacctgtatctcttccccatggccgggctcggcgctggactgggagcacgcccttccgcgaccttctaggccgggccttctaggacggaaggctccggccactcactgtcgctgcccctctccgtcccgtcggctccggcattttttttgtgtgcaggttacaactaaggtcgttttgctataactaggcctaactaatcctcccagtttgcattgttggcttgttgccggcaaattcgtagtgccaaaacgatgctttactgtgtcaagcaggctcacatgggtggaagatgagcttatggagaatatctccaaggaatgacttgggacgaggtacctaagagatatgagtggaatatcttcaagatgttagctaaggataggtgcgctcggagactagcaattaacatgtatgaaccatgatctttgtctctttttctatttacccttaactctactgtattgtcttttactcttttggtgttttttccttctattcttgtttcttgtgtgtttaatctctagcttaccctaacttatttgggacaaaaaggttatgttgttgttgtattgttttgcactgaaggggcggtctatctgagtcaccaggttgcgggttgtatttgtgggggaacgtttgcctcgttttatgccttccccagacccaactcatgggaacctccaatgctggattctggatttcgtaatatttgactgtctatcagttcgtacgcgtcttcttatgataatcttgtagtttgtgggttatctacattaaactaatacaccaaattctccgcaaaaaaaaaacctaatacaccatgaccaactttcatcacgggtcacatttaatgattctgctaacatatcaatacacttccacatttggtatcaaagaaaaggccacctttgaggcgtggaaaggccgaccatcttatgttagttcaaaaggattgccagaactatgcaagggcttaatggattactggaacgagagctgcttgcaaacttgttgcccatgttcttgactttgctgggacttcagttaagccatccattacttcaaatgaaattgacgcagcagttcatgatatgatcattgaggctgctacctatccttctccacttggatatcgtggatttctatatgtacatcagtaaatgagtctgtcaagggatacctgattcagctcctcagatgcagaatggggatattataaatattgatgtaaatgtgttccagaatggataccatgggggtaccttcagaacatttgcatgtggacaggaccagctccatccatccagcaccaagcggcaagcacgcacgctcccactcccacgccaacgccacgcagcagaaatcagcaatcttgggggtgggagggaaggagattcctggagaaagcgatcgagtgcgcatcaaaagaagcagtcttggacgaaagaagcagtcccggaggccggcacgagcaggagcaggcgcagcagggcacactaccaaatcccaatggggagcaggagcggaggagggagtgtcagtggcagctgcttgctactcttccccttcctcctcttgctccacctcatctctcttcgctgcccatcggcggtgctggtgtcggcggcggggtccggcgagccgtacgtgggcgtgacgatcggcacgcaggtgacgaacctgctgtcgccgtcggacctggcgtcgttcctgcgcgcgcagcgcatcacccgcgtgcggctgtacgacgcggacccgcggctgctgtcggcgctagcggcctccggcgtgcgtgccatcgtgggggtccccaacgacgagctcctggcgctggggtcctccccggcgacggccgcctcctgggtgtcccgccgcgtggtccccttcgcgggcgtgaactccagcaccccgaacgtcgtctccgccatcgccgtcggggacgaggtcccgaccgcgctcccgtcggcgctgcccgtgctgctcccggccatccggtccctggcggccgcgctcgccgccgccaacctctcgtccatcccggtgtcgacgccgctgcccttctccgtggtggtggacccgttcccgccgtcgcaggccttcttcaaccagtccctggacaagtcgttcgtggcgccgctgctggcgcacctcgccaacacgtcggcgccgctgatgctgaacctgtacccctactactcgctgatgcagagcaagggcgtgatcccgctggacaacgcgctgttccggccgctgccgccgtcgatggagatggtggacccgaacacgctgctccggtacacgaacgtgttcgacgcgatgctggacgcggtgcgcgtggccgtgcggaacctgaacgcgacgggcggcgcgggcgtgccgatcctggtgacggagacggggtggccgtcgtacggggaccggcgcgcggagccgtacgcgggaagggacaacgcggacgcgtacaactcgaacctgatcaagcacgtgctggaggagaaggccggcacgcccatggcgcccggcgccggcgcgcagtccagcgcctacatctacgagctcttcaacgaggacctccgggcgggccccgtgtcggaggcgaactggggcctgttctacgggaacggcaccccggtgtacctcctgcacgtgtccggcgcggacgggttcctggggaacgacacgacggaccggaccttctgcgtggccgccgacgacgcggaccagaaggcggtgcaggcggccatggactgggcgtgcgggcccgggcgcgccgactgcacggcgatacagcccgggcaggcgtgctaccagcccgacgacgtgcgcagccacgcgtcgttcgcgttcgacgcctactaccagtcccagggccgcgccgccggctcgtgctacttccagggcgccggcatggtcaccaccgtggatccgagtcatgacagctgtttatttcctggaagtaagctgctgaacaacgccactggatccggcaacacgaacacatcttcgacacctacaagtgacgctgagggatctgcgatatggagactaagaactgggagggacaaagggctgttgctcttccttcggttggtacttagcattgcggtggctatcgtggtggattcgaacttttggacatgacaagaggttgctagctgtataataaactaaagccagaaattttgggtggtatgttagaggaggaaggaaggaggtgggcgggggattgggttatgcttagtgattctttattgttagataagcattaataaattgctcatttttcttcatctgatgaaatgtgtctataatttgttgaaatgtcccgatatttcaatctgctgggttcatgtccatacaatagttttttttatcaaattactgtaggattggcctacagttttttt

SEQ ID NO: 66740 - DNA, 3689 bp, Zea Mays
atgaggacactccagcccattaggcccatcaatggaaccgagaatattgccgccgcgatgctggctgttggtaaaaagtcaagtcaaccaccagagtgctttgagattggagatcgaaggttgaaggctgaggacgggtcgcttgtgggcttccttttcccttctcttcgctttgttttttatcttctcgacaaaacctccaaggcacctccgttccccgttcgtcctccacacctgtatctcttccccatggccgggctcggcgctggactgggagcacgcccttccgcgaccttctaggccgggccttctaggacggaaggctccggccactcactgtcgctgcccctctccgtcccgtcggctccgtgttcttcccaccgggtggacattgatacgagatcatgtgctaggcttcagagaaccgcggcacatttcgcggcgcatgcttactggtaaagtggtaaatttaattgttgcactgtacttctatccaatttatgtcagttccacatacagacatacttgccttttgtgccagtaatagttgagttttgagtgaacctatttttttacttgcttgggttggttacatgcctcccttatatgttttaggactcagattgaaaattaattttatgccgactcacgtgacatcgtgctgtttaaatgattttattgccacctgtccttaacactctgcatggttatcagacacttctagtaaacaatacactcatgactcatctagtcatctccatatctgtttctgcacatatctagtttgctttctccttgctgtttcaaggtgcaactatggacccatcgggtggctttggatggagtgtactgctctagatagttgtgaagttggagttcctaatgtcattgtccgcgaaggcattttttttgtgtgcaggttacaactaaggtcgttttgctataactaggcctaactaatcctcccagtttgcattgttggcttgttgccggcaaattcgtagtgccaaaacgatgctttactgtgtcaagcaggctcacatgggtggaagatgagcttatggagaagcagaatatctccaaggaatgacttgggacgaggtacctaagagatatgagtggaatatcttcaagatgttagctaaggataggtgcgctcggagactagcaattaacataaaaggccacctttgaggcgtggaaaggccgaccatcttatgttagttcaaaaggattgccagaactatgcaagggcttaatggattactggaacgagagctgcttgcaaacttgttgcccatgttcttgactttgctgggacttcagttaagccatccattacttcaaatgaaattgacgcagcagttcatgatatgatcattgaggctgctacctatccttctccacttggatatcgtggatttctatatgtacatcagtaaatgagtctgtcaagggatacctgattcagctcctcagatgcagaatggggatattataaatattgatgtaaatgtgttccagaatggataccatgggggtaccttcagaacatttgcatgtggacaggaccagctccatccatccagcaccaagcggcaagcacgcacgctcccactcccacgccaacgccacgcagcagaaatcagcaatcttgggggtgggagggaaggagattcctggagaaagcgatcgagtgcgcatcaaaagaagcagtcttggacgaaagaagcagtcccggaggccggcacgagcaggagcaggcgcagcagggcacactaccaaatcccaatggggagcaggagcggaggagggagtgtcagtggcagctgcttgctactcttccccttcctcctcttgctccacctcatctctcttcgctgcccatcggcggtgctggtgtcggcggcggggtccggcgagccgtacgtgggcgtgacgatcggcacgcaggtgacgaacctgctgtcgccgtcggacctggcgtcgttcctgcgcgcgcagcgcatcacccgcgtgcggctgtacgacgcggacccgcggctgctgtcggcgctagcggcctccggcgtgcgtgccatcgtgggggtccccaacgacgagctcctggcgctggggtcctccccggcgacggccgcctcctgggtgtcccgccgcgtggtccccttcgcgggcgtgaactccagcaccccgaacgtcgtctccgccatcgccgtcggggacgaggtcccgaccgcgctcccgtcggcgctgcccgtgctgctcccggccatccggtccctggcggccgcgctcgccgccgccaacctctcgtccatcccggtgtcgacgccgctgcccttctccgtggtggtggacccgttcccgccgtcgcaggccttcttcaaccagtccctggacaagtcgttcgtggcgccgctgctggcgcacctcgccaacacgtcggcgccgctgatgctgaacctgtacccctactactcgctgatgcagagcaagggcgtgatcccgctggacaacgcgctgttccggccgctgccgccgtcgatggagatggtggacccgaacacgctgctccggtacacgaacgtgttcgacgcgatgctggacgcggtgcgcgtggccgtgcggaacctgaacgcgacgggcggcgcgggcgtgccgatcctggtgacggagacggggtggccgtcgtacggggaccggcgcgcggagccgtacgcgggaagggacaacgcggacgcgtacaactcgaacctgatcaagcacgtgctggaggagaaggccggcacgcccatggcgcccggcgccggcgcgcagtccagcgcctacatctacgagctcttcaacgaggacctccgggcgggccccgtgtcggaggcgaactggggcctgttctacgggaacggcaccccggtgtacctcctgcacgtgtccggcgcggacgggttcctggggaacgacacgacggaccggaccttctgcgtggccgccgacgacgcggaccagaaggcggtgcaggcggccatggactgggcgtgcgggcccgggcgcgccgactgcacggcgatacagcccgggcaggcgtgctaccagcccgacgacgtgcgcagccacgcgtcgttcgcgttcgacgcctactaccagtcccagggccgcgccgccggctcgtgctacttccagggcgccggcatggtcaccaccgtggatccgagtcatgacagctgtttatttcctggaagtaagctgctgaacaacgccactggatccggcaacacgaacacatcttcgacacctacaagtgacgctgagggatctgcgatatggagactaagaactgggagggacaaagggctgttgctcttccttcggttggtacttagcattgcggtggctatcgtggtggattcgaacttttggacatgacaagaggttgctagctgtataataaactaaagccagaaattttgggtggtatgttagaggaggaaggaaggaggtgggcgggggattgggttatgcttagtgattctttattgttagataagcattaataaattgctcatttttcttcatctgatgaaatgtgtctataatttgttgaaatgtcccgatatttcaatctgctgggttcatgtccatacaatagttttttttatcaaattactgtaggattggcctacagttttttt

SEQ ID NO: 66741 - DNA, 3142 bp, Zea Mays
atgaggacactccagcccattaggcccatcaatggaaccgagaatattgccgccgcgatgctggctgttggtaaaaagtcaagtcaaccaccagagtgctttgagattggagatcgaaggttgaaggctgaggacgggtcgcttgtgggcttccttttcccttctcttcgctttgttttttatcttctcgacaaaacctccaaggcacctccgttccccgttcgtcctccacacctgtatctcttccccatggccgggctcggcgctggactgggagcacgcccttccgcgaccttctaggccgggccttctaggacggaaggctccggccactcactgtcgctgcccctctccgtcccgtcggctccggttacaactaaggtcgttttgctataactaggcctaactaatcctcccagtttgcattgttggcttgttgccggcaaattcgtagtgccaaaacgatgctttactgtgtcaagcaggctcacatgggtggaagatgagcttatggagaagcagaatatctccaaggaatgacttgggacgaggtacctaagagatatgagtggaatatcttcaagatgttagctaaggataggtgcgctcggagactagcaattaacataaaaggccacctttgaggcgtggaaaggccgaccatcttatgttagttcaaaaggattgccagaactatgcaagggcttaatggattactggaacgagagctgcttgcaaacttgttgcccatgttcttgactttgctgggacttcagttaagccatccattacttcaaatgaaattgacgcagcagttcatgatatgatcattgaggctgctacctatccttctccacttggatatcgtggatttctatatgtacatcagtaaatgagtctgtcaagggatacctgattcagctcctcagatgcagaatggggatattataaatattgatgtaaatgtgttccagaatggataccatgggggtaccttcagaacatttgcatgtggacaggaccagctccatccatccagcaccaagcggcaagcacgcacgctcccactcccacgccaacgccacgcagcagaaatcagcaatcttgggggtgggagggaaggagattcctggagaaagcgatcgagtgcgcatcaaaagaagcagtcttggacgaaagaagcagtcccggaggccggcacgagcaggagcaggcgcagcagggcacactaccaaatcccaatggggagcaggagcggaggagggagtgtcagtggcagctgcttgctactcttccccttcctcctcttgctccacctcatctctcttcgctcaggcccatcggcggtgctggtgtcggcggcggggtccggcgagccgtacgtgggcgtgacgatcggcacgcaggtgacgaacctgctgtcgccgtcggacctggcgtcgttcctgcgcgcgcagcgcatcacccgcgtgcggctgtacgacgcggacccgcggctgctgtcggcgctagcggcctccggcgtgcgtgccatcgtgggggtccccaacgacgagctcctggcgctggggtcctccccggcgacggccgcctcctgggtgtcccgccgcgtggtccccttcgcgggcgtgaactccagcaccccgaacgtcgtctccgccatcgccgtcggggacgaggtcccgaccgcgctcccgtcggcgctgcccgtgctgctcccggccatccggtccctggcggccgcgctcgccgccgccaacctctcgtccatcccggtgtcgacgccgctgcccttctccgtggtggtggacccgttcccgccgtcgcaggccttcttcaaccagtccctggacaagtcgttcgtggcgccgctgctggcgcacctcgccaacacgtcggcgccgctgatgctgaacctgtacccctactactcgctgatgcagagcaagggcgtgatcccgctggacaacgcgctgttccggccgctgccgccgtcgatggagatggtggacccgaacacgctgctccggtacacgaacgtgttcgacgcgatgctggacgcggtgcgcgtggccgtgcggaacctgaacgcgacgggcggcgcgggcgtgccgatcctggtgacggagacggggtggccgtcgtacggggaccggcgcgcggagccgtacgcgggaagggacaacgcggacgcgtacaactcgaacctgatcaagcacgtgctggaggagaaggccggcacgcccatggcgcccggcgccggcgcgcagtccagcgcctacatctacgagctcttcaacgaggacctccgggcgggccccgtgtcggaggcgaactggggcctgttctacgggaacggcaccccggtgtacctcctgcacgtgtccggcgcggacgggttcctggggaacgacacgacggaccggaccttctgcgtggccgccgacgacgcggaccagaaggcggtgcaggcggccatggactgggcgtgcgggcccgggcgcgccgactgcacggcgatacagcccgggcaggcgtgctaccagcccgacgacgtgcgcagccacgcgtcgttcgcgttcgacgcctactaccagtcccagggccgcgccgccggctcgtgctacttccagggcgccggcatggtcaccaccgtggatccgagtcatgacagctgtttatttcctggaagtaagctgctgaacaacgccactggatccggcaacacgaacacatcttcgacacctacaagtgacgctgagggatctgcgatatggagactaagaactgggagggacaaagggctgttgctcttccttcggttggtacttagcattgcggtggctatcgtggtggattcgaacttttggacatgacaagaggttgctagctgtataataaactaaagccagaaattttgggtggtatgttagaggaggaaggaaggaggtgggcgggggattgggttatgcttagtgattctttattgttagataagcattaataaattgctcatttttcttcatctgatgaaatgtgtctataatttgttgaaatgtcccgatatttcaatctgctgggttcatgtccatacaatagttttttttatcaaattactgtaggattggcctacagttttttt

SEQ ID NO: 66742 - DNA, 2036 bp, Zea Mays
atgaggacactccagcccattaggcccatcaatggaaccgagaatattgccgccgcgatgctggctgttggtaaaaagtcaagtcaaccaccagagtgctttgagattggagatcgaaggttgaaggctgaggacgggtcgcttgtgggcttccttttcccttctcttcgctttgttttttatcttctcgacaaaacctccaaggcacctccgttccccgttcgtcctccacacctgtatctcttccccatggccgggctcggcgctggactgggagcacgcccttccgcgaccttctaggccgggccttctaggacggaaggctccggccactcactgtcgctgcccctctccgtcccgtcggctccgtgttcttcccaccgggtggacattgatacgagatcatgtgctaggcttcagagaaccgcggcacatttcgcggcgcatgcttactggtaaagtggtaaatttaattgttgcactgtacttctatccaatttatgtcagttccacatacagacatacttgccttttgtgccagtaatagttgagttttgagtgaacctatttttttacttgcttgggttggttacatgcctcccttatatgttttaggactcagattgaaaattaattttatgccgactcacgtgacatcgtgctgtttaaatgattttattgccacctgtccttaacactctgcatggttatcagacacttctagtaaacaatacactcatgactcatctagtcatctccatatctgtttctgcacatatctagtttgctttctccttgctgtttcaaggtgcaactatggacccatcgggtggctttggatggagtgtactgctctagatagttgtgaagttggagttcctaatgtcattgtccgcgaaggcattttttttgtgtgcaggttacaactaaggtcgttttgctataactaggcctaactaatcctcccagtttgcattgttggcttgttgccggcaaattcgtagtgccaaaacgatgctttactgtgtcaagcaggctcacatgggtggaagatgagcttatggagaatatctccaaggaatgacttgggacgaggtacctaagagatatgagtggaatatcttcaagatgttagctaaggataggtgcgctcggagactagcaattaacatgccacctttgaggcgtggaaaggccgaccatcttatgttagttcaaaaggattgccagaactatgcaagggcttaatggattactggaacgagagctgcttgcaaacttgttgcccatgttcttgactttgctgggacttcagttaagccatccattacttcaaatgaaattgacgcagcagttcatgatatgatcattgaggctgctacctatccttctccacttggatatcgtggatttctatatgtacatcagtaaatgagtctgtcaagggatacctgattcagctcctcagatgcagaatggggatattataaatattgatgtaaatgtgttccagaatggataccatgggggtaccttcagaacatttgcatgtggacaggtcatgacagctgtttatttcctggaagtaagctgctgaacaacgccactggatccggcaacacgaacacatcttcgacacctacaagtgacgctgagggatctgcgatatggagactaagaactgggagggacaaagggctgttgctcttccttcggttggtacttagcattgcggtggctatcgtggtggattcgaacttttggacatgacaagaggttgctagctgtataataaactaaagccagaaattttgggtggtatgttagaggaggaaggaaggaggtgggcgggggattgggttatgcttagtgattctttattgttagataagcattaataaattgctcatttttcttcatctgatgaaatgtgtctataatttgttgaaatgtcccgatatttcaatctgctgggttcatgtccatacaatagttttttttatcaaattactgtaggattggcctacagttttttt

SEQ ID NO: 66743 - DNA, 3806 bp, Zea Mays
atgaggacactccagcccattaggcccatcaatggaaccgagaatattgccgccgcgatgctggctgttggtaaaaagtcaagtcaaccaccagagtgctttgagattggagatcgaaggttgaaggctgaggacgggtcgcttgtgggcttccttttcccttctcttcgctttgttttttatcttctcgacaaaacctccaaggcacctccgttccccgttcgtcctccacacctgtatctcttccccatggccgggctcggcgctggactgggagcacgcccttccgcgaccttctaggccgggccttctaggacggaaggctccggccactcactgtcgctgcccctctccgtcccgtcggctccggtacggataggcacgatcgctctgcccatgttctctgcatctgcgtgccaattcgtaaaaaaatagcttcgctgcctgctctcgtgtcagtgttcttcccaccgggtggacattgatacgagatcatgtgctaggcttcagagaaccgcggcacatttcgcggcgcatgcttactggtaaagtggtaaatttaattgttgcactgtacttctatccaatttatgtcagttccacatacagacatacttgccttttgtgccagtaatagttgagttttgagtgaacctatttttttacttgcttgggttggttacatgcctcccttatatgttttaggactcagattgaaaattaattttatgccgactcacgtgacatcgtgctgtttaaatgattttattgccacctgtccttaacactctgcatggttatcagacacttctagtaaacaatacactcatgactcatctagtcatctccatatctgtttctgcacatatctagtttgctttctccttgctgtttcaaggtgcaactatggacccatcgggtggctttggatggagtgtactgctctagatagttgtgaagttggagttcctaatgtcattgtccgcgaaggcattttttttgtgtgcaggttacaactaaggtcgttttgctataactaggcctaactaatcctcccagtttgcattgttggcttgttgccggcaaattcgtagtgccaaaacgatgctttactgtgtcaagcaggctcacatgggtggaagatgagcttatggagaatatctccaaggaatgacttgggacgaggtacctaagagatatgagtggaatatcttcaagatgttagctaaggataggtgcgctcggagactagcaattaacataaaaggccacctttgaggcgtggaaaggccgaccatcttatgttagttcaaaaggattgccagaactatgcaagggcttaatggattactggaacgagagctgcttgcaaacttgttgcccatgttcttgactttgctgggacttcagttaagccatccattacttcaaatgaaattgacgcagcagttcatgatatgatcattgaggctgctacctatccttctccacttggatatcgtggatttctatatgtacatcagtaaatgagtctgtcaagggatacctgattcagctcctcagatgcagaatggggatattataaatattgatgtaaatgtgttccagaatggataccatgggggtaccttcagaacatttgcatgtggacaggtgaatgattctatcaagcattttctcaatgaccagctccatccatccagcaccaagcggcaagcacgcacgctcccactcccacgccaacgccacgcagcagaaatcagcaatcttgggggtgggagggaaggagattcctggagaaagcgatcgagtgcgcatcaaaagaagcagtcttggacgaaagaagcagtcccggaggccggcacgagcaggagcaggcgcagcagggcacactaccaaatcccaatggggagcaggagcggaggagggagtgtcagtggcagctgcttgctactcttccccttcctcctcttgctccacctcatctctcttcgctcaggcccatcggcggtgctggtgtcggcggcggggtccggcgagccgtacgtgggcgtgacgatcggcacgcaggtgacgaacctgctgtcgccgtcggacctggcgtcgttcctgcgcgcgcagcgcatcacccgcgtgcggctgtacgacgcggacccgcggctgctgtcggcgctagcggcctccggcgtgcgtgccatcgtgggggtccccaacgacgagctcctggcgctggggtcctccccggcgacggccgcctcctgggtgtcccgccgcgtggtccccttcgcgggcgtgaactccagcaccccgaacgtcgtctccgccatcgccgtcggggacgaggtcccgaccgcgctcccgtcggcgctgcccgtgctgctcccggccatccggtccctggcggccgcgctcgccgccgccaacctctcgtccatcccggtgtcgacgccgctgcccttctccgtggtggtggacccgttcccgccgtcgcaggccttcttcaaccagtccctggacaagtcgttcgtggcgccgctgctggcgcacctcgccaacacgtcggcgccgctgatgctgaacctgtacccctactactcgctgatgcagagcaagggcgtgatcccgctggacaacgcgctgttccggccgctgccgccgtcgatggagatggtggacccgaacacgctgctccggtacacgaacgtgttcgacgcgatgctggacgcggtgcgcgtggccgtgcggaacctgaacgcgacgggcggcgcgggcgtgccgatcctggtgacggagacggggtggccgtcgtacggggaccggcgcgcggagccgtacgcgggaagggacaacgcggacgcgtacaactcgaacctgatcaagcacgtgctggaggagaaggccggcacgcccatggcgcccggcgccggcgcgcagtccagcgcctacatctacgagctcttcaacgaggacctccgggcgggccccgtgtcggaggcgaactggggcctgttctacgggaacggcaccccggtgtacctcctgcacgtgtccggcgcggacgggttcctggggaacgacacgacggaccggaccttctgcgtggccgccgacgacgcggaccagaaggcggtgcaggcggccatggactgggcgtgcgggcccgggcgcgccgactgcacggcgatacagcccgggcaggcgtgctaccagcccgacgacgtgcgcagccacgcgtcgttcgcgttcgacgcctactaccagtcccagggccgcgccgccggctcgtgctacttccagggcgccggcatggtcaccaccgtggatccgagtcatgacagctgtttatttcctggaagtaagctgctgaacaacgccactggatccggcaacacgaacacatcttcgacacctacaagtgacgctgagggatctgcgatatggagactaagaactgggagggacaaagggctgttgctcttccttcggttggtacttagcattgcggtggctatcgtggtggattcgaacttttggacatgacaagaggttgctagctgtataataaactaaagccagaaattttgggtggtatgttagaggaggaaggaaggaggtgggcgggggattgggttatgcttagtgattctttattgttagataagcattaataaattgctcatttttcttcatctgatgaaatgtgtctataatttgttgaaatgtcccgatatttcaatctgctgggttcatgtccatacaatagttttttttatcaaattactgtaggattggcctacagttttttt

SEQ ID NO: 66744 - DNA, 616 bp, Zea Mays
gttttttcctgcttccttctcattcacaccggaatcgggaaaaaaacttgagtacaaattgttttccccctcatctttcggcaaagttcaatcatggctcatggctcatgtggctgcggcgtgctcgaaaggctaaaggtcatgacagctgtttatttcctggaagtaagctgctgaacaacgccactggatccggcaacacgaacacatcttcgacacctacaagtgacgctgagggatctgcgatatggagactaagaactgggagggacaaagggctgttgctcttccttcggttggtacttagcattgcggtggctatcgtggtggattcgaacttttggacatgacaagaggttgctagctgtataataaactaaagccagaaattttgggtggtatgttagaggaggaaggaaggaggtgggcgggggattgggttatgcttagtgattctttattgttagataagcattaataaattgctcatttttcttcatctgatgaaatgtgtctataatttgttgaaatgtcccgatatttcaatctgctgggttcatgtccatacaatagttttttttatcaaattactgtaggattggcctacagttttttt

SEQ ID NO: 66745 - DNA, 504 bp, Zea Mays
ctttcggatgctgctctgctgcatcggtcatgacagctgtttatttcctggaagtaagctgctgaacaacgccactggatccggcaacacgaacacatcttcgacacctacaagtgacgctgagggatctgcgatatggagactaagaactgggagggacaaagggctgttgctcttccttcggttggtacttagcattgcggtggctatcgtggtggattcgaacttttggacatgacaagaggttgctagctgtataataaactaaagccagaaattttgggtggtatgttagaggaggaaggaaggaggtgggcgggggattgggttatgcttagtgattctttattgttagataagcattaataaattgctcatttttcttcatctgatgaaatgtgtctataatttgttgaaatgtcccgatatttcaatctgctgggttcatgtccatacaatagttttttttatcaaattactgtaggattggcctacagttttttt

SEQ ID NO: 66746 - DNA, 502 bp, Zea Mays
gttgccacatttttaccatacctagtcatgacagctgtttatttcctggaagtaagctgctgaacaacgccactggatccggcaacacgaacacatcttcgacacctacaagtgacgctgagggatctgcgatatggagactaagaactgggagggacaaagggctgttgctcttccttcggttggtacttagcattgcggtggctatcgtggtggattcgaacttttggacatgacaagaggttgctagctgtataataaactaaagccagaaattttgggtggtatgttagaggaggaaggaaggaggtgggcgggggattgggttatgcttagtgattctttattgttagataagcattaataaattgctcatttttcttcatctgatgaaatgtgtctataatttgttgaaatgtcccgatatttcaatctgctgggttcatgtccatacaatagttttttttatcaaattactgtaggattggcctacagttttttt

SEQ ID NO: 66747 - DNA, 579 bp, Zea Mays
ctggaatctcttggatctggatgcaatgtgggatcaagacaaagtgtgacccatgctagtggccaactggaggaagtgctgggagcatgcagcattgtctggtcatgacagctgtttatttcctggaagtaagctgctgaacaacgccactggatccggcaacacgaacacatcttcgacacctacaagtgacgctgagggatctgcgatatggagactaagaactgggagggacaaagggctgttgctcttccttcggttggtacttagcattgcggtggctatcgtggtggattcgaacttttggacatgacaagaggttgctagctgtataataaactaaagccagaaattttgggtggtatgttagaggaggaaggaaggaggtgggcgggggattgggttatgcttagtgattctttattgttagataagcattaataaattgctcatttttcttcatctgatgaaatgtgtctataatttgttgaaatgtcccgatatttcaatctgctgggttcatgtccatacaatagttttttttatcaaattactgtaggattggcctacagttttttt

SEQ ID NO: 66748 - DNA, 2222 bp, Zea Mays
tccacgatgccaccaccaccgccgccccatcacagcccagccatccaacggccgagcacgaccggatcggacgtgcccctgaatttccaccgctgccactaccaaatcccgttttttaaaatcaaaatacaaggctcccttcttccagtcccccgtgctccggctccccttcctccgcatgttcccacctcctgcgcggccccgggtcactgccaggtaggccacaccatgcagccgccgcagtcgctggtgtcccgcgcgcgcaccgcgatccactccgccgccgcccgcgtgctcaccgacatcaaggccgacctccgagatgccgaaggatccggcgggcgtagccgggcgccgtcgccgaggacgtctctggatcgggaggccgccgaagcgagcgccacggggcgggagccggacgtgaagccgccgtcgccgcgtgatgaggtcctagaaataagccccccagagaacgaggattcctcaagcataccaactgaatcaacctgttcaacaaaactgacctttcctccagcttcaatagttaaacaactggtgtctgccattgaaaatgggaaaagtttcaagtcaatgagtgatatgaggtatactggagaacaattgctgaaagataagggaggtttgagcttgtctgttgttaaatcacttgttcgacgtgacaaggaagaaagatcgagctccgatttttttggtgatgaagaaactcaatctttgatgtactccttgttcaaattagaggaacagttttccttcgaagcaagtcaatgtttccctgaattggttcattcaagatctgtgtccaaggatctacatggtgcaccacctggaagttttattcaccatttagcagtggttattggcagcattagttctgtgcacaagatggcatttttttggcagtcagttgttcttgaggaaaaaaagaagaaaagcagctaaggagtcactggattccttgctaaatcaggcaagtattggtaaatcagaacccaggttgtcagaagcgaagtttcctgacagcgagatgtatgcaagagataatactggtgattatgtccttcgacttggtgctgaccagtcatctgagaacttaacattgctggaaactggtgagcctatctattccccgacactgcaggaaggccccatcatgacagcagagcttataaaagaaacagaggagctagtcttacggacaggaagtcttggtgctggatgctctcaacttctatcagatatgcaggctttcaaggcagcaaatcctggttgtgtcctggaagactttgttagatggcactctccacccgattggtctgaggattgtgctgcaaacagtaccacagttggggaaggctcatctagacgtgggcggttaagtgataggatgcaaacaaaagaaggtaacttgtggaaggaactgtgggaggctgcaaaacctatacctgctgttgaacaaactcctatatatgatgaagatttagctgtggagagcatctttgatgctttggaggttattgagccatcaaaactgtttgagcagctacttggcgtcattctttctgtatgctttgtggcagcagaatcagttttagcagcagatagcaatctgtcaaaattattctacgattgcaaggactacataattggcgtttaccacaatgacatgtcaaaagatgagctagatgagatgtacaaggtgtacgagacgatggaagccatagtaacccaccctgaagaagctctccagatcatggagcaacctgatgagaagtctgttgacaataaaaaccgcttcacgctgaagctcaactttatggccaaagatcgcccgccgctctggaagcgcacgacaaaggacgacaagatttctcaaaaggtcgagaagaatacgtcagaggaaaagaacacgaagatattctccaacctttttgacaagaaggtcagcatattttcaaagaagaatgtgagatcgtcggaggtgccaccggcatccacttcatcttcttcgccagggccatttgacgagagtgagtggacgattttgtagttggaactcctgtattgtttcttttgtacaacatgtagaggggggggtgccccggagatgtcgggaataatcttaagctgtacatattcagtctaattcattgaacattttgaaataaattgaaaatataaaaattccatgtggtctgagcatc

SEQ ID NO: 66749 - DNA, 2043 bp, Zea Mays
tccacgatgccaccaccaccgccgccccatcacagcccagccatccaacggccgagcacgaccggatcggacgtgcccctgaatttccaccgctgccactaccaaatcccgttttttaaaatcaaaatacaaggctcccttcttccagtcccccgtgctccggctccccttcctccgcatgttcccacctcctgcgcggccccgggtcactgccaggtaggccacaccatgcagccgccgcagtcgctggtgtcccgcgcgcgcaccgcgatccactccgccgccgcccgcgtgctcaccgacatcaaggccgacctccgagatgccgaaggatccggcgggcgtagccgggcgccgtcgccgaggacgtctctggatcgggaggccgccgaagcgagcgccacggggcgggagccggacgtgaagccgccgtcgccgcgtgatgaggtcctagaaataagccccccagagaacgaggattcctcaagcataccaactgaatcaacctgttcaacaaaactgacctttcctccagcttcaatagttaaacaactggtgtctgccattgaaaatgggaaaagtttcaagtcaatgagtgatatgaggtatactggagaacaattgctgaaagataagggaggtttgagcttgtctgttgttaaatcacttgttcgacgtgacaaggaagaaagatcgagctccgatttttttggtgatgaagaaactcaatctttgatgtactccttgttcaaattaggaaaaaaagaagaaaagcagctaaggagtcactggattccttgctaaatcaggcaagtattggtaaatcagaacccaggttgtcagaagcgaagtttcctgacagcgagatgtatgcaagagataatactggtgattatgtccttcgacttggtgctgaccagtcatctgagaacttaacattgctggaaactggtgagcctatctattccccgacactgcaggaaggccccatcatgacagcagagcttataaaagaaacagaggagctagtcttacggacaggaagtcttggtgctggatgctctcaacttctatcagatatgcaggctttcaaggcagcaaatcctggttgtgtcctggaagactttgttagatggcactctccacccgattggtctgaggattgtgctgcaaacagtaccacagttggggaaggctcatctagacgtgggcggttaagtgataggatgcaaacaaaagaaggtaacttgtggaaggaactgtgggaggctgcaaaacctatacctgctgttgaacaaactcctatatatgatgaagatttagctgtggagagcatctttgatgctttggaggttattgagccatcaaaactgtttgagcagctacttggcgtcattctttctgtatgctttgtggcagcagaatcagttttagcagcagatagcaatctgtcaaaattattctacgattgcaaggactacataattggcgtttaccacaatgacatgtcaaaagatgagctagatgagatgtacaaggtgtacgagacgatggaagccatagtaacccaccctgaagaagctctccagatcatggagcaacctgatgagaagtctgttgacaataaaaaccgcttcacgctgaagctcaactttatggccaaagatcgcccgccgctctggaagcgcacgacaaaggacgacaagatttctcaaaaggtcgagaagaatacgtcagaggaaaagaacacgaagatattctccaacctttttgacaagaaggtcagcatattttcaaagaagaatgtgagatcgtcggaggtgccaccggcatccacttcatcttcttcgccagggccatttgacgagagtgagtggacgattttgtagttggaactcctgtattgtttcttttgtacaacatgtagaggggggggtgccccggagatgtcgggaataatcttaagctgtacatattcagtctaattcattgaacattttgaaataaattgaaaatataaaaattccatgtggtctgagcatc

SEQ ID NO: 66750 - DNA, 2315 bp, Zea Mays
tccacgatgccaccaccaccgccgccccatcacagcccagccatccaacggccgagcacgaccggatcggacgtgcccctgaatttccaccgctgccactaccaaatcccgttttttaaaatcaaaatacaaggctcccttcttccagtcccccgtgctccggctccccttcctccgcatgttcccacctcctgcgcggccccgggtcactgccaggtaggccacaccatgcagccgccgcagtcgctggtgtcccgcgcgcgcaccgcgatccactccgccgccgcccgcgtgctcaccgacatcaaggccgacctccgagatgccgaaggatccggcgggcgtagccgggcgccgtcgccgaggacgtctctggatcgggaggccgccgaagcgagcgccacggggcgggagccggacgtgaagccgccgtcgccgcgtgatgaggtcctagaaataagccccccagagaacgaggattcctcaagcataccaactgaatcaacctgttcaacaaaactgacctttcctccagcttcaatagttaaacaactggtgtctgccattgaaaatgggaaaagtttcaagtcaatgagtgatatgaggtatactggagaacaattgctgaaagataagggaggtttgagcttgtctgttgttaaatcacttgttcgacgtgacaaggaagaaagatcgagctccgatttttttggtgatgaagaaactcaatctttgatgtactccttgttcaaattagaggaacagttttccttcgaagcaagtcaatgtttccctgaattggttcattcaagatctgtgtccaaggatctacatggtgcaccacctggaagttttattcaccatttagcagtggttattggcagcattagttctgtgcacaagatggcatttttttggcagtcagttgttcttgagttgaggaaactatggtctgattggcaacctgtgcctcgtatgccactggaggttgctccagatttgaattcttgtttactacatcaggaaatccaagttgtaaattgctgcattgccaggaaaaaaagaagaaaagcagctaaggagtcactggattccttgctaaatcaggcaagtattggtaaatcagaacccaggttgtcagaagcgaagtttcctgacagcgagatgtatgcaagagataatactggtgattatgtccttcgacttggtgctgaccagtcatctgagaacttaacattgctggaaactggtgagcctatctattccccgacactgcaggccccatcatgacagcagagcttataaaagaaacagaggagctagtcttacggacaggaagtcttggtgctggatgctctcaacttctatcagatatgcaggctttcaaggcagcaaatcctggttgtgtcctggaagactttgttagatggcactctccacccgattggtctgaggattgtgctgcaaacagtaccacagttggggaaggctcatctagacgtgggcggttaagtgataggatgcaaacaaaagaaggtaacttgtggaaggaactgtgggaggctgcaaaacctatacctgctgttgaacaaactcctatatatgatgaagatttagctgtggagagcatctttgatgctttggaggttattgagccatcaaaactgtttgagcagctacttggcgtcattcagaatcagttttagcagcagatagcaatctgtcaaaattattctacgattgcaaggactacataattggcgtttaccacaatgacatgtcaaaagatgagctagatgagatgtacaaggtgtacgagacgatggaagccatagtaacccaccctgaagaagctctccagatcatggagcaacctgatgagaagtctgttgacaataaaaaccgcttcacgctgaagctcaactttatggccaaagatcgcccgccgctctggaagcgcacgacaaaggacgacaagatttctcaaaaggtcgagaagaatacgtcagaggaaaagaacacgaagatattctccaacctttttgacaagaaggtcagcatattttcaaagaagaatgtgagatcgtcggaggtgccaccggcatccacttcatcttcttcgccagggccatttgacgagagtgagtggacgattttgtagttggaactcctgtattgtttcttttgtacaacatgtagaggggggggtgccccggagatgtcgggaataatcttaagctgtacatattcagtctaattcattgaacattttgaaataaattgaaaatataaaaattccatgtggtctgagcatc

SEQ ID NO: 66751 - DNA, 2338 bp, Zea Mays
tccacgatgccaccaccaccgccgccccatcacagcccagccatccaacggccgagcacgaccggatcggacgtgcccctgaatttccaccgctgccactaccaaatcccgttttttaaaatcaaaatacaaggctcccttcttccagtcccccgtgctccggctccccttcctccgcatgttcccacctcctgcgcggccccgggtcactgccaggtaggccacaccatgcagccgccgcagtcgctggtgtcccgcgcgcgcaccgcgatccactccgccgccgcccgcgtgctcaccgacatcaaggccgacctccgagatgccgaaggatccggcgggcgtagccgggcgccgtcgccgaggacgtctctggatcgggaggccgccgaagcgagcgccacggggcgggagccggacgtgaagccgccgtcgccgcgtgatgaggtcctagaaataagccccccagagaacgaggattcctcaagcataccaactgaatcaacctgttcaacaaaactgacctttcctccagcttcaatagttaaacaactggtgtctgccattgaaaatgggaaaagtttcaagtcaatgagtgatatgaggtatactggagaacaattgctgaaagataagggaggtttgagcttgtctgttgttaaatcacttgttcgacgtgacaaggaagaaagatcgagctccgatttttttggtgatgaagaaactcaatctttgatgtactccttgttcaaattagaggaacagttttccttcgaagcaagtcaatgtttccctgaattggttcattcaagatctgtgtccaaggatctacatggtgcaccacctggaagttttattcaccatttagcagtggttattggcagcattagttctgtgcacaagatggcatttttttggcagtcagttgttcttgagttgaggaaactatggtctgattggcaacctgtgcctcgtatgccactggaggttgctccagatttgaattcttgtttactacatcaggaaatccaagttgtaaattgctgcattgccaggaaaaaaagaagaaaagcagctaaggagtcactggattccttgctaaatcaggcaagtattggtaaatcagaacccaggttgtcagaagcgaagtttcctgacagcgagatgtatgcaagagataatactggtgattatgtccttcgacttggtgctgaccagtcatctgagaacttaacattgctggaaactggtgagcctatctattccccgacactgcaggaaggccccatcatgacagcagagcttataaaagaaacagaggagctagtcttacggacaggaagtcttggtgctggatgctctcaacttctatcagatatgcaggctttcaaggcagcaaatcctggttgtgtcctggaagactttgttagatggcactctccacccgattggtctgaggattgtgctgcaaacagtaccacagttggggaaggctcatctagacgtgggcggttaagtgataggatgcaaacaaaaggtaacttgtggaaggaactgtgggaggctgcaaaacctatacctgctgttgaacaaactcctatatatgatgaagatttagctgtggagagcatctttgatgctttggaggttattgagccatcaaaactgtttgagcagctacttggcgtcattctttctgtatgctttgtggcagcagaatcagttttagcagcagatagcaatctgtcaaaattattctacgattgcaaggactacataattggcgtttaccacaatgacatgtcaaaagatgagctagatgagatgtacaaggtgtacgagacgatggaagccatagtaacccaccctgaagaagctctccagatcatggagcaacctgatgagaagtctgttgacaataaaaaccgcttcacgctgaagctcaactttatggccaaagatcgcccgccgctctggaagcgcacgacaaaggacgacaagatttctcaaaaggtcgagaagaatacgtcagaggaaaagaacacgaagatattctccaacctttttgacaagaaggtcagcatattttcaaagaagaatgtgagatcgtcggaggtgccaccggcatccacttcatcttcttcgccagggccatttgacgagagtgagtggacgattttgtagttggaactcctgtattgtttcttttgtacaacatgtagaggggggggtgccccggagatgtcgggaataatcttaagctgtacatattcagtctaattcattgaacattttgaaataaattgaaaatataaaaattccatgtggtctgagcatc

SEQ ID NO: 66752 - DNA, 2275 bp, Zea Mays
tccacgatgccaccaccaccgccgccccatcacagcccagccatccaacggccgagcacgaccggatcggacgtgcccctgaatttccaccgctgccactaccaaatcccgttttttaaaatcaaaatacaaggctcccttcttccagtcccccgtgctccggctccccttcctccgcatgttcccacctcctgcgcggccccgggtcactgccaggtaggccacaccatgcagccgccgcagtcgctggtgtcccgcgcgcgcaccgcgatccactccgccgccgcccgcgtgctcaccgacatcaaggccgacctccgagatgccgaaggatccggcgggcgtagccgggcgccgtcgccgaggacgtctctggatcgggaggccgccgaagcgagcgccacggggcgggagccggacgtgaagccgccgtcgccgcgtgatgaggtcctagaaataagccccccagagaacgaggattcctcaagcataccaactgaatcaacctgttcaacaaaactgacctttcctccagcttcaatagttaaacaactggtgtctgccattgaaaatgggaaaagtttcaagtcaatgagtgatatgaggtatactggagaacaattgctgaaagataagggaggtttgagcttgtctgttgttaaatcacttgttcgacgtgacaaggaagaaagatcgagctccgatttttttggtgatgaagaaactcaatctttgatgtactccttgttcaaattagaggaacagttttccttcgaagcaagtcaatgtttccctgaattggttcattcaagatctgtgtccaaggatctacatggtgcaccacctggaagttttattcaccatttagcagtggttattggcagcattagttctgtgcacaagatggcatttttttggcagtcagttgttcttgagttgaggaaactatggtctgattggcaacctgtgcctcgtatgccactggaggtgaaaaaaagaagaaaagcagctaaggagtcactggattccttgctaaatcaggcaagtattggtaaatcagaacccaggttgtcagaagcgaagtttcctgacagcgagatgtatgcaagagataatactggtgattatgtccttcgacttggtgctgaccagtcatctgagaacttaacattgctggaaactggtgagcctatctattccccgacactgcaggaaggccccatcatgacagcagagcttataaaagaaacagaggagctagtcttacggacaggaagtcttggtgctggatgctctcaacttctatcagatatgcaggctttcaaggcagcaaatcctggttgtgtcctggaagactttgttagatggcactctccacccgattggtctgaggattgtgctgcaaacagtaccacagttggggaaggctcatctagacgtgggcggttaagtgataggatgcaaacaaaagaaggtaacttgtggaaggaactgtgggaggctgcaaaacctatacctgctgttgaacaaactcctatatatgatgaagatttagctgtggagagcatctttgatgctttggaggttattgagccatcaaaactgtttgagcagctacttggcgtcattctttctgtatgctttgtggcagcagaatcagttttagcagcagatagcaatctgtcaaaattattctacgattgcaaggactacataattggcgtttaccacaatgacatgtcaaaagatgagctagatgagatgtacaaggtgtacgagacgatggaagccatagtaacccaccctgaagaagctctccagatcatggagcaacctgatgagaagtctgttgacaataaaaaccgcttcacgctgaagctcaactttatggccaaagatcgcccgccgctctggaagcgcacgacaaaggacgacaagatttctcaaaaggtcgagaagaatacgtcagaggaaaagaacacgaagatattctccaacctttttgacaagaaggtcagcatattttcaaagaagaatgtgagatcgtcggaggtgccaccggcatccacttcatcttcttcgccagggccatttgacgagagtgagtggacgattttgtagttggaactcctgtattgtttcttttgtacaacatgtagaggggggggtgccccggagatgtcgggaataatcttaagctgtacatattcagtctaattcattgaacattttgaaataaattgaaaatataaaaattccatgtggtctgagcatc

SEQ ID NO: 66753 - DNA, 2144 bp, Zea Mays
tccacgatgccaccaccaccgccgccccatcacagcccagccatccaacggccgagcacgaccggatcggacgtgcccctgaatttccaccgctgccactaccaaatcccgttttttaaaatcaaaatacaaggctcccttcttccagtcccccgtgctccggctccccttcctccgcatgttcccacctcctgcgcggccccgggtcactgccaggtaggccacaccatgcagccgccgcagtcgctggtgtcccgcgcgcgcaccgcgatccactccgccgccgcccgcgtgctcaccgacatcaaggccgacctccgagatgccgaaggatccggcgggcgtagccgggcgccgtcgccgaggacgtctctggatcgggaggccgccgaagcgagcgccacggggcgggagccggacgtgaagccgccgtcgccgcgtgatgaggtcctagaaataagccccccagagaacgaggattcctcaagcataccaactgaatcaacctgttcaacaaaactgacctttcctccagcttcaatagttaaacaactggtgtctgccattgaaaatgggaaaagtttcaagtcaatgagtgatatgaggtatactggagaacaattgctgaaagataagggaggtttgagcttgtctgttgttaaatcacttgttcgacgtgacaaggaagaaagatcgagctccgatttttttggtgatgaagaaactcaatctttgatgtactccttgttcaaattagaggaacagttttccttcgaagcaagtcaatgtttccctgaattggttcattcaagatctgtgtccaaggatctacatggtgcaccacctggaagttttattcaccatttagcagtggttattggcagcattagttctgtgcacaagatggcatttttttggcagtcagttgttcttgagttgaggaaactatggtctgattggcaacctgtgcctcgtatgccactggaggaaaaaaagaagaaaagcagctaaggagtcactggattccttgctaaatcaggcaagtattggtaaatcagaacccaggttgtcagaagcgaagtttcctgacagcgagatgtatgcaagagataatactggtgattatgtccttcgacttggtgctgaccagtcatctgagaacttaacattgctggaaactggtgagcctatctattccccgacactgcaggaaggccccatcatgacagcagagcttataaaagaaacagaggagctagtcttacggacaggaagtcttggtgctggatgctctcaacttctatcagatatgcaggctttcaaggcagcaaatcctggttgtgtcctggaagactttgttagatggcactctccacccgattggtctgaggattgtgctgcaaacagtaccacagttggggaaggctcatctagacgtgggcggttaagtgataggatgcaaacaaaagaaggtaacttgtggaaggaactgtgggaggctgcaaaacctatacctgctgttgaacaaactcctatatatgatgaagatttagctgtggagagcatctttgatgctttggaggttattgagccatcaaaactgtttgagcagctacttggcgtcattctttctgtatgctttgtggcagcagaatcagttttagcagcagatagcaatctgtcaaaattattctacgattgcaaggactacataattggcgtttaccacaatgacatgtcaaaagatgagctagatgagatgtacaaggtgtacgagacgatggaagccatagtaacccaccctgaagaagctctccagatcatggagcaacctgatgagaagtctgttgacaataaaaaccgcttcacgctgaagctcaactttatggccaaagatcgcccgccgctctggaagcgcacgacaaaggacgacaagatttctcaaaaggtcgagaagaatacgtcagaggaaaagaacacgaagatattctccaacctttttgacaagaaggtcagcatattttcaaagaagaatgtgagatcgtcggaggtgccaccggcatccacttcatcttcttcgccagggccatttgacgagagtctggaaaataaaataaggtggccataaaagaactgttttgatg

SEQ ID NO: 66754 - DNA, 1251 bp, Zea Mays
ccggcgctcatcccctcctgctgctcccccgccggctgctcccctccctgctcccccgccgtgtacaagtgaaagaaatcaaaggattaaggtttaaggatgtcatcagaaactgcagctgcaccttctgaaactgaagcagctagagcgaatctcctaaaaagaaattcagatgatgttggatgggaatatggtgttcttgttgatgctaacaacaaagacaaggtgaagtgtaagttctgtgacaaggagatgaggggagggatttataggttgaaggagcatcttgcccatgttggaaagaatgtgaagaaatgcacgtctgcaacaccgcaggctctagaggctaaagagaagtgcaagaaagcaatagtggctgcaaaaaggaagagggaggagaagactattcgtgagctagaacttagagaggaagtgaatgtatctagggttggagaggagtcagaagaagtcacttgtgttggaagctcacagcctcacaaattagggccaattgacaaatggacacgtgctattgatcctaccaaggctgattcattcaaacaacagcagctgaacaaggaattatggaaagaaagagagcatgaggtgcacaagtttattgcaagatgggcctataatcatggaatacctttcaatgcatgtgacaatgatgagttcaagcaaatgtgtgaagcaattggacaatttggaccaggacttacacctccaactcaagatgcctttcgaggtagtttgctggaagaagaatatgaaagaaccaagtgtttgctgcaggaacgtgaagccgagaagatgaaaaatgggtgctctattatgaccgatgcttggtcagataggaagaggagaagcataatgaaatcatccagataagtcacaatttagtgttttctatttttttatgaacagctagctgtctattgactaatttactaactactagctgtcaaaatgtgttgcagccttgcaggagctagaaacatgcaagagtaagctaagctaggaatcagatatgtctactggccttctttttatacttactgtgactcatatagtcatctatagtagttatatacgtatatatagttatatacataatatatatataatttatggctatattgccaaaacgcctagaaaagcgcctagaagcgcctaagaccgagtactcccgactaggcgctaggcaatgggtcaccgcctagattccgcctagcacctagctgaaccttg

SEQ ID NO: 66755 - DNA, 3276 bp, Zea Mays
cgaacaggaagcgccgcctctgccgaccgggccaggggcctccttccgcaggccgcagcacacttccccgctccgctgacccggccagccacaacccacaaatggaagcgggctccttccccagcaagttcccgccaattcccgcgggcgacaaaacctagtatcctaccaaatctccgccccaaaatcccccaaaccacccttccaatccccagtcctaatcactccacccactcggccgcttctcctttcctcccgcgccaccgccttcgcgccgccatgacgcgccgaggatccagtagcggccgccggcgccgccgcgaccaggaggatgaggacgacctcccctctgacgacacctccgacaccgatttcgtcgccgactccggggacgcggtggagaacgacgacagcgacgaggagttcgcgcccgataaggacaccccgcccgcgcccgcggtgcccgaggcggccctgccgccgccggtgccgatccggattaagaatcaggcgcggaacaggagggagaagaggaggcgaggtaagaaggcgaggagggacgcgccgcccctgccatgggaagagtggcaggtggcaaacgacagttggctcgacgagcggaacgcagccgacgggggcgtcgaggccacggacgccacggtggcggccgtgccgaccgcggacccggccccggaggtggtgctccgattgctgcgtttccagaaggagtggctcgcttgggcgctcgcgcaggaggcgtccgtcacgcggggcggcatcctcgccgacgagatggggatggggaagaccatccaggctatctcgctcgtcctaaccgcgcgccgcctccggcccccggaccatcactccgccgcctcctcgtccaactcctcggtgggccgcaccaagccccaggtcgggtgcacgctggtcgtctgccctgtggtggccgtcatccagtggactgaggagatcgaacgccacactgctagtggcagcgtgcgcgtgctcatctaccacggtgccaagcgtgtcactcagagtttcgatttcaacagctatgactttgttatcaccacctactctaccattgaggcggactaccggaagcacatcatgccgcccaagactcggtgccaatactgcaataaattgttctaccccaacaagatgaaggtgcacttgatgtatcactgtgggcctaatgctaaacgcacagaagctcaggctaagcagcagagcaagaggaagtgggacagcagcaaggaaaaggtgaaggagaagaggagggttcataagaagggtgatgaggtgaataaggattttcaagagttggctgatgaactgggcagacagttaaggggccaatctcctctgcattctgtgcggtgggagcgtgttatcctggatgaggctcacttcataaaagatagacgatgtaatactgcacgggctgtttttgcattggagtcagaatgcaagtgggctctgagtggaacacctttgcagaaccgtgttggagaactttactctcttattcggtttttgcaaatcttcccctactcatactatttctgcaaggactgtagctgtgagatactagataccagtatgaagaaacaatgcgactgtggtcactcatctgttaggcacttttgctggtggaataagtacatatcaacaccaatacagtatgggtcaacaagtttcgaaggaaaaagagccatgactcttctgaaggaaaaagttctgaaaggcatagtgttaaggcgcacaaagaaaggccgagcagcagatcttgctcttccaccaaagattgtgacattgaggcgggactcttttgataaaaacgaaatggaattctatgaagctttgtacactcagagtgtcacacaatttgatgcatatgtagatgctggaacactgatgaataactacgctcatatcttcgatcttctcacaaggttgagacaggctgttgatcatccctatcttgtagcatattctaaaacagcaggacatcctgaaggaatgaagaatgaaggaaacgagtccatggagagccaatgtggtatatgtcataatttggctgaagatgttgtggttacctcttgtgatcatgcattctgcaagacttgtttgatagactactctgcagctttggggaatgtttcatgtccatcctgttcaatacctctcaccgtggacttaacagcacaaaattcagttggaaaagtaactcgaagtgtcaagggtcgcaaatgttcaggaatattgagcagactaccaagccttgtggattttaagacgagtacaaaaattgatgccttgagggaggagataagaaacatgattgagcacgatggttctgccaaagggattgtcttcagccagttcacatcattcttggatttgattcagttttccttggagaggtccggcattaagtgtgtccagttgaatggagccatgaacattaccgaaaagggaagagccatagacaccttcacccatgatgcagactgcagggtcttcttgatgagcttaaaagctggaggagtcgctctgaatctcactgtagcatctcatgtgttcctgatggacccttggtggaatccagcggtcgagaaccaagcgcaggaccgtatccaccgaattgggcagttcaagccaatcaagagcactaggtttgtgataaaggacacggttgaagagcgcatactgcaactgcaacagaagaagcagctggtgtttgaaggcaccgtgggggactcgccggatgccatgtcgaagcttacagaggcggacctcaagtttctgtttcagatctaaatgctgacgtagttaagcatgagtagggagggccaggctatgctaggactaggagcactgacttgttggaagttggaaccctgacgctgccataacaccaggacggacggggtcggcggtgcgtagatcgactgctgctgtgcctgttggaactgatgtacttttgcagtgtgtgtaacatcgatggcagcgactagcgaggctttccgttggagtagcccgtttgggaaagaacagaacagggtgttgtaggcctgtgtagtgtggggggcgtgcagcgtgctggtgccgcaagaggtgcggtggggtgggggtacagtctcagtacagggtactggtgtgcgctgagtgagcacttgagcccaacgcgctcaattgtttgcaggcggtcccccgcccccgtatctcgtggacaggcaggtgggtaggggaattgtagcagcg

SEQ ID NO: 66756 - DNA, 1205 bp, Zea Mays
gtaatttgcgcctcgaaaaacaattgagaatagttacctcttgtgatcatgcattctgcaagacttgtttgatagactactctgcagctttggggaatgtttcatgtccatcctgttcaatacctctcaccgtggacttaacagcacaaaattcagttggaaaagtaactcgaagtgtcaagggtcgcaaatgttcaggaatattgagcagactaccaagccttgtggattttaagacgagtacaaaaattgatgccttgagggaggagataagaaacatgattgagcacgatggttctgccaaagggattgtcttcagccagttcacatcattcttggatttgattcagttttccttggagaggtccggcattaagtgtgtccagttgaatggagccatgaacattaccgaaaagggaagagccatagacaccttcacccatgatgcagactgcagggtcttcttgatgagcttaaaagctggaggagtcgctctgaatctcactgtagcatctcatgtgttcctgatggacccttggtggaatccagcggtcgagaaccaagcgcaggaccgtatccaccgaattgggcagttcaagccaatcaagagcactaggtttgtgataaaggacacggttgaagagcgcatactgcaactgcaacagaagaagcagctggtgtttgaaggcaccgtgggggactcgccggatgccatgtcgaagcttacagaggcggacctcaagtttctgtttcagatctaaatgctgacgtagttaagcatgagtagggagggccaggctatgctaggactaggagcactgacttgttggaagttggaaccctgacgctgccataacaccaggacggacggggtcggcggtgcgtagatcgactgctgctgtgcctgttggaactgatgtacttttgcagtgtgtgtaacatcgatggcagcgactagcgaggctttccgttggagtagcccgtttgggaaagaacagaacagggtgttgtaggcctgtgtagtgtggggggcgtgcagcgtgctggtgccgcaagaggtgcggtggggtgggggtacagtctcagtacagggtactggtgtgcgctgagtgagcacttgagcccaacgcgctcaattgtttgcaggcggtcccccgcccccgtatctcgtggacaggcaggtgggtaggggaattgtagcagcg

SEQ ID NO: 66757 - DNA, 971 bp, Zea Mays
cagactgcttggtgtcgtatcttattagggaggagataagaaacatgattgagcacgatggttctgccaaagggattgtcttcagccagttcacatcattcttggatttgattcagttttccttggagaggtccggcattaagtgtgtccagttgaatggagccatgaacattaccgaaaagggaagagccatagacaccttcacccatgatgcagactgcagggtcttcttgatgagcttaaaagctggaggagtcgctctgaatctcactgtagcatctcatgtgttcctgatggacccttggtggaatccagcggtcgagaaccaagcgcaggaccgtatccaccgaattgggcagttcaagccaatcaagagcactaggtttgtgataaaggacacggttgaagagcgcatactgcaactgcaacagaagaagcagctggtgtttgaaggcaccgtgggggactcgccggatgccatgtcgaagcttacagaggcggacctcaagtttctgtttcagatctaaatgctgacgtagttaagcatgagtagggagggccaggctatgctaggactaggagcactgacttgttggaagttggaaccctgacgctgccataacaccaggacggacggggtcggcggtgcgtagatcgactgctgctgtgcctgttggaactgatgtacttttgcagtgtgtgtaacatcgatggcagcgactagcgaggctttccgttggagtagcccgtttgggaaagaacagaacagggtgttgtaggcctgtgtagtgtggggggcgtgcagcgtgctggtgccgcaagaggtgcggtggggtgggggtacagtctcagtacagggtactggtgtgcgctgagtgagcacttgagcccaacgcgctcaattgtttgcaggcggtcccccgcccccgtatctcgtggacaggcaggtgggtaggggaattgtagcagcg

SEQ ID NO: 66758 - DNA, 1054 bp, Zea Mays
ctcaaactcactaaggacctggaagcctatatgttatatttggtcctgatgctatgggacttttaatacagccccccttggattggatctactagcagtaaaccatgagagggaggagataagaaacatgattgagcacgatggttctgccaaagggattgtcttcagccagttcacatcattcttggatttgattcagttttccttggagaggtccggcattaagtgtgtccagttgaatggagccatgaacattaccgaaaagggaagagccatagacaccttcacccatgatgcagactgcagggtcttcttgatgagcttaaaagctggaggagtcgctctgaatctcactgtagcatctcatgtgttcctgatggacccttggtggaatccagcggtcgagaaccaagcgcaggaccgtatccaccgaattgggcagttcaagccaatcaagagcactaggtttgtgataaaggacacggttgaagagcgcatactgcaactgcaacagaagaagcagctggtgtttgaaggcaccgtgggggactcgccggatgccatgtcgaagcttacagaggcggacctcaagtttctgtttcagatctaaatgctgacgtagttaagcatgagtagggagggccaggctatgctaggactaggagcactgacttgttggaagttggaaccctgacgctgccataacaccaggacggacggggtcggcggtgcgtagatcgactgctgctgtgcctgttggaactgatgtacttttgcagtgtgtgtaacatcgatggcagcgactagcgaggctttccgttggagtagcccgtttgggaaagaacagaacagggtgttgtaggcctgtgtagtgtggggggcgtgcagcgtgctggtgccgcaagaggtgcggtggggtgggggtacagtctcagtacagggtactggtgtgcgctgagtgagcacttgagcccaacgcgctcaattgtttgcaggcggtcccccgcccccgtatctcgtggacaggcaggtgggtaggggaattgtagcagcg

SEQ ID NO: 66759 - DNA, 4890 bp, Zea Mays
ggaagagagagtgtgtggaagctaggagagagatagagatggacacgcagagacgcaagcgagagaattgctaaacaaacaaaaggagccgcaaggaagagaaaaaaagtggaaaggcgagcaagaaagagaagggcggcgaaccaaaccccaaggaggccaagacgcggacggcagcaggcaggcaggcaggcagccatgccgcggacgccgtcgctatcgccatcgccgtcgccgtcgccggagaggcaccagcaccagcccgcgcgccggaggggcggcgcagccccgtcgcagctggcactccaccaccaccaccaccaccgcggcggacactcgccgtcgccgccgccccgccgctcgctccgcccgcgccgcgccgccgcgccctcctcccgcccgctcgtcgacgacttcttccccttcccctcctcgccgtcgtcctcgcccttccgctcccgccagcgggggccgtcgccggagccgtccagctccgactccggcgctgacggtggcgccgcgggctcctcggtctccgaccggcgccggcgcaagctcaagctcgtcgtcaagctctcccagctgcccccggaccagctccaacgccgggccccacctcccccgtcgtactctgacgactccgatgggaccgaggacctggccggggacggaagcggcgacgaggagcaggtcaagccgcccaagaagcgccggatcgagccgcgcgccgacagatctcgccatcgcgagttggtggtggtgggaggagcgaccccacgagcgcgccgcggacgaagcggccttcggtgccagggactgcgaggacgacgccgctgccagaccagaaggcgctggagatgattcttgagaagcttcaaaagaaggatacctatggagtgtttgctgagccagtggatccagaggagctgcctgattatcatgatgtgattgagcacccaatggacttcggcaccgtcaggaagaagcttgccaggaatgcatatcgctcgtttgagcaatttgaggacgatgtgttcttaatttgcagcaatgcgatgcagtacaatgcacctgatacaatttacttcagacaggctcattccatacaggagctggcacgaaagaagtttcaggaactgagggatgagggcataccaacagaaaacccgattaagattggacagaaaattagaccaaatttctgcactggagcactggttaagaaacctgttttgaggtatccagatgatgatatagatttgtcccacaaagagaaagttaagagacccaattcaaataatgtggatgatgacatgagcttcaaaaatcaagttaaaaaaaccatgtccaagaattcacaggatcgaagttgcttattacagaaagagcgaattaagaaacccattcccaggaattcagaggacaatttaagttcctcattccacaaagagcgacctaagaaactgatctccagacattcgaaggacgacccagactccccatctggcaaagagcaagttaggaaagtcatttcaaaaaatttagaaaatgatgaaagctccccgttccacaaacatcaagtcaagaagtccactccacagagttcaaaggacgacttcttatcccagaaaaaacacattaagccaattggcagaaatggagaagatccaggtttttcatcccgcaaaaagcccattgaggatccagttcgcacaaatgttgaagatgcaggcttctcatctacgaaaaggctgtctgagaagcccatcagtgtaaacggagaagaggatcgtgaccattgtcatcaggagtcatctaaggaaccgagttgcggagttgagcaggatggtcaaggttactcatgcgatgaagaggctgtgaaaaagccagtttgtatggatagccacgatgcccaaggttcagatatctctgctgccactattgcttctgtgggagatggctctaatggtttaagcatgtcacagcctaatgccactgaacctactggttgtcctcttaccaatggggttatagacaaagacatcagctctccactagatgaaataagatctgagaagactgacgatattttggccaaacctagctacaagccaattgtggtagacgaaacgagacggaaaacttatgatgcatctgaagaacagcctctgatgaaatctgatccagtttttgatgttttctctgcggaaccaaaagagctcgtgaatgttgggctcgatgctgaacactcatatgcatatgtaaggagtctggctcgttttgctggttcgcttggtactcaaggctggagaattgcttctgaccgcattcggcaagcattacctgctgatgtaaactatggtcgtggttgggttggagaatatgagcctccattaccgtctattcttgttgtgaatgatcaacctagatacccgaagagctctgagacaaatagacgaaggaatgctcctctgcctagggataatgaaaggttcagatcaacagaaactaataatccaaaggatatgagacgggtagccacttgcaataatgtagttggagtggctggaccactagagagtccagaaattaagccaagattatttggtgttaccactgagcctcaacacaggagcacagacgcgttatcactgcacgagaaccacagagtgtctggtaatgtcgcaaagaccaaaagaacaacgaatgagcaaacaagaaaaggcaattcatcttctagtgcccgacctcttgaaatgcagctacagaaaggagcttcttctggcgcgcttgatatccctgccccaaataaaatggctggccagcctagaccgtttttgcaaccaccagaatcaactagagctcagcaaatgaaaaagattgactcatcaaaaagcaaaattccaattgaaatggcaccacagcaagttgagtgtgcaaaagatgctgattctagtgtgcatgatactccttcctcaaatgggcagcctaaacacttcttccagtcacaagcagcagcttcctctggtgtgcatgatatgcattcctctaacgggcagtctaaacactaccaatcacaagcagcagcttcctctggtatgcatgctatgtcttcctctaatgggcatcctaaacactacttcaagtcacaagcagcaccttcgtcgggtgtgcatgatatgtcttcctccaatgggcagcctaaacattttttccaatcacaagcagtagcttctggtgtgcatgatatggcctcaaacgggcagtctaaacccttgttccagtcccaagaagcaactgtactacagcccaaaaatgaagcaacatgggtgtaccatggacgacctggtgatggaaaggttggaacatcaaaaaaaagcagaccatcgacaagtattgggttcatcactaaaaatcaatcaataaatgctgcaaaatttgccatgaatttgaatggccaaagtattgtcagtgaccatacaaaatcagcaggcgcaaccgctatgcctgcccaagcaaatataccaaacagaggtcttgatgctcctcggaacatattctcagcatttccagctaatgttagggagaaccagagcattccatcagctccagtggctcaatcttggatctcgtttggtgctgctacagagaacaaaccaaccattgtcagcccagctttcgttgacaataattgtggctggaaaatgccatttgctaatgtccaaccttgtgatgataccaaattaagcgttgttcctcagttctttagacatcctgttcaggtagttagagagaactcggttcaaaacaaggggctggtaatatttccccagttggtgcagccagatttcgcaagatcacaagggcaaccacagtggcaggggctgtttccccacatgcaacagaagccaggcaaggatgtactccgcccggacttgaacatcgggttcccatctccaggttcaccaccagctcgacaatcgtccggcatcaatttggaagcacagcagccagacctcgctttgcagttatgatctgggaaaagacaatgaaaacttcatacggccaggccaggatttatgctataatctctaagcatgtgaaggcatgaggagctcaggtgcgaaacaaggcgagaacagcattgggacatccgggacatggatcggtgatgattgattgtgatgttgactttacatgccatatggcgtcatcgcaactcatcaactcatcgcgtcgatgtacgacgatatcagaaaatggatggatgaacactgcttgaaatgagatcatgtctacttgggggcattctgacaggagttaagaatccagcatttggggaaatgctttggtggcatgcatgtaggtagcacactagcatgcccatgatctgaaaacttggggcgcgcctctctgaccacgatacagctttcttcggtggaaattttggcaccagaatttagaatttagaatttagaatataagccgttcattcggtagtgtaggtcctgtggtcacccctatgtaatgtaatgcccataccaaaatgaatgttggctgtaaattgttctgtgttgaatagattgttagggtagggcagtggccagtggccttcacacctcttctgaatgaaattgcttcttttgttcatgatgtatgtagcaggaaaccaggaactgtggtctccgttcagttcaaatggcatgctgaatctaaagaggtcattaggtctcgtgaagatgcactggttcagtttgtccttgcattggattttttctagctttaagcatgatgccataagaatgagcaatgccatttccctctgaaagcataattttgctgataaacttatattcactggacgtaagtttgcttggaatgtatattggg

SEQ ID NO: 66760 - DNA, 3920 bp, Zea Mays
gttagatttgcctaagggagtcaggtttgtcgtgcagcctgacaaatgaagtgaggacgatgtgttcttaatttgcagcaatgcgatgcagtacaatgcacctgatacaatttacttcagacaggctcattccatacaggagctggcacgaaagaagtttcaggaactgagggatgagggcataccaacagaaaacccgattaagattggacagaaaattagaccaaatttctgcactggagcactggttaagaaacctgttttgaggtatccagatgatgatatagatttgtcccacaaagagaaagttaagagacccaattcaaataatgtggatgatgacatgagcttcaaaaatcaagttaaaaaaaccatgtccaagaattcacaggatcgaagttgcttattacagaaagagcgaattaagaaacccattcccaggaattcagaggacaatttaagttcctcattccacaaagagcgacctaagaaactgatctccagacattcgaaggacgacccagactccccatctggcaaagagcaagttaggaaagtcatttcaaaaaatttagaaaatgatgaaagctccccgttccacaaacatcaagtcaagaagtccactccacagagttcaaaggacgacttcttatcccagaaaaaacacattaagccaattggcagaaatggagaagatccaggtttttcatcccgcaaaaagcccattgaggatccagttcgcacaaatgttgaagatgcaggcttctcatctacgaaaaggctgtctgagaagcccatcagtgtaaacggagaagaggatcgtgaccattgtcatcaggagtcatctaaggaaccgagttgcggagttgagcaggatggtcaaggttactcatgcgatgaagaggctgtgaaaaagccagtttgtatggatagccacgatgcccaaggttcagatatctctgctgccactattgcttctgtgggagatggctctaatggtttaagcatgtcacagcctaatgccactgaacctactggttgtcctcttaccaatggggttatagacaaagacatcagctctccactagatgaaataagatctgagaagactgacgatattttggccaaacctagctacaagccaattgtggtagacgaaacgagacggaaaacttatgatgcatctgaagaacagcctctgatgaaatctgatccagtttttgatgttttctctgcggaaccaaaagagctcgtgaatgttgggctcgatgctgaacactcatatgcatatgtaaggagtctggctcgttttgctggttcgcttggtactcaaggctggagaattgcttctgaccgcattcggcaagcattacctgctgatgtaaactatggtcgtggttgggttggagaatatgagcctccattaccgtctattcttgttgtgaatgatcaacctagatacccgaagagctctgagacaaatagacgaaggaatgctcctctgcctagggataatgaaaggttcagatcaacagaaactaataatccaaaggatatgagacgggtagccacttgcaataatgtagttggagtggctggaccactagagagtccagaaattaagccaagattatttggtgttaccactgagcctcaacacaggagcacagacgcgttatcactgcacgagaaccacagagtgtctggtaatgtcgcaaagaccaaaagaacaacgaatgagcaaacaagaaaaggcaattcatcttctagtgcccgacctcttgaaatgcagctacagaaaggagcttcttctggcgcgcttgatatccctgccccaaataaaatggctggccagcctagaccgtttttgcaaccaccagaatcaactagagctcagcaaatgaaaaagattgactcatcaaaaagcaaaattccaattgaaatggcaccacagcaagttgagtgtgcaaaagatgctgattctagtgtgcatgatactccttcctcaaatgggcagcctaaacacttcttccagtcacaagcagcagcttcctctggtgtgcatgatatgcattcctctaacgggcagtctaaacactaccaatcacaagcagcagcttcctctggtatgcatgctatgtcttcctctaatgggcatcctaaacactacttcaagtcacaagcagcaccttcgtcgggtgtgcatgatatgtcttcctccaatgggcagcctaaacattttttccaatcacaagcagtagcttctggtgtgcatgatatggcctcaaacgggcagtctaaacccttgttccagtcccaagaagcaactgtactacagcccaaaaatgaagcaacatgggtgtaccatggacgacctggtgatggaaaggttggaacatcaaaaaaaagcagaccatcgacaagtattgggttcatcactaaaaatcaatcaataaatgctgcaaaatttgccatgaatttgaatggccaaagtattgtcagtgaccatacaaaatcagcaggcgcaaccgctatgcctgcccaagcaaatataccaaacagaggtcttgatgctcctcggaacatattctcagcatttccagctaatgttagggagaaccagagcattccatcagctccagtggctcaatcttggatctcgtttggtgctgctacagagaacaaaccaaccattgtcagcccagctttcgttgacaataattgtggctggaaaatgccatttgctaatgtccaaccttgtgatgataccaaattaagcgttgttcctcagttctttagacatcctgttcaggtagttagagagaactcggttcaaaacaaggggctggtaatatttccccagttggtgcagccagatttcgcaagatcacaagggcaaccacagtggcaggggctgtttccccacatgcaacagaagccaggcaaggatgtactccgcccggacttgaacatcgggttcccatctccaggttcaccaccagctcgacaatcgtccggcatcaatttggaagcacagcagccagacctcgctttgcagttatgatctgggaaaagacaatgaaaacttcatacggccaggccaggatttatgctataatctctaagcatgtgaaggcatgaggagctcaggtgcgaaacaaggcgagaacagcattgggacatccgggacatggatcggtgatgattgattgtgatgttgactttacatgccatatggcgtcatcgcaactcatcaactcatcgcgtcgatgtacgacgatatcagaaaatggatggatgaacactgcttgaaatgagatcatgtctacttgggggcattctgacaggagttaagaatccagcatttggggaaatgctttggtggcatgcatgtaggtagcacactagcatgcccatgatctgaaaacttggggcgcgcctctctgaccacgatacagctttcttcggtggaaattttggcaccagaatttagaatttagaatttagaatataagccgttcattcggtagtgtaggtcctgtggtcacccctatgtaatgtaatgcccataccaaaatgaatgttggctgtaaattgttctgtgttgaatagattgttagggtagggcagtggccagtggccttcacacctcttctgaatgaaattgcttcttttgttcatgatgtatgtagcaggaaaccaggaactgtggtctccgttcagttcaaatggcatgctgaatctaaagaggtcattaggtctcgtgaagatgcactggttcagtttgtccttgcattggattttttctagctttaagcatgatgccataagaatgagcaatgccatttccctctgaaagcataattttgctgataaacttatattcactggacgtaagtttgcttggaatgtatattggg

SEQ ID NO: 66761 - DNA, 3938 bp, Zea Mays
tctccattttatcatgcatttggaaccacatttcttggtcttccctttcacgacaatttcgtgcacatgcaaggacgatgtgttcttaatttgcagcaatgcgatgcagtacaatgcacctgatacaatttacttcagacaggctcattccatacaggagctggcacgaaagaagtttcaggaactgagggatgagggcataccaacagaaaacccgattaagattggacagaaaattagaccaaatttctgcactggagcactggttaagaaacctgttttgaggtatccagatgatgatatagatttgtcccacaaagagaaagttaagagacccaattcaaataatgtggatgatgacatgagcttcaaaaatcaagttaaaaaaaccatgtccaagaattcacaggatcgaagttgcttattacagaaagagcgaattaagaaacccattcccaggaattcagaggacaatttaagttcctcattccacaaagagcgacctaagaaactgatctccagacattcgaaggacgacccagactccccatctggcaaagagcaagttaggaaagtcatttcaaaaaatttagaaaatgatgaaagctccccgttccacaaacatcaagtcaagaagtccactccacagagttcaaaggacgacttcttatcccagaaaaaacacattaagccaattggcagaaatggagaagatccaggtttttcatcccgcaaaaagcccattgaggatccagttcgcacaaatgttgaagatgcaggcttctcatctacgaaaaggctgtctgagaagcccatcagtgtaaacggagaagaggatcgtgaccattgtcatcaggagtcatctaaggaaccgagttgcggagttgagcaggatggtcaaggttactcatgcgatgaagaggctgtgaaaaagccagtttgtatggatagccacgatgcccaaggttcagatatctctgctgccactattgcttctgtgggagatggctctaatggtttaagcatgtcacagcctaatgccactgaacctactggttgtcctcttaccaatggggttatagacaaagacatcagctctccactagatgaaataagatctgagaagactgacgatattttggccaaacctagctacaagccaattgtggtagacgaaacgagacggaaaacttatgatgcatctgaagaacagcctctgatgaaatctgatccagtttttgatgttttctctgcggaaccaaaagagctcgtgaatgttgggctcgatgctgaacactcatatgcatatgtaaggagtctggctcgttttgctggttcgcttggtactcaaggctggagaattgcttctgaccgcattcggcaagcattacctgctgatgtaaactatggtcgtggttgggttggagaatatgagcctccattaccgtctattcttgttgtgaatgatcaacctagatacccgaagagctctgagacaaatagacgaaggaatgctcctctgcctagggataatgaaaggttcagatcaacagaaactaataatccaaaggatatgagacgggtagccacttgcaataatgtagttggagtggctggaccactagagagtccagaaattaagccaagattatttggtgttaccactgagcctcaacacaggagcacagacgcgttatcactgcacgagaaccacagagtgtctggtaatgtcgcaaagaccaaaagaacaacgaatgagcaaacaagaaaaggcaattcatcttctagtgcccgacctcttgaaatgcagctacagaaaggagcttcttctggcgcgcttgatatccctgccccaaataaaatggctggccagcctagaccgtttttgcaaccaccagaatcaactagagctcagcaaatgaaaaagattgactcatcaaaaagcaaaattccaattgaaatggcaccacagcaagttgagtgtgcaaaagatgctgattctagtgtgcatgatactccttcctcaaatgggcagcctaaacacttcttccagtcacaagcagcagcttcctctggtgtgcatgatatgcattcctctaacgggcagtctaaacactaccaatcacaagcagcagcttcctctggtatgcatgctatgtcttcctctaatgggcatcctaaacactacttcaagtcacaagcagcaccttcgtcgggtgtgcatgatatgtcttcctccaatgggcagcctaaacattttttccaatcacaagcagtagcttctggtgtgcatgatatggcctcaaacgggcagtctaaacccttgttccagtcccaagaagcaactgtactacagcccaaaaatgaagcaacatgggtgtaccatggacgacctggtgatggaaaggttggaacatcaaaaaaaagcagaccatcgacaagtattgggttcatcactaaaaatcaatcaataaatgctgcaaaatttgccatgaatttgaatggccaaagtattgtcagtgaccatacaaaatcagcaggcgcaaccgctatgcctgcccaagcaaatataccaaacagaggtcttgatgctcctcggaacatattctcagcatttccagctaatgttagggagaaccagagcattccatcagctccagtggctcaatcttggatctcgtttggtgctgctacagagaacaaaccaaccattgtcagcccagctttcgttgacaataattgtggctggaaaatgccatttgctaatgtccaaccttgtgatgataccaaattaagcgttgttcctcagttctttagacatcctgttcaggtagttagagagaactcggttcaaaacaaggggctggtaatatttccccagttggtgcagccagatttcgcaagatcacaagggcaaccacagtggcaggggctgtttccccacatgcaacagaagccaggcaaggatgtactccgcccggacttgaacatcgggttcccatctccaggttcaccaccagctcgacaatcgtccggcatcaatttggaagcacagcagccagacctcgctttgcagttatgatctgggaaaagacaatgaaaacttcatacggccaggccaggatttatgctataatctctaagcatgtgaaggcatgaggagctcaggtgcgaaacaaggcgagaacagcattgggacatccgggacatggatcggtgatgattgattgtgatgttgactttacatgccatatggcgtcatcgcaactcatcaactcatcgcgtcgatgtacgacgatatcagaaaatggatggatgaacactgcttgaaatgagatcatgtctacttgggggcattctgacaggagttaagaatccagcatttggggaaatgctttggtggcatgcatgtaggtagcacactagcatgcccatgatctgaaaacttggggcgcgcctctctgaccacgatacagctttcttcggtggaaattttggcaccagaatttagaatttagaatttagaatataagccgttcattcggtagtgtaggtcctgtggtcacccctatgtaatgtaatgcccataccaaaatgaatgttggctgtaaattgttctgtgttgaatagattgttagggtagggcagtggccagtggccttcacacctcttctgaatgaaattgcttcttttgttcatgatgtatgtagcaggaaaccaggaactgtggtctccgttcagttcaaatggcatgctgaatctaaagaggtcattaggtctcgtgaagatgcactggttcagtttgtccttgcattggattttttctagctttaagcatgatgccataagaatgagcaatgccatttccctctgaaagcataattttgctgataaacttatattcactggacgtaagtttgcttggaatgtatattggg

SEQ ID NO: 66762 - DNA, 2069 bp, Zea Mays
ctcatacgcttgcagattcttgtctgttgatcaggttgttttattgcaagtgattcttttacgggcagcaataaacccaaagtttagcggccacagcgacaacaacataggaagctgagtcagaattatcgcatactggcctgcaacctgtaaagagtgctatccgagtatccgggcaaagaaggaaaaaaaactgttgacactgatactttcaacggttctttactgtttagttgattgcagaacagttagaggcatttaggacacggatttgggggaatttagctcagctctggcacgcacctgcatagtgcatactgtcttgtttgatgaatgatagagaatttgtatgacaaatgaaacctgacgggaataactaaacctccggccagtgttgtagaaattagaaattggtcaggtatacagcttggagtggagcactcgttgaaagcttgctgcatgttcggcagaagtggtgttcaccaaagtgcagacatgccatcacttgatggctgctccttgtcacaataaatttataccatattccgaaggctgttcttgtaactatcctgtcgcacataacatagctcatctcggcgctcctaaatgcaacgcagctctgcattcagctcactgaccatgctcgccgtccatgcaggttgcaatcccagtggtgccgacagtgagggtggtcatcactttcaccaagttcgtgcccctcacggagccagaggagttcttcaccccgatgtcgagccccagcctgctggcgagcccagggccagggagcatcacggcgaagcccgacgcccacaagagcagctcgtacctgaggtggggctcgaagaactcgagaccgaaggccgtgaacctgtcgcaggtcgcggacaatgccgaccccttcacggtgcccagcgactacgcctgggtgaacagccttgggtccaagaaccacgacaagaagtcggccaagtccaagaagggcaagagcaaggaaacctgaacaaactcatccagtccagcggtgtattcactccgcgagaaccttgtatgcatgcgtaagccgtcatcggcccagaaacctgtaattaccaagtgccagcctgggacatgcctcgacgtttaggccgggcttgctcagcgacgataagcgtggcggttttagctgccggggacggaagagttcagagagtgttaaactaggcctccatttcaactgattgttcagcaatgtgatgtgttgtaaaacttggcaccaccaaaaaatgcaatgattcctctggtagttctggcacacacacacacacacttctgttatttagttgtatctgtatatctccctggtaaggtctgtggatgaactggaagaagaggagcaaggcactgaaacagttctgaagaaatgtctgaaactatctgcatgcagtgtatgtgttttttgtttttgttttggtgtgtgtgtacagtatactgtgccgcttgagacggccgggatgattcccttgtgcgtttggaagtacaaagaaggcagtactaggagatatttgaccatgaaagcgaggaggtggatgggggaatggaagggcgtgcatgttgctgggatcgatgaatcgatagttccttttgcttgcgcagggcccaggcatgatgcgaggagtgccagtgcccgcgcgcctgctaaagatgtttgcatgcaaatcaaatcgctgtgttccgtgtccgcgctttgcaggacagaatcatcggcctacatgccgtaggctttaccgggcattggcggccacagacattcctcccctgtcagaaatatacactcctagatcgttggtcgtgagaattaataaaacacgagagggagagctagaccatagagacagcagctaccggcccttgccttcctcgcgtgctacctccgatccgacgtctgccgtcagtgagtgaggggcggcggcgctctggaggacgggatcgacggaggaggagctcgccaccggtggagaagtgtcagtgtgccccagtgtagcggtcgggtcggggcagcagctagcacaggtaaagaaagagatgat

SEQ ID NO: 66763 - DNA, 951 bp, Zea Mays
cctcgctcaacctctccctcgcgctctctctctctctctcagtctctctgacccccaagattcctctgctcctccatctccatggctgtcgccggcttgccgtgcttcccgctctctgccgccgccgccgccccagctgtgcggctggccgcgaggccaaaccggcagcgaccaccccgacgatggacgggtgccgcaccgtcagcagaccgtggggagatgggcaacgacgacggtggtggtgaggcgttgccgccaggtcggtccgtcgtcgtgacgactacaaagcccgccgcagcagaactttctgtgaaggggacatcgccttcgcttattcggtcattggatactaaaatgtgtgatgtttgtgtggcatatcagggatcacctggtacggtcattgaggcatttgtgcttaaagctttcccagaatgtacaacagttcccctccaaaggtctgaagctgcgcttgaggctgtcgagtcttcacttgctgacatagctattcttcctatcgaaaatgcatacaccggaagcttccataagagctatgacatacttcttagtcatgatttgcaaattgtgcaagaagtacaaatggatgtagagctatgtcttcttgctttacctggagtgcataaggatgatttgaagacaattttcagccatccacagtatcttgctcaatgcgaacattccatttctggtttgagtgtttcaaagaaaaacgtggatcatggagttgttggtgctgagattatatcaaagcagaatttaagggattctggagttatatgcagtgctcgagcagcagaattgtatgggcttaacatcttagaatgcaactttcaggatgaatcacccaatgtcacaaggtacctagtattggcaaaaactgctaaccttcccaaagaacacgaccaatacaagtgttaatgttatttatggcag

SEQ ID NO: 66764 - DNA, 1126 bp, Zea Mays
cctcgctcaacctctccctcgcgctctctctctctctctcagtctctctgacccccaagattcctctgctcctccatctccatggctgtcgccggcttgccgtgcttcccgctctctgccgccgccgccgccccagctgtgcggctggccgcgaggccaaaccggcagcgaccaccccgacgatggacgggtgccgcaccgtcagcagaccgtggggagatgggcaacgacgacggtggtggtgaggcgttgccgccaggtcggtccgtcgtcgtgacgactacaaagcccgccgcagcagaactttctgtgaaggaggatgtcagattgtcagtattctagtttgaggatatgatgatattcccaagtgagcatggtggggtgtttcctcatcaacaagcactctaaggtataattgatgttgctccaataccgggtgtgagagaagccacaactgatgttactacaaccaaagtcatcaatgggacatcgccttcgcttattcggtcattggatactaaaatgtgtgatgtttgtgtggcatatcagggatcacctggtacggtcattgaggcatttgtgcttaaagctttcccagaatgtacaacagttcccctccaaaggtctgaagctgcgcttgaggctgtcgagtcttcacttgctgacatagctattcttcctatcgaaaatgcatacaccggaagcttccataagagctatgacatacttcttagtcatgatttgcaaattgtgcaagaagtacaaatggatgtagagctatgtcttcttgctttacctggagtgcataaggatgatttgaagacaattttcagccatccacagtatcttgctcaatgcgaacattccatttctggtttgagtgtttcaaagaaaaacgtggatcatggagttgttggtgctgagattatatcaaagcagaatttaagggattctggagttatatgcagtgctcgagcagcagaattgtatgggcttaacatcttagaatgcaactttcaggatgaatcacccaatgtcacaaggtacctagtattggcaaaaactgctaaccttcccaaagaacacgaccaatacaagacaagcgttgttttcggtctcgaagaag

SEQ ID NO: 66765 - DNA, 1496 bp, Zea Mays
agcacgcaaggcacaccgagccgcgtgatgggccacccaccacaatgggcgtcaccaccggagacacagagagaagagagagaggaagggaaaaaaaaatatctgctgcctccttgcggcgctttgccattaatttagtcagcatcacatcgcaatcacaagactcctatacccaaacccacgccccccaccccctattattctatatatataatacacacactagtgtagtagtgtggagtacttcaattggcgttggccgaagaagaggagaagcgaagcaagcaggcttcgagaacaaggtacttggagttggcaatggagacaatcacatgagaatcatccaggaggacatcattgagacagtcaacaaccatcccagtgctgggtggacagcctcacgtaatccttacttttcaaactataccattgcgcaatttaagcacatacttggagtgaaaccagcaccacagaatgcactaagcaatgttcctgtcaaaacttattcaagatcactggaacttccaaaagagtttgacgctagatctgcatggtcccgttgcagcacaattgggaacatacttgaacagggtcactgtggctcttgttgggcttttggtgctgtggagtgcctccaggaccgtttttgcattcacctcaacatgagcattttactttcagtcaatgacctactggcatgctgcggttttatgtgcggcgatgggtgtgatggaggctatcctatagaggcatggcgctactttgttcaaaatggtgttgttacggatgagtgtgatccatacttcgacccggtcggttgcaagcatcctggatgcgaacctgcttatcctacaccaaagtgtgaaaagaaatgcaaggagcagaaccaagtttggcaggaaaagaagcatttcagcattgatgcgtacagaataaattcagatccacatgacataatggcagaggtctacaaaaatggtcctgtagaagttgctttcacagtttacgaggatttcgcacactacaaatctggagtgtacaagcacatcaccggtggcattatgggtggccatgccgtcaagttgattggatggggaaccagtgatgctggagaggattactggcttctggcaaatcagtggaatagaggctggggcgatgatggatacttcaagatcataaggggcaaaaatgaatgtggcatcgaggagggcgttgttgctggaatgccatcgacaaagaatatggttccaaacttcggcggtgccgttggaagagctatagtttaattggttacgtttgcatggcctcaaatgctgttggaattaactaaagtaattttaaaatgcaattgttaaatggccacgatggtgtatgtattttgtacactagctcattccaaaggtcgttatgttgctgatgccacatcactttggtcaagtggaataatattaataagaactagaatttcgattcgaatgttacggtttcaagtc

SEQ ID NO: 66766 - DNA, 1476 bp, Zea Mays
gagagaagagagagaggaagggaaaaaaaaatatctgctgcctccttgcggcgctttgccattaatttagtcagcatcacatcgcaatcacaagactcctatacccaaacccacgccccccaccccctattattctatatatataatacacacactagtgtagtagtgtggagtacttcaattggcgttggccgaagaagaggagaagcgaagcaagcaggcttcgagaacaagggggagggggaggaccaagcgaaagggggaactagagcaagatgggcggcgaactgctgcttgcgctcctcctcgtctctgctgctgccgcccctcaggtacttggagttggcaatggagacaatcacatgagaatcatccaggtcacgtaatccttacttttcaaactataccattgcgcaatttaagcacatacttggagtgaaaccagcaccacagaatgcactaagcaatgttcctgtcaaaacttattcaagatcactggaacttccaaaagagtttgacgctagatctgcatggtcccgttgcagcacaattgggaacatacttgaacagggtcactgtggctcttgttgggcttttggtgctgtggagtgcctccaggaccgtttttgcattcacctcaacatgagcattttactttcagtcaatgacctactggcatgctgcggttttatgtgcggcgatgggtgtgatggaggctatcctatagaggcatggcgctactttgttcaaaatggtgttgttacggatgagtgtgatccatacttcgacccggtcggttgcaagcatcctggatgcgaacctgcttatcctacaccaaagtgtgaaaagaaatgcaaggagcagaaccaagtttggcaggaaaagaagcatttcagcattgatgcgtacagaataaattcagatccacatgacataatggcagaggtctacaaaaatggtcctgtagaagttgctttcacagtttacgaggatttcgcacactacaaatctggagtgtacaagcacatcaccggtggcattatgggtggccatgccgtcaagttgattggatggggaaccagtgatgctggagaggattactggcttctggcaaatcagtggaatagaggctggggcgatgatggatacttcaagatcataaggggcaaaaatgaatgtggcatcgaggagggcgttgttgctggaatgccatcgacaaagaatatggttccaaacttcggcggtgccgttggaagagctatagtttaattggttacgtttgcatggcctcaaatgctgttggaattaactaaagtaattttaaaatgcaattgttaaatggccacgatggtgtatgtattttgtacactagctcattccaaaggtcgttatgttgctgatgccacatcactttggtcaagtggaataatattaataagaactagaatttcgattcgaatgttacggtttcaagtc

SEQ ID NO: 66767 - DNA, 1321 bp, Zea Mays
gctcattccatgatttcgatctcgcttgtggggagggggaggaccaagcgaaagggggaactagagcaagatgggcggcgaactgctgcttgcgctcctcctcgtctctgctgctgccgcccctcaggtacttggagttggcaatggagacaatcacatgagaatcatccaggaggacatcattgagacagtcaacaaccatcccagtgctgggtggacagcctcacgtaatccttacttttcaaactataccattgcgcaatttaagcacatacttggagtgaaaccagcaccacagaatgcactaagcaatgttcctgtcaaaacttattcaagatcactggaacttccaaaagagtttgacgctagatctgcatggtcccgttgcagcacaattgggaacatacttgaacagggtcactgtggctcttgttgggcttttggtgctgtggagtgcctccaggaccgtttttgcattcacctcaacatgagcattttactttcagtcaatgacctactggcatgctgcggttttatgtgcggcgatgggtgtgatggaggctatcctatagaggcatggcgctactttgttcaaaatggtgttgttacggatgagtgtgatccatacttcgacccggtcggttgcaagcatcctggatgcgaacctgcttatcctacaccaaagtgtgaaaagaaatgcaaggagcagaaccaagtttggcaggaaaagaagcatttcagcattgatgcgtacagaataaattcagatccacatgacataatggcagaggtctacaaaaatggtcctgtagaagttgctttcacagtttacgaggatttcgcacactacaaatctggagtgtacaagcacatcaccggtggcattatgggtggccatgccgtcaagttgattggatggggaaccagtgatgctggagaggattactggcttctggcaaatcagtggaatagaggctggggcgatgatggatacttcaagatcataaggggcaaaaatgaatgtggcatcgaggagggcgttgttgctggaatgccatcgacaaagaatatggttccaaacttcggcggtgccgttggaagagctatagtttaattggttacgtttgcatggcctcaaatgctgttggaattaactaaagtaattttaaaatgcaattgttaaatggccacgatggtgtatgtattttgtacactagctcattccaaaggtcgttatgttgctgatgccacatcactttggtcaagtggaataatattaataagaactagaatttcgattcgaatgttacggtttcaagtc

SEQ ID NO: 66768 - DNA, 256 bp, Zea Mays
caaagggagaaaataccaccttctagctgggcgaaagagcagatgcggagcagaggcgcatccgcgcggaggagccgaggcgaagaaggcgatgcaggacaggattgtgataactgatgagaccaagatatgagccggcgttgttatcatggtgtcatatatagtttaccttcatcccctaccggcctgatgattctgaggaagtgacgtgattcaactgcagcattatatgtttcttctcttaacaatgtttttt

SEQ ID NO: 66769 - DNA, 513 bp, Zea Mays
ccaccttctagctgggcgaaagagcagatgcggagcagaggcgcatccgcgcggaggagccgaggcgaagaaggcgatgcaggttgccttggatgcaacatacgctcaggtaaagaagaataaggcgccaagacggatctccaggagttccaggacttcgatgagttcgagaattaggctatcgacctccccagtcagctatctgtgttgggtttatttaagttgggtacgtttctattatgtacactttgatataaatgatgtaaatgactctagtctgtaacattattgcttacactttattattgttcgaaacattgtgctatgatgagtcatttatgtaatcgttgtgtatgtgagttctaatcctggcacgtacatggttcgcattcagtttgccttctagaactgggtgtgacacaaatagacccacaatctgtttctttgttttttgtaatttaccatgtgaaagcataataaatagtgtactccttagtaactgatacagttttt

SEQ ID NO: 66770 - DNA, 790 bp, Zea Mays
aagattatacattttggcatctctggattgaaattcttgtgtgtcgcaaggaacacagaactccgttgcgtttgtgctattatcaggaattacaggcagagtggagaaaatgaggaaaaagaattatatatagcaggagcaccgcaccaccaaggggactcaggctcagccagcgagggcgtcggcaccggcgacgatctcgaggatctccccggtgatcttggcctggcgctgtcggttgtaggcgatggagaggttcttgcggagctcgatggcgttgtcggtggcgctgctcatggcgctcatccgggcggcgagctcgctggcgagcgactccttctcgcgctccacggtgagcttcccctccttggtggtgaggcggaagagctcgtcctcggtggcgtccacgcagacgccgttgacgtcgcagatctcgcccttgggcgacatggggagcagcgtctggatgatggggtcggagcgcaccagcgacacgaacttggagtagagcagctccaccttgtccacctcctcggagacgaagagcgagtagacgaggtcgcagatggcctgcgagtccttgacggtgggcacgctgctcacctctagatcgcgctccaacgggatgtaggggcggcgctggaagtaggcgttgcccttcttccccacgctgacgacggtgtactggaggcccagctgcttgagctcatcgatgcgggtttccgccttcttgagcacgttgttgttgaagctcccgcagaggccgcgctcgccgaggtgggagcacgac

SEQ ID NO: 66771 - DNA, 2266 bp, Zea Mays
aagcttttactcaaaaacgcgctgtcgccgtttctccccctgtcaaccttttttctttgagaaaactcggccccccgcaggatcttttgttccggaccccgtgagtcgctgccacgatcgaggcagggcgccaattgcggtggccaccacttccaatccactccccgcgttcgcctcgccgagctgttcttgctctgtcctctctccaactccacgatttgttccacacccggttcccgagcctccgcagcgcttcttgctgaaaaagggaactccgagttctccagctctggatcggcagagagcggtggttccttttgcggactctgagtcgggctgcaggcttagagctggaaggaataatttgactagagaaatggggcagtgttgcagcagagctacggccccggactctggacggggaggtgccaatggttatggctattctaaccaggcaaagccggcgcaagcacctccgagttacaaccctcctcagcaggcggccgaggtgaggtacacaccatcggcgacgaactcttcggcagtcccacccgtggctgtgccgccgaagccaacggcggacacgattcttggcaagcagtacgaggacgtgcgctctgtctactccctcgggaaggagcttggccggggccagttcggggtgacatacctctgcacagagattgcctctggtaggcagtacgcctgcaagtccatctccaagcgcaagctcgtcagcaaggcagacagggaggacattcgaagggagatccagatcatgcagcacctgtctgggcagccaaacattgttgagttccggggagcatacgaggacaagagcaatgtccatgtggtgatggagctctgcgcaggtggggagctcttcgatcgcatcattgcaaaggggcactacacagaacgtgcggctgctacaatctgcagagcagttgtgaatgttgtcaacatttgccacttcatgggtgtgatgcatcgtgatctgaaacccgagaacttcttgcttgcgaccaaggaggagaatgcaatgctcaaggccactgattttgggctttctgtcttcattgaagaaggaaagatgtacagggacattgttggaagtgcttactatgttgctcctgaagtccttagacggagctatggaaaagagatagatgtttggagtgcgggtgttattttgtacattcttctcagtggcgtgcctccattttgggctgaaactgaaaaggggatatttgatgctattctgcatgaggagattgactttgaaagtcaaccttggccatcaatttctgagagtgctaaagacttggtgagaaagatgttgacacgagatccaaagaaaagactgacttcagcccaagttcttcaacatcagtggctcagagaaggtggggaggcatctgataagcctatcgacagtgctgttctttctagaatgaagcaattcagagcaatgaataagctgaaaaagatggccctaaaggttattgcttcaaaccttaacgaggaagagatcaaggggctaaagcaaatgttcatgaacatggacacagacaatagtggcacaatcacatacgaagaactcaaagcaggattagccaaacttggatcaaagctgtcagaagctgaagtaaagcagttgatggaggctgctgatgttgatgggaatggatctattgactatgttgagttcatcactgccacaatgcatagacacaagctcgaaagggacgagcatttgttcaaggcattccagtactttgacaaagataacagcggcttcatcacaagggatgaactggaatctgctttgattgagcatgagatgggcgacacgagtacaataaaggagatcatatcagaagttgacacagataatgatgggaggattaactatgaggagttttgtgcaatgatgagaggagggatgcagcagccaatgaggctcaagtagcctgttcccttaatagaaacggtgtaccactagttactgttcacttttttttcttcatgtttggtacttggtagttggataaagcttacaatgggtgttgcttttgtattgttgagagatgattgtctatacctttttttcccttttgctcgtgtttgttgcattgtagtatcttgaacgtcccttcctttttttaagtttgtttatgcaagtacatctaataaaaagtgcattctgtcttactttgtactgttaaaatctagctttcagttaggtaattagtaagttaggtaa

SEQ ID NO: 66772 - DNA, 2057 bp, Zea Mays
ctcttccttcctggatccagagtcatgttatgatgtcactctgtttggggattagagttgtttctttcgtcctgttgtttgggtccagttcttgtttttgatttgtctcatcaacccaccagtcgggctgcaggcttagagctggaaggaataatttgactagagaaatggggcagtgttgcagcagagctacggccccggactctggacggggaggtgccaatggttatggctattctaaccaggcaaagccggcgcaagcacctccgagttacaaccctcctcagcaggcggccgaggtgaggtacacaccatcggcgacgaactcttcggcagtcccacccgtggctgtgccgccgaagccaacggcggacacgattcttggcaagcagtacgaggacgtgcgctctgtctactccctcgggaaggagcttggccggggccagttcggggtgacatacctctgcacagagattgcctctggtaggcagtacgcctgcaagtccatctccaagcgcaagctcgtcagcaaggcagacagggaggacattcgaagggagatccagatcatgcagcacctgtctgggcagccaaacattgttgagttccggggagcatacgaggacaagagcaatgtccatgtggtgatggagctctgcgcaggtggggagctcttcgatcgcatcattgcaaaggggcactacacagaacgtgcggctgctacaatctgcagagcagttgtgaatgttgtcaacatttgccacttcatgggtgtgatgcatcgtgatctgaaacccgagaacttcttgcttgcgaccaaggaggagaatgcaatgctcaaggccactgattttgggctttctgtcttcattgaagaaggaaagatgtacagggacattgttggaagtgcttactatgttgctcctgaagtccttagacggagctatggaaaagagatagatgtttggagtgcgggtgttattttgtacattcttctcagtggcgtgcctccattttgggctgaaactgaaaaggggatatttgatgctattctgcatgaggagattgactttgaaagtcaaccttggccatcaatttctgagagtgctaaagacttggtgagaaagatgttgacacgagatccaaagaaaagactgacttcagcccaagttcttcaacatcagtggctcagagaaggtggggaggcatctgataagcctatcgacagtgctgttctttctagaatgaagcaattcagagcaatgaataagctgaaaaagatggccctaaaggttattgcttcaaaccttaacgaggaagagatcaaggggctaaagcaaatgttcatgaacatggacacagacaatagtggcacaatcacatacgaagaactcaaagcaggattagccaaacttggatcaaagctgtcagaagctgaagtaaagcagttgatggaggctgctgatgttgatgggaatggatctattgactatgttgagttcatcactgccacaatgcatagacacaagctcgaaagggacgagcatttgttcaaggcattccagtactttgacaaagataacagcggcttcatcacaagggatgaactggaatctgctttgattgagcatgagatgggcgacacgagtacaataaaggagatcatatcagaagttgacacagataatgatgggaggattaactatgaggagttttgtgcaatgatgagaggagggatgcagcagccaatgaggctcaagtagcctgttcccttaatagaaacggtgtaccactagttactgttcacttttttttcttcatgtttggtacttggtagttggataaagcttacaatgggtgttgcttttgtattgttgagagatgattgtctatacctttttttcccttttgctcgtgtttgttgcattgtagtatcttgaacgtcccttcctttttttaagtttgtttatgcaagtacatctaataaaaagtgcattctgtcttactttgtactgttaaaatctagctttcagttaggtaattagtaagttaggtaa

SEQ ID NO: 66773 - DNA, 2017 bp, Zea Mays
tgcagatccagttttggatgcctcgtcttgaatcatgagcttgtccagttcttgtttttgatttgtctcatcaacccaccagtcgggctgcaggcttagagctggaaggaataatttgactagagaaatggggcagtgttgcagcagagctacggccccggactctggacggggaggtgccaatggttatggctattctaaccaggcaaagccggcgcaagcacctccgagttacaaccctcctcagcaggcggccgaggtgaggtacacaccatcggcgacgaactcttcggcagtcccacccgtggctgtgccgccgaagccaacggcggacacgattcttggcaagcagtacgaggacgtgcgctctgtctactccctcgggaaggagcttggccggggccagttcggggtgacatacctctgcacagagattgcctctggtaggcagtacgcctgcaagtccatctccaagcgcaagctcgtcagcaaggcagacagggaggacattcgaagggagatccagatcatgcagcacctgtctgggcagccaaacattgttgagttccggggagcatacgaggacaagagcaatgtccatgtggtgatggagctctgcgcaggtggggagctcttcgatcgcatcattgcaaaggggcactacacagaacgtgcggctgctacaatctgcagagcagttgtgaatgttgtcaacatttgccacttcatgggtgtgatgcatcgtgatctgaaacccgagaacttcttgcttgcgaccaaggaggagaatgcaatgctcaaggccactgattttgggctttctgtcttcattgaagaaggaaagatgtacagggacattgttggaagtgcttactatgttgctcctgaagtccttagacggagctatggaaaagagatagatgtttggagtgcgggtgttattttgtacattcttctcagtggcgtgcctccattttgggctgaaactgaaaaggggatatttgatgctattctgcatgaggagattgactttgaaagtcaaccttggccatcaatttctgagagtgctaaagacttggtgagaaagatgttgacacgagatccaaagaaaagactgacttcagcccaagttcttcaacatcagtggctcagagaaggtggggaggcatctgataagcctatcgacagtgctgttctttctagaatgaagcaattcagagcaatgaataagctgaaaaagatggccctaaaggttattgcttcaaaccttaacgaggaagagatcaaggggctaaagcaaatgttcatgaacatggacacagacaatagtggcacaatcacatacgaagaactcaaagcaggattagccaaacttggatcaaagctgtcagaagctgaagtaaagcagttgatggaggctgctgatgttgatgggaatggatctattgactatgttgagttcatcactgccacaatgcatagacacaagctcgaaagggacgagcatttgttcaaggcattccagtactttgacaaagataacagcggcttcatcacaagggatgaactggaatctgctttgattgagcatgagatgggcgacacgagtacaataaaggagatcatatcagaagttgacacagataatgatgggaggattaactatgaggagttttgtgcaatgatgagaggagggatgcagcagccaatgaggctcaagtagcctgttcccttaatagaaacggtgtaccactagttactgttcacttttttttcttcatgtttggtacttggtagttggataaagcttacaatgggtgttgcttttgtattgttgagagatgattgtctatacctttttttcccttttgctcgtgtttgttgcattgtagtatcttgaacgtcccttcctttttttaagtttgtttatgcaagtacatctaataaaaagtgcattctgtcttactttgtactgttaaaatctagctttcagttaggtaattagtaagttaggtaa

SEQ ID NO: 66774 - DNA, 1863 bp, Zea Mays
gttttggatgcctcgtcttgaatcatgagcttgtccagttcttgtttttgatttgtctcatcaacccaccagtcgggctgcaggcttagagctggaaggaataatttgactagagaaatggggcagtgttgcagcagagctacggccccggactctggacggggaggtgccaatggttatggctattctaaccaggcaaagccggcgcaagcacctccgagttacaaccctcctcagcaggcggccgaggtgaggtacacaccatcggcgacgaactcttcggcagtcccacccgtggctgtgccgccgaagccaacggcggacacgattcttggcaagcagtacgaggacgtgcgctctgtctactccctcgggaaggagcttggccggggccagttcggggtgacatacctctgcacagagattgcctctggtaggcagtacgcctgcaagtccatctccaagcgcaagctcgtcagcaaggcagacagggaggacattcgaagggagatccagatcatgcagcacctgtctgggcagccaaacattgttgagttccggggagcatacgaggacaagagcaatgtccatgtggtgatggagctctgcgcaggtggggagctcttcgatcgcatcattgcaaaggggcactacacagaacgtgcggctgctacaatctgcagagcagttgtgaatgttgtcaacatttgccacttcatgggtgtgatgcatcgtgatctgaaacccgagaacttcttgcttgcgaccaaggaggagaatgcaatgctcaaggccactgattttgggctttctgtcttcattgaagaagaaactgaaaaggggatatttgatgctattctgcatgaggagattgactttgaaagtcaaccttggccatcaatttctgagagtgctaaagacttggtgagaaagatgttgacacgagatccaaagaaaagactgacttcagcccaagttcttcaacatcagtggctcagagaaggtggggaggcatctgataagcctatcgacagtgctgttctttctagaatgaagcaattcagagcaatgaataagctgaaaaagatggccctaaaggttattgcttcaaaccttaacgaggaagagatcaaggggctaaagcaaatgttcatgaacatggacacagacaatagtggcacaatcacatacgaagaactcaaagcaggattagccaaacttggatcaaagctgtcagaagctgaagtaaagcagttgatggaggctgctgatgttgatgggaatggatctattgactatgttgagttcatcactgccacaatgcatagacacaagctcgaaagggacgagcatttgttcaaggcattccagtactttgacaaagataacagcggcttcatcacaagggatgaactggaatctgctttgattgagcatgagatgggcgacacgagtacaataaaggagatcatatcagaagttgacacagataatgatgggaggattaactatgaggagttttgtgcaatgatgagaggagggatgcagcagccaatgaggctcaagtagcctgttcccttaatagaaacggtgtaccactagttactgttcacttttttttcttcatgtttggtacttggtagttggataaagcttacaatgggtgttgcttttgtattgttgagagatgattgtctatacctttttttcccttttgctcgtgtttgttgcattgtagtatcttgaacgtcccttcctttttttaagtttgtttatgcaagtacatctaataaaaagtgcattctgtcttactttgtactgttaaaatctagctttcagttaggtaattagtaagttaggtaa

SEQ ID NO: 66775 - DNA, 535 bp, Zea Mays
tcttgattctttaatgctgcttacatgtgaggttatgaaaaacatgggcgagatattgaaagctagtggtgctaactattcttcagttgtgaagacaacgatcatgatttcaataaagtaaacgagatctatggcaaatatttcccggtgccagcacctgcacgatcaacctaccaagtggcggcgctgccactgaatgcccggattgagattgagtgcatcgctgctctctaatcagatcatccaaccactcattaaatcatcaataagcacccaggaatttgtggtagaggtacctgtaccagttcagtgtctgaaaactgcgggtaacaaacctttgtgtcccggataagtgatgtgtgtgtgtgtgtgagtgaacagtgcatctagtaggagaattgttgcgtggtttgttacttggattcttcgctctttagacaagaagtaccatggcatcaacatcaatagcctactgttttcttcccaataagaatgaattggcttccccaacagatcatggatatagtcgtgcgta

SEQ ID NO: 66776 - DNA, 1178 bp, Zea Mays
aattcccatcagggtccgtcacgaaccggtgggcggagtcttccagaggccaatattctgacacagcggaccccgtgggccgtggccgtctcgtttcccgtctcccgcatagaggttcccaaaccattctctttcgctttcgtctccgcaccctagggtttctgtgcctcgccagcgaagcgatgcagccgccgcaccaaccgccgatgaacgggcaacactcccagcctccgccgcaaggacccgtggtgcccatgcctccgcagcagcaggcgcccccgctgccgtactaccagcagcagcaggcgccgcagtactaccaacaggccctcccgcagccgtgggggcagcagcagcagtacgctgcaccgccgccgcagtacccgcctccgcctcagacgcagcattacgcgacaccaccgcagcagtacgcccctctgccgcagcagcagtacgctcctccaccgcagcagcagtacgctccttcgccatatggtaccacgccgggaagcggtgaagtcaggacgctgtggatcggagatcttcagcactggatggacgagaactacctccactacaacgcctttgcggccgtggcccagcagattgcttctgtgaaaattatacggaacaagcaaactgggcactcagaaggctatggttttattgagttttactctcgagctgctgcagaacatactctgatgaacttcaatgggcagatgatgccgaatgttgagatgacttttaagctgaactgggcttctgctagcactggtgataagcgtggagatagtggttctgatcgcacaatatttgttggtgatttggctcatgatgttactgactccatgttggaagatgtgttcagagctaagtacccttcagttagaggagctaatgttgttgttgataggatgactggatggcccaaaggatttggtttcgtgcgttttggagatctgaatgagcaggcacgtgctatgactgagatgaatggaatgttgttatctacaaggcaaatgaggattggtgctgcagctaacaagaagaatagggatgctcagcagacatatgcaactgacggatgtcatgccatctgcatttaaggcctggaattgtcttcagatgtctatgtaaccagtgcctcggttagctaagcagtacatgcagtgaac

SEQ ID NO: 66777 - DNA, 2931 bp, Zea Mays
aattcccatcagggtccgtcacgaaccggtgggcggagtcttccagaggccaatattctgacacagcggaccccgtgggccgtggccgtctcgtttcccgtctcccgcatagaggttcccaaaccattctctttcgctttcgtctccgcaccctagggtttctgtgcctcgccagcgaagcgatgcagccgccgcaccaaccgccgatgaacgggcaacactcccagcctccgccgcaaggacccgtggtgcccatgcctccgcagcagcaggcgcccccgctgccgtactaccagcagcagcaggcgccgcagtactaccaacaggccctcccgcagccgtgggggcagcagcagcagtacgctgcaccgccgccgcagtacccgcctccgcctcagacgcagcattacgcgacaccaccgcagcagtacgcccctctgccgcagcagcagtacgctcctccaccgcagcagcagtacgctccttcgccatatggtaccacgccgggaagcggtgaagtcaggacgctgtggatcggagatcttcagcactggatggacgagaactacctccactacaacgcctttgcggccgtggcccagcagattgcttctgtgaaaattatacggaacaagcaaactgggcactcagaaggctatggttttattgagttttactctcgagctgctgcagaacatactctgatgaacttcaatgggcagatgatgccgaatgttgagatgacttttaagctgaactgggcttctgctagcactggtgataagcgtggagatagtggttctgatcgcacaatatttgttggtgatttggctcatgatgttactgactccatgttggaagatgtgttcagagctaagtacccttcagttagaggagctaatgttgttgttgataggatgactggatggcccaaaggatttggtttcgtgcgttttggagatctgaatgagcaggcacgtgctatgactgagatgaatggaatgttgttatctacaaggcaaatgaggattggtgctgcagctaacaagaagaatagggatgctcagcagacatatgcaactgacggatgtcatgccatctgcatttaaggcctggaattgtcttcagatgtctatgtaaccagtgcctcggttaggtcagtgttttaatttcatgagattttggttctaaagctctttcactctcaggcatcaacttatctggacttactctccagtcttcaatgctttcagtttatttttttaaaaaatactgcccatcatgttccagtactcgtgatagctaatatgtacaattttatatgttgttgtggtatttatttttatatattccccctttttctcatctctggattggatttcttatatctgcacctaatgtcacctgtaacatgtttgttactccgcattgtactgtatagtgcaggaagcttttagtttcacctgtagcttatctggtctcctcaatgtaccatttttttagtcattccaaattctgttgcggtgcagaaaatatttttttttgttcaactttccactgttgtgcctgcacttcctctggtttattattccatgctgcagattcaattttctttttatttctcattagttttccctgaatgcactttgtagttatgcatttttgtttgttgcccacatattctgcttatctgagtttgggtttggtagttggtatggcttagcaacactgtaaagtttgatttcttatttgaaatattttatcaacagttgatgactcagaataagattaaaaaatcgaaatagttgaactaatatgttctacttcatgcccgtgttagtgcatgaggatatttccaggttgtgattaatacacgcagttgctgctacatagtttttgtcatttaaagatactgggtattgtgtagataatctgagtttatctactgacagtttgactatagtaaaatttcttctgttgcagctaagcagtacatgcagtgaacaactaattgaagcaaggatttcttgtattcttcctctgacctcattggaatgctaaccatttctttatttgttttatttacttacatcattgcaaatgctgttgactattttggatccttactagaaatatgttaagctattacttttgctggccagaatatgggtgtccagtgttccgttgctattattttgggggtctgaattcccagccaatttgccaactttgttgctgatggtttgtcttgccattgcaggagcataccagagctctaaaggaaattcttcagagaatgatcctaacaatacaacagtcatgtgcagaggaagccatccgaatgctgaatgggagtcaggttggtgggcagaaagttcggctttcatggggccgtagtcctcaaaacagacaggcttctcagcatgatgccaacaaccagtataatgggaacagctattatggataccaacagccgggttatgaaggttatggctatggtgcttccagtgcacaagacccaagcatgcaaaactactacggatactctggttgtggtaactatgagcagcagcagccaacacaggaacagcagctgcagcagcctccaccaccacagcactgacgattgcttgcacacctctggagtgctatcggattagagtgatggtggagtcacggggcgctgcaatgagacatcctatatagatatgaaggtcatatagtcgcataggagtggttagactttcttggggaccagtgttaatcgatgatggcactccggatgtttcttctgtttgtcgttgagatcttgactgttgaagtgtgctctgttgatattaatgtcttcgtcagattgttaatttgcttgtttcagatgtcccagaaccatttgtacttagggagtgtttgaatgcactagacctaacagat

SEQ ID NO: 66778 - DNA, 3209 bp, Zea Mays
aattcccatcagggtccgtcacgaaccggtgggcggagtcttccagaggccaatattctgacacagcggaccccgtgggccgtggccgtctcgtttcccgtctcccgcatagaggttcccaaaccattctctttcgctttcgtctccgcaccctagggtttctgtgcctcgccagcgaagcgatgcagccgccgcaccaaccgccgatgaacgggcaacactcccagcctccgccgcaaggacccgtggtgcccatgcctccgcagcagcaggcgcccccgctgccgtactaccagcagcagcaggcgccgcagtactaccaacaggccctcccgcagccgtgggggcagcagcagcagtacgctgcaccgccgccgcagtacccgcctccgcctcagacgcagcattacgcgacaccaccgcagcagtacgcccctctgccgcagcagcagtacgctcctccaccgcagcagcagtacgctccttcgccatatggtaccacgccgggaagcggtgaagtcaggacgctgtggatcggagatcttcagcactggatggacgagaactacctccactacaacgcctttgcggccgtggcccaattgcttctgtgaaaattatacggaacaagcaaactgggcactcagaaggctatggttttattgagttttactctcgagctgctgcagaacatactctgatgaacttcaatgggcagatgatgccgaatgttgagatgacttttaagctgaactgggcttctgctagcactggtgataagcgtggagatagtggttctgatcgcacaatatttgttggtgatttggctcatgatgttactgactccatgttggaagatgtgttcagagctaagtacccttcagttagaggagctaatgttgttgttgataggatgactggatggcccaaaggatttggtttcgtgcgttttggagatctgaatgagcaggcacgtgctatgactgagatgaatggaatgttgttatctacaaggcaaatgaggattggtgctgcagctaacaagaagaatagggatgctcagcagacatatgcaactgacggatcctgcaggggtactgattatgagagcatctaacttctaggtgcatcactgcatcttgaaaactaaaacccacttacatattctggtttctctttccatttttcttgctggttgatagtgttttcgtaccagttctctttctagtcattccaccgcaacagctcacatagcttctttctgtaaacagtttccttcccgctctttccgttccaagtctaagattgggataacttaacaaagtaattaaaccactgaacaaaatttgtgtttctcaaagcaggatgtcatgccatctgcatttaaggcctggaattgtcttcagatgtctatgtaaccagtgcctcggttaggtcagtgttttaatttcatgagattttggttctaaagctctttcactctcaggcatcaacttatctggacttactctccagtcttcaatgctttcagtttatttttttaaaaaatactgcccatcatgttccagtactcgtgatagctaatatgtacaattttatatgttgttgtggtatttatttttatatattccccctttttctcatctctggattggatttcttatatctgcacctaatgtcacctgtaacatgtttgttactccgcattgtactgtatagtgcaggaagcttttagtttcacctgtagcttatctggtctcctcaatgtaccatttttttagtcattccaaattctgttgcggtgcagaaaatatttttttttgttcaactttccactgttgtgcctgcacttcctctggtttattattccatgctgcagattcaattttctttttatttctcattagttttccctgaatgcactttgtagttatgcatttttgtttgttgcccacatattctgcttatctgagtttgggtttggtagttggtatggcttagcaacactgtaaagtttgatttcttatttgaaatattttatcaacagttgatgactcagaataagattaaaaaatcgaaatagttgaactaatatgttctacttcatgcccgtgttagtgcatgaggatatttccaggttgtgattaatacacgcagttgctgctacatagtttttgtcatttaaagatactgggtattgtgtagataatctgagtttatctactgacagtttgactatagtaaaatttcttctgttgcagctaagcagtacatgcagtgaacaactaattgaagcaaggatttcttgtattcttcctctgacctcattggaatgctaaccatttctttatttgttttatttacttacatcattgcaaatgctgttgactattttggatccttactagaaatatgttaagctattacttttgctggccagaatatgggtgtccagtgttccgttgctattattttgggggtctgaattcccagccaatttgccaactttgttgctgatggtttgtcttgccattgcaggagcataccagagctctaaaggaaattcttcagagaatgatcctaacaatacaacagtcatgtgcagaggaagccatccgaatgctgaatgggagtcaggttggtgggcagaaagttcggctttcatggggccgtagtcctcaaaacagacaggcttctcagcatgatgccaacaaccagtataatgggaacagctattatggataccaacagccgggttatgaaggttatggctatggtgcttccagtgcacaagacccaagcatgcaaaactactacggatactctggttgtggtaactatgagcagcagcagccaacacaggaacagcagctgcagcagcctccaccaccacagcactgacgattgcttgcacacctctggagtgctatcggattagagtgatggtggagtcacggggcgctgcaatgagacatcctatatagatatgaaggtcatatagtcgcataggagtggttagactttcttggggaccagtgttaatcgatgatggcactccggatgtttcttctgtttgtcgttgagatcttgactgttgaagtgtgctctgttgatattaatgtcttcgtcagattgttaatttgcttgtttcagatgtcccagaaccatttgtacttagggagtgtttgaatgcactagacctaacagat

SEQ ID NO: 66779 - DNA, 1958 bp, Zea Mays
aattcccatcagggtccgtcacgaaccggtgggcggagtcttccagaggccaatattctgacacagcggaccccgtgggccgtggccgtctcgtttcccgtctcccgcatagaggttcccaaaccattctctttcgctttcgtctccgcaccctagggtttctgtgcctcgccagcgaagcgatgcagccgccgcaccaaccgccgatgaacgggcaacactcccagcctccgccgcaaggacccgtggtgcccatgcctccgcagcagcaggcgcccccgctgccgtactaccagcagcagcaggcgccgcagtactaccaacaggccctcccgcagccgtgggggcagcagcagcagtacgctgcaccgccgccgcagtacccgcctccgcctcagacgcagcattacgcgacaccaccgcagcagtacgcccctctgccgcagcagcagtacgctcctccaccgcagcagcagtacgctccttcgccatatggtaccacgccgggaagcggtgaagtcaggacgctgtggatcggagatcttcagcactggatggacgagaactacctccactacaacgcctttgcggccgtggcccagcagattgcttctgtgaaaattatacggaacaagcaaactgggcactcagaaggctatggttttattgagttttactctcgagctgctgcagaacatactctgatgaacttcaatgggcagatgatgccgaatgttgagatgacttttaagctgaactgggcttctgctagcactggtgataagcgtggagatagtggttctgatcgcacaatatttgttggtgatttggctcatgatgttactgactccatgttggaagatgtgttcagagctaagtacccttcagttagaggagctaatgttgttgttgataggatgactggatggcccaaaggatttggtttcgtgcgttttggagatctgaatgagcaggcacgtgctatgactgagatgaatggaatgttgttatctacaaggcaaatgaggattggtgctgcagctaacaagaagaatagggatgctcagcagacatatgcaactgacggatgtcatgccatctgcatttaaggcctggaattgtcttcagatgtctatgtaaccagtgcctcggttaggagcataccagagctctaaaggaaattcttcagagaatgatcctaacaatacaacagtctttgtaggtgggttagattccaatgtaaatgaggagtatctaaggcaaatttttactccgtatggagaaatttcctatgtgaagattcctgtaggcaaacattgtggatttgttcaatttaccagcaggtcatgtgcagaggaagccatccgaatgctgaatgggagtcaggttggtgggcagaaagttcggctttcatggggccgtagtcctcaaaacagacaggcttctcagcatgatgccaacaaccagtataatgggaacagctattatggataccaacagccgggttatgaaggttatggctatggtgcttccagtgcacaagacccaagcatgcaaaactactacggatactctggttgtggtaactatgagcagcagcagccaacacaggaacagcagctgcagcagcctccaccaccacagcactgacgattgcttgcacacctctggagtgctatcggattagagtgatggtggagtcacggggcgctgcaatgagacatcctatatagatatgaaggtcatatagtcgcataggagtggttagactttcttggggaccagtgttaatcgatgatggcactccggatgtttcttctgtttgtcgttgagatcttgactgttgaagtgtgctctgttgatattaatgtcttcgtcagattgttaatttgcttgtttcagatgtcccagaaccatttgtacttagggagtgtttgaatgcactagacctaacagat

SEQ ID NO: 66780 - DNA, 3062 bp, Zea Mays
aattcccatcagggtccgtcacgaaccggtgggcggagtcttccagaggccaatattctgacacagcggaccccgtgggccgtggccgtctcgtttcccgtctcccgcatagaggttcccaaaccattctctttcgctttcgtctccgcaccctagggtttctgtgcctcgccagcgaagcgatgcagccgccgcaccaaccgccgatgaacgggcaacactcccagcctccgccgcaaggacccgtggtgcccatgcctccgcagcagcaggcgcccccgctgccgtactaccagcagcagcaggcgccgcagtactaccaacaggccctcccgcagccgtgggggcagcagcagcagtacgctgcaccgccgccgcagtacccgcctccgcctcagacgcagcattacgcgacaccaccgcagcagtacgcccctctgccgcagcagcagtacgctcctccaccgcagcagcagtacgctccttcgccatatggtaccacgccgggaagcggtgaagtcaggacgctgtggatcggagatcttcagcactggatggacgagaactacctccactacaacgcctttgcggccgtggcccagcagattgcttctgtgaaaattatacggaacaagcaaactgggcactcagaaggctatggttttattgagttttactctcgagctgctgcagaacatactctgatgaacttcaatgggcagatgatgccgaatgttgagatgacttttaagctgaactgggcttctgctagcactggtgataagcgtggagatagtggttctgatcgcacaatatttgttggtgatttggctcatgatgttactgactccatgttggaagatgtgttcagagctaagtacccttcagttagaggagctaatgttgttgttgataggatgactggatggcccaaaggatttggtttcgtgcgttttggagatctgaatgagcaggcacgtgctatgactgagatgaatggaatgttgttatctacaaggcaaatgaggattggtgctgcagctaacaagaagaatagggatgctcagcagacatatgcaactgacggatgtcatgccatctgcatttaaggcctggaattgtcttcagatgtctatgtaaccagtgcctcggttaggtcagtgttttaatttcatgagattttggttctaaagctctttcactctcaggcatcaacttatctggacttactctccagtcttcaatgctttcagtttatttttttaaaaaatactgcccatcatgttccagtactcgtgatagctaatatgtacaattttatatgttgttgtggtatttatttttatatattccccctttttctcatctctggattggatttcttatatctgcacctaatgtcacctgtaacatgtttgttactccgcattgtactgtatagtgcaggaagcttttagtttcacctgtagcttatctggtctcctcaatgtaccatttttttagtcattccaaattctgttgcggtgcagaaaatatttttttttgttcaactttccactgttgtgcctgcacttcctctggtttattattccatgctgcagattcaattttctttttatttctcattagttttccctgaatgcactttgtagttatgcatttttgtttgttgcccacatattctgcttatctgagtttgggtttggtagttggtatggcttagcaacactgtaaagtttgatttcttatttgaaatattttatcaacagttgatgactcagaataagattaaaaaatcgaaatagttgaactaatatgttctacttcatgcccgtgttagtgcatgaggatatttccaggttgtgattaatacacgcagttgctgctacatagtttttgtcatttaaagatactgggtattgtgtagataatctgagtttatctactgacagtttgactatagtaaaatttcttctgttgcagctaagcagtacatgcagtgaacaactaattgaagcaaggatttcttgtattcttcctctgacctcattggaatgctaaccatttctttatttgttttatttacttacatcattgcaaatgctgttgactattttggatccttactagaaatatgttaagctattacttttgctggccagaatatgggtgtccagtgttccgttgctattattttgggggtctgaattcccagccaatttgccaactttgttgctgatggtttgtcttgccattgcaggagcataccagagctctaaaggaaattcttcagagaatgatcctaacaatacaacagtctttgtaggtgggttagattccaatgtaaatgaggagtatctaaggcaaatttttactccgtatggagaaatttcctatgtgaagattcctgtaggcaaacattgtggatttgttcaatttaccagcaggtcatgtgcagaggaagccatccgaatgctgaatgggagtcaggttggtgggcagaaagttcggctttcatggggccgtagtcctcaaaacagacaggcttctcagcatgatgccaacaaccagtataatgggaacagctattatggataccaacagccgggttatgaaggttatggctatggtgcttccagtgcacaagacccaagcatgcaaaactactacggatactctggttgtggtaactatgagcagcagcagccaacacaggaacagcagctgcagcagcctccaccaccacagcactgacgattgcttgcacacctctggagtgctatcggattagagtgatggtggagtcacggggcgctgcaatgagacatcctatatagatatgaaggtcatatagtcgcataggagtggttagactttcttggggaccagtgttaatcgatgatggcactccggatgtttcttctgtttgtcgttgagatcttgactgttgaagtgtgctctgttgatattaatgtcttcgtcagattgttaatttgcttgtttcagatgtcccagaaccatttgtacttagggagtgtttgaatgcactagacctaacagat

SEQ ID NO: 66781 - DNA, 1827 bp, Zea Mays
aattcccatcagggtccgtcacgaaccggtgggcggagtcttccagaggccaatattctgacacagcggaccccgtgggccgtggccgtctcgtttcccgtctcccgcatagaggttcccaaaccattctctttcgctttcgtctccgcaccctagggtttctgtgcctcgccagcgaagcgatgcagccgccgcaccaaccgccgatgaacgggcaacactcccagcctccgccgcaaggacccgtggtgcccatgcctccgcagcagcaggcgcccccgctgccgtactaccagcagcagcaggcgccgcagtactaccaacaggccctcccgcagccgtgggggcagcagcagcagtacgctgcaccgccgccgcagtacccgcctccgcctcagacgcagcattacgcgacaccaccgcagcagtacgcccctctgccgcagcagcagtacgctcctccaccgcagcagcagtacgctccttcgccatatggtaccacgccgggaagcggtgaagtcaggacgctgtggatcggagatcttcagcactggatggacgagaactacctccactacaacgcctttgcggccgtggcccagcagattgcttctgtgaaaattatacggaacaagcaaactgggcactcagaaggctatggttttattgagttttactctcgagctgctgcagaacatactctgatgaacttcaatgggcagatgatgccgaatgttgagatgacttttaagctgaactgggcttctgctagcactggtgataagcgtggagatagtggttctgatcgcacaatatttgttggtgatttggctcatgatgttactgactccatgttggaagatgtgttcagagctaagtacccttcagttagaggagctaatgttgttgttgataggatgactggatggcccaaaggatttggtttcgtgcgttttggagatctgaatgagcaggcacgtgctatgactgagatgaatggaatgttgttatctacaaggcaaatgaggattggtgctgcagctaacaagaagaatagggatgctcagcagacatatgcaactgacggatgtcatgccatctgcatttaaggcctggaattgtcttcagatgtctatgtaaccagtgcctcggttaggagcataccagagctctaaaggaaattcttcagagaatgatcctaacaatacaacagtcatgtgcagaggaagccatccgaatgctgaatgggagtcaggttggtgggcagaaagttcggctttcatggggccgtagtcctcaaaacagacaggcttctcagcatgatgccaacaaccagtataatgggaacagctattatggataccaacagccgggttatgaaggttatggctatggtgcttccagtgcacaagacccaagcatgcaaaactactacggatactctggttgtggtaactatgagcagcagcagccaacacaggaacagcagctgcagcagcctccaccaccacagcactgacgattgcttgcacacctctggagtgctatcggattagagtgatggtggagtcacggggcgctgcaatgagacatcctatatagatatgaaggtcatatagtcgcataggagtggttagactttcttggggaccagtgttaatcgatgatggcactccggatgtttcttctgtttgtcgttgagatcttgactgttgaagtgtgctctgttgatattaatgtcttcgtcagattgttaatttgcttgtttcagatgtcccagaaccatttgtacttagggagtgtttgaatgcactagacctaacagat

SEQ ID NO: 66782 - DNA, 2597 bp, Zea Mays
gtatgtacttgtcgaacatcttcatataggtttctaaattatttttctctattatttcacacttgcttgtgtaggatcctgcaggggtactgattatgagagcatctaacttctaggtgcatcactgcatcttgaaaactaaaacccacttacatattctggtttctctttccatttttcttgctggttgatagtgttttcgtaccagttctctttctagtcattccaccgcaacagctcacatagcttctttctgtaaacagtttccttcccgctctttccgttccaagtctaagattgggataacttaacaaagtaattaaaccactgaacaaaatttgtgtttctcaaagcaggatgtcatgccatctgcatttaaggcctggaattgtcttcagatgtctatgtaaccagtgcctcggttaggtcagtgttttaatttcatgagattttggttctaaagctctttcactctcaggcatcaacttatctggacttactctccagtcttcaatgctttcagtttatttttttaaaaaatactgcccatcatgttccagtactcgtgatagctaatatgtacaattttatatgttgttgtggtatttatttttatatattccccctttttctcatctctggattggatttcttatatctgcacctaatgtcacctgtaacatgtttgttactccgcattgtactgtatagtgcaggaagcttttagtttcacctgtagcttatctggtctcctcaatgtaccatttttttagtcattccaaattctgttgcggtgcagaaaatatttttttttgttcaactttccactgttgtgcctgcacttcctctggtttattattccatgctgcagattcaattttctttttatttctcattagttttccctgaatgcactttgtagttatgcatttttgtttgttgcccacatattctgcttatctgagtttgggtttggtagttggtatggcttagcaacactgtaaagtttgatttcttatttgaaatattttatcaacagttgatgactcagaataagattaaaaaatcgaaatagttgaactaatatgttctacttcatgcccgtgttagtgcatgaggatatttccaggttgtgattaatacacgcagttgctgctacatagtttttgtcatttaaagatactgggtattgtgtagataatctgagtttatctactgacagtttgactatagtaaaatttcttctgttgcagctaagcagtacatgcagtgaacaactaattgaagcaaggatttcttgtattcttcctctgacctcattggaatgctaaccatttctttatttgttttatttacttacatcattgcaaatgctgttgactattttggatccttactagaaatatgttaagctattacttttgctggccagaatatgggtgtccagtgttccgttgctattattttgggggtctgaattcccagccaatttgccaactttgttgctgatggtttgtcttgccattgcaggagcataccagagctctaaaggaaattcttcagagaatgatcctaacaatacaacagtcatgtgcagaggaagccatccgaatgctgaatgggagtcaggttggtgggcagaaagttcggctttcatggggccgtagtcctcaaaacagacaggcttctcagcatgatgccaacaaccagtataatgggaacagctattatggataccaacagccgggttatgaaggttatggctatggtgcttccagtgcacaagacccaagcatgcaaaactactacggatactctggttgtggtaactatgagcagcagcagccaacacaggaacagcagctgcagcagcctccaccaccacagcacgtagggcacggacaatccccattgcttaaatcttactatctttccatagttcaaatttaggaaatcgactgttaaaaatcttactatcctgaaccagccaattgctgattttctgaagataatttgagccatgcagtatagaagtgcttggaaataagctatccacgtgcctgaaccgtgatttaggcctttttacttttagtgctctcaaaatcttttcccctcccctttctctctctttcttcttttggtgacatcttgttgggtttcaactctatcctaccccaacttgtttgggactaaaagtctatgttgatgttgagtgtcatgttatgagtcttctatgttgggacgtttattaggctgatgagtaattttgttgcctttcatttgcagtgacgattgcttgcacacctctggagtgctatcggattagagtgatggtggagtcacggggcgctgcaatgagacatcctatatagatatgaaggtcatatagtcgcataggagtggttagactttcttggggaccagtgttaatcgatgatggcactccggatgtttcttctgtttgtcgttgagatcttgactgttgaagtgtgctctgttgatattaatgtcttcgtcagattgttaatttgcttgtttcagatgtcccagaaccatttgtacttagggagtgtttgaatgcactagacctaacagat

SEQ ID NO: 66783 - DNA, 893 bp, Zea Mays
gcctcctctccggtctccatcgaattaatcaatggatatgctttgtttatgtttatgcgcacatgggggccccacatgaggaccagcccccgcaacttggagcagcaagttgcatccaattgcagccagagtagcagctagtgtcaccgtcacactcacgcacactatttgaaggcagcaacccgacggccgaacaggttccgctcgctatggattattcttacccaatggaggagcagcattcaggattccggcagtggcaatggcagtggcgcctcttctccctcctctcatcccagccggagctgctcccgccgccgcggccggccaaccatgtcaggtgggaggagaccgccgccgcgcacctcttctccgcaagcctcccgggagtgcgcaaggaggagatcagggtggaggtggaggacgccaggtacctcgtcatccgcaccgagctggacgccggcaccggcaccggcggcgccgtcgcggacgcgaggagcttcgaccggaagtttcggctgccggggatggtggacgtggacggcatctcggcggcgtacacccacggcgtgctgaccgtgaaggtcccgcggatgcacacccgggccaggcctgtagttgacatcctcggtgcgggggcggggccggccagcgaccacgcggcccgggcggcctgattcgtgatttatagcatcaagcatatagggagatatgaagacatggtgggatgacaagtatattcgttccagctggcgcgccgaaccagtccgttggctatctggaccacttacacagagagtatataaaatgaacttcaaagcagtggaggaccgaaccggtcaggatgcaacgactatttccagtttcaacgatcacctgttgacgtggttctg

SEQ ID NO: 66784 - DNA, 1540 bp, Zea Mays
cgactcccgctgatccaaatccattgagcgggagaacccgacatccaaaattccccaaaccccctcccaagtcccaaccctagccggctagcctccttccccttcagccttcacacctccgatttctcgcgccttcgtctcccgcccaatttccagaagcttctagaaccaggtttctaaccctaccgcagaatgatgctttcttgcgcctagtagcctggggcggaggcatggacggcggcggggaggggggctcgagcggcgggaggttccctattctgcaggcgaacagggaccccgagtcgaattgggaggtggacgttgccaagagcctcgaggattacctgctcaagatctgctcaggggaggtctccggcgaggacggggcccactctgtcaactttgccgaagacaggaacaactggaaaatggctcagctcaagctaatcaaaacaaccctagcattattcccagtgaagaagatgatatatttattgggctagatgatgtcccagtggaaacaagaatatctctggataacaatgtcgatcgagatgatttacaaagaaaaattgtgaggccaccagcaaacctactggtgtttgaaggggactgtctggatagtgaagcaagcgagctagattcatatttgttagcaacatgtgatttttatggagatttccttctgctggatccttgtgatgcaccagctgtttttgactttctgcaaggaaaacattctggtaaagaaaatagtgtggctcatcaaggcagtgcagcaccttctaaaagccaagccaatattttcacttccccgaatgcaagatcagtgggcacaggtcgtaaatcagcccctggaaaagtcctaggaggtctagatccaactcaggagaaccaatcttcaactcaagaaaccagtccagataacaaacattggtctgatcctgttgaacctagctttgctgatgatgttgaaatgcatcccccagatgatatagaggaccctgttggagattattctgatgacgaggatccatggaaacctttgaatccacatgaacctggcaatttaaagattcggccttacaggagagtgaaaggttctccacggggtgttattggcatttcgaaaaagaaaactctcaaatcactgtttcctattgcaaagatggttggtgtcgtcatacctgaacatgctaaatcttttgaagcacagcagtctcaggaggaacattatggttcccaatcaccccctcgttttgaaaagtttttgagatcatttgaattaggagaagaaaatcccaatgtgtttggagatttgaaagatgacaatgcatccaatactggcattaattttgattatgatgacccagacatgccaaacgacatagatattgatcttgatgttccaacatgtcctgatgagattattgctataactcccaaaggtacacaggatgacatagatacacatgaaaacctcgacgacttgtgtcggtcacatctgagtttctgcaatgaagtgtcagaaggaattgac

SEQ ID NO: 66785 - DNA, 2449 bp, Zea Mays
cgactcccgctgatccaaatccattgagcgggagaacccgacatccaaaattccccaaaccccctcccaagtcccaaccctagccggctagcctccttccccttcagccttcacacctccgatttctcgcgccttcgtctcccgcccaatttccagaagcttctagaaccaggtttctaaccctaccgcagaatgatgctttcttgcgcctagtagcctggggcggaggcatggacggcggcggggaggggggctcgagcggcgggaggttccctattctgcaggcgaacagggaccccgagtcgaattgggaggtggacgttgccaagagcctcgaggattacctgctcaagatctgctcaggggaggtctccggcgaggacggggcccactctgtcaactttgccgaagcggcgttattactccaaggatcggttcaagtgtacagtaggaaggtggagtacttgtactcgttggtgcttcacgcgttagagttcctctcgcaaaagaaacaggaacaactggaaaatggctcagctcaagctaatcaaaacaaccctagcattattcccagtgaagaagatgatatatttattgggctagatgatgtcccagtggaaacaagaatatctctggataacaatgtcgatcgagatgatttacaaagaaaaattgtgaggccaccagcaaacctactggtgtttgaaggggactgtctggatagtgaagcaagcgagctagattcatatttgctgtttttgactttctgcaaggaaaacattctggtaaagaaaatagtgtggctcatcaaggcagtgcagcaccttctaaaagccaagccaatattttcacttccccgaatgcaagatcagtgggcacaggtcgtaaatcagcccctggaaaagtcctaggaggtctagatccaactcaggagaaccaatcttcaactcaagaaaccagtccagataacaaacattggtctgatcctgttgaacctagctttgctgatgatgttgaaatgcatcccccagatgatatagaggaccctgttggagattattctgatgacgaggatccatggaaacctttgaatccacatgaacctggcaatttaaagattcggccttacaggagagtgaaaggttctccacggggtgttattggcatttcgaaaaagaaaactctcaaatcactgtttcctattgcaaagatggttggtgtcgtcatacctgaacatgctaaatcttttgaagcacagcagtctcaggaggaacattatggttcccaatcaccccctcgttttgaaaagtttttgagatcatttgaattaggagaagaaaatcccaatgtgtttggagatttgaaagatgacaatgcatccaatactggcattaattttgattatgatgacccagacatgccaaacgacatagatattgatcttgatgttccaacatgtcctgatgagattattgctataactcccaaaggtacacaggatgacatagatacacatgaaaacctcgacgacttgtgtcggtcacatctgaatgctctccttgccagcattgctgaggttgaaaagcagagtgagatggacgctcgtgtttcaacatggaaagaaagaattgagattgccttggaagagcaggatagaaacccaccttttgatatcggttcatatggggagcaaatacttgacacactttcatcaagaactaacaatacaggaactgcatcttttagtgagattgttagcggcagaccaaagtttgagattgccagaacgttctctgcccttctccagctggtgaacggcagaagtgttgatctggataaaggaaaagccacgaatgagttggtgtgttacacagcagagaatccatttcatgtaaggcttattggtcccaaccggaggccagaaatggaggcacgctttgctcggaagagagtcaagtccccactgcaaaatgcaggcaaagacggtgagtcctccctggcacaacatgagtgtcccaacaagccgttgcgtaaaaatggcaagattccagtcaagacagcgaccaggctgaccccagatgggaaacgaaggcgaaggtcatctgctcacctaatgcagccgatcaatctggaatccagcggatgaacgccagtgcacactgattcttctaattattgtaacttcagtggcggcttcataggcaggatgagcctgtaagttatgacataggcgtagctagcgggtgtatatgtacagttcaactgtaatgctgacagggcaagatttgttcaacggaattgcccttttatagcatttgccattgtttcatttttaatccaataagctaacacgatgccaagtctgttgttgtaaactggtgcctagctgtatcgatgttgccttccgcgatttgagatttatatattacgcaaaaaaaaactatttcag

SEQ ID NO: 66786 - DNA, 595 bp, Zea Mays
ctcagattcatggcccaggaattgaatctacacggtttaataactatttgcatggctctaaatgcttaattagaagacgaaatgaatcgcaaggggaaactaacatgcgagagaggaagaggaggtagccacaaccaaagagcttggttcaatacttcaatggctagaataatgaacgatatgaagatcaggtagcattatatatgtcaataagaagcagaggagagaagcagcccgcatcgcaggagacaaggacttcacttgtttggccagttcaggacttcaggatgttgtcgatgatatccatgctatattccctcgcttcatgcttaacaatgagggagagactaagtgaggggctgaaggccgttggtgctgtcagaatgtttttttggagttttggtggatgatgctcagtgactgcaatgcaaaggatccttctgttttgtctactgaatgagattacatcactgtttttttcttagcgatatgttgagctcatgtgctcgtttatgttagtcgatctctggctcttgtagtaacttggaaagcttgctgctttttttaagggtatacatgcctatgatgtatggtc

SEQ ID NO: 66787 - DNA, 600 bp, Zea Mays
ctcagattcatggcccaggaattgaatctacacggtttaataactatttgcatggctctaaatgcttaattagaacagaagacgaaatgaatcgcaaggggaaactaacatgcgagagaggaagaggaggtagccacaaccaaagagcttggttcaatacttcaatggctagaataatgaacgatatgaagatcaggtagcattatatatgtcaataagaagcagaggagagaagcagcccgcatcgcaggagacaaggacttcacttgtttggccagttcaggacttcaggatgttgtcgatgatatccatgctatattccctcgcttcatgcttaacaatgagggagagactaagtgaggggctgaaggccgttggtgctgtcagaatgtttttttggagttttggtggatgatgctcagtgactgcaatgcaaaggatccttctgttttgtctactgaatgagattacatcactgtttttttcttagcgatatgttgagctcatgtgctcgtttatgttagtcgatctctggctcttgtagtaacttggaaagcttgctgctttttttaagggtatacatgcctatgatgtatggtc

SEQ ID NO: 66788 - DNA, 1038 bp, Zea Mays
gattaaaaagcagctgagagattcataattcaggcagtgatcatcacctagttttgccatactcttgaggcgtccatataaaacaagtgcaggacccaaacagttgagttcagcagcggcgtgttaacttatccactccctcggcactgcagctcagtgcccttcccagcctctcgctctcccgccgacgcgcacgtcctccgcgccgagcccagaggcagacagaggacgcggccatggcgtccatcccgtgcaccttccagctgagcacggcggcgtcgaggagggtgtcgccgcgggtggcggcgcaggggagaggccaaggaggagggggagcggtgctgaggacgccgctgctgggcgcggggaggcggggcctggggtggctgcggccgtcgcggttgagccgcgtggtgccggcgagcgagagcgggcgggcgggtcccacctgctggttcaagttcggcaacaaggacgccgagggtgccggcatctacggcagccaggccagggacgacttcgaccgcgacgacgtcgagcagtacttcaactacatggggatgctggcggtggagggcacctacgacaagatggaggcgctgctgaaccaggacatccaccccgtggacatcctcctcatgctggcagcctccgagggcgaccgccccaagatcgaggagctgctccgcgccggcgccaggttcgacgtcaaggacgtcgacggccggacggcgctcgaccgggccaccgacgagaccagagagttcatcctcggcttcgccgccaagaaggcctgaacgaccatgtgcaggtcaatcgtgcccggttcttctggacatttggctgcatgtaactaaattcttcgttttctggaatcggtggagtgttcaaccgggggtgaacaagctgtttgcagaggtagctttccgtagtcagctgtattcttactgaagactgaggggtgtactgcgacctgccaaattgctcaataagagatttgtttcaagacagcacggggccttaaacagaacatatggg

SEQ ID NO: 66789 - DNA, 865 bp, Zea Mays
ccacggtctaactgccatcccaaatttccaaccccgacggagacgaaggtcaacagtcatttgcacttctcaaggcacgaacatgtagcaggtcgggccattcgagaccatgcctcgcgcagccaccgaggccgtcgtccacggcgagggaggcacgatcaaagtaggcacaacgggcaccatcggctccctcatgacaagagaactggacgccgtcaaggtcgcgccgccgccaccggcagccgcgggcaacccgcgcctgaggcgccaccaaggctgtcctgtctcggtgccgtgcggagccgctactcctcggaagaccgtgctgaggaaaagctcctcggacatctccggcggcagcagggccgaccgcgtgagcgccgaagatgcctgctgcaagcccaggagggtctcccggaggaacacgttcgactcgccgatgctgcgctcggacggcgcgctcgtggacgtccggaccccgagtggaggcagggcgaagaagaaggggggcgtgtacggcgtcgagttggtggacgtcaagtgcggtaaccccatgaccagcaggctcaggaagctcggcttctgcaagctgtcggagacgtttgcgtaggtggagcctggcaaggaccatggccagcatctgaataccgtgtgcctgatttagtgcagcaattatctacgagttattcctatgtctcatagattagaagggattagaaaaaaattataaaataattttaattgctatggattgaaactcactcaatcaccttcaattcatatgtattttgatgaaacaggtcctaacactgttcggccttaggctgcgatccagtttgcatatctagttcttgtcactttttct

SEQ ID NO: 66790 - DNA, 900 bp, Zea Mays
cacaatacatgtatcatgcatgccctcaaaagctggcagcaatacgagcgagcaaattggggcagaaaggaggggaggaaaagaaagggggagccaccgagcagcgtttggcatggtggatatttacacctcagtttgttgaccatgcctcgcgcagccaccgaggccgtcgtccacggcgagggaggcacgatcaaagtaggcacaacgggcaccatcggctccctcatgacaagagaactggacgccgtcaaggtcgcgccgccgccaccggcagccgcgggcaacccgcgcctgaggcgccaccaaggctgtcctgtctcggtgccgtgcggagccgctactcctcggaagaccgtgctgaggaaaagctcctcggacatctccggcggcagcagggccgaccgcgtgagcgccgaagatgcctgctgcaagcccaggagggtctcccggaggaacacgttcgactcgccgatgctgcgctcggacggcgcgctcgtggacgtccggaccccgagtggaggcagggcgaagaagaaggggggcgtgtacggcgtcgagttggtggacgtcaagtgcggtaaccccatgaccagcaggctcaggaagctcggcttctgcaagctgtcggagacgtttgcgtaggtggagcctggcaaggaccatggccagcatctgaataccgtgtgcctgatttagtgcagcaattatctacgagttattcctatgtctcatagattagaagggattagaaaaaaattataaaataattttaattgctatggattgaaactcactcaatcaccttcaattcatatgtattttgatgaaacaggtcctaacactgttcggccttaggctgcgatccagtttgcatatctagttcttgtcactttttct

SEQ ID NO: 66791 - DNA, 610 bp, Zea Mays
aaccaaatcggttatacgataacggtcggttcgggatttttccatcctactttcatccctagtctccagtccacaatgcggtcgcgcccacgccctcctagtcctccaccaacgacaaagcgtgcatccagatctagtgtccccgttctgttgtccccatccccgttcttctttgtttctttatctccacgatctagtaggtcatctatcctccaagatccgctccagtgttagcagtgagagatcttggtggaagcaatgaatactttgagaagaaaaatgtagctgcagtgcctatgtgataagcttatggattgtagttttgttctctctcaaacactatttttcttccctatatgtgtggatggagatgactatcttttattatctgtaaaaaatcgttttactttttattagcttggttggacatttggtgcctaaactttttattagtttggttggacatttggtgcctattgtgacaagcttatgcagtgcctatgtgacagttgttgttttctgtgaaacacgttgtatcatgttctggtttctgaaaccgttgaatctgtataaacaatctgttgtttgaaactgtttggttggacagttg

SEQ ID NO: 66792 - DNA, 558 bp, Zea Mays
ctccagtccacaatgcggtcgcgcccacgccctcctagtcctccaccaacgacgtgggtctaggaaagcgtgcatccagatctagtgtccccgttctgttgtccccatccccgttcttctttgtttctttatctccacgatctagtaggtcatctatcctccaagatccgctccagtgttagcagtgagagatcttggtggaagcaatgaatactttgagaagaaaaatgtagctgcagtgcctatgtgataagcttatggattgtagttttgttctctctcaaacactatttttcttccctatatgtgtggatggagatgactatcttttattatctgtaaaaaatcgttttactttttattagcttggttggacatttggtgcctaaactttttattagtttggttggacatttggtgcctattgtgacaagcttatgcagtgcctatgtgacagttgttgttttctgtgaaacacgttgtatcatgttctggtttctgaaaccgttgaatctgtataaacaatctgttgtttgaaactgtttggttggacagttg

SEQ ID NO: 66793 - DNA, 5722 bp, Zea Mays
ccaagcaagcacaccgctaagcctgctgccgcctcctcgcggcccagcagcatcagctaactaacccgcccgcgcgccgtacgtgcgcgcgcctgcagctgctcacaagtcacagctagatagtagctactagctaggcagctaggaagagaagacgatcagcatggcgggggagatcgtggcaccgtcggggagccggcgcagctggctgtcggcggcgtccatctcgcggtcgctgcacgcggcaggcgacccggacgacccgttccggcggtcccaggctagccgcgacgacggggacgacgaggagaacctgcggtgggcggcgctggagaagctgccgacgtacgaccgcatgcggcggggcatcatccgcagggcgctggacgagggcggcgccaaggcgggcgcggacgaggtggacatcgcgaacctggacccgcgcgccgggcgggagctcatggagcgcgtcttcaaggccgtcgaggacgacaacgagcgcctgctgacgaatgcatgcgtgcatggttgcagggtgggcatcgagcttccgcagatcgaggttcggtacgagcacctgtcggtggaggcggacgtgtatgtgggcgcgcgcgcgctgcccacgctgctcaactccgccatcaacgtcgtcgaggggctcgtcagcaagtttgtttcgtcgaacaagaggacgatcaatatactcaatgatgtcagcgggatcatcaagccatcgaggatgacgcttcttctgggccctccgtcatccgggaaaaccacacttatgcgagctctaaccgggaagcctgctaagaatctcaaggtgtctgggaaaatcacgtactgtggccatgagttttccgagttctatcctgagaggactagtgcatatgtcagtcagtatgatctacacaacggggagatgactgtaagagagacaatggacttctccagaagatgtctaggcattggtgccagatatgatatgttgtcagaattagctagacgggaacgaaatgctggcattaagcctgaccccgagattgatgctttcatgaaggcaactgcagttgaaggaaaggagaccaatgtcataacagatcttatactcaaggttcttgggcttgacatttgtgctgatattattgttggtgatgagatgaaaagaggcatttctggtggccaaaagaaacgtgtgactactggtgagatgctaactggacctgcaaaggctttgttcatggatgaaatatctactgggcttgatagcaacagcacatttcagattgtcaagtacatcagacagacggttcatgtgatgaattatacagtgatgatttcccttctccagcctccacctgagacctataatttgtttgacgacatcattttactgtcagaaggttacatagtctaccatgggccacgggaagacatccttgaattctttgagagtgttggtttccggtgccctgaacggaaaggagtggcggatttccttcaagaggtgacttccaggaaagatcaacagcagtactggtgccacaaccacgaagattaccattatgtgtcagtcccagagttcgtgcaacatttcaagacattccatgttggccagaaactccagaaagagttacaagttccttatgacaaatctaaaacacatcctgctgctttgactacccagaagtatgggctgtctagctgggagtctctcaaggcagtcttgtctagagaatggttgctgatgaagcgcaactccttcctctatatattcaagttttttcaattgtttgtcctggcagtcctcaccatgacagtgtttttcagaacaaagatgcccagtgggaagttttctgataacggaaaatttatgggtgctttggctacttctttgatcacaattatgttcattggaattactgagatgaacatgaccattaaaaagctacaagtattctacaaacagcgagactacttgttctttccaggatggacctttggagttgcaaccattatcttaaaaattcctttttcattcctggactcatttatgtggacaactgttacatatttatgttatgggtttcgcgcctgctgcaggaaggttcttcagccagtttctagcatactttttaacgcaccagatggctgtggccttgtttcggttgctaggtgcaattttgaagacaatggttgtagccaatacatttggcatgtttgcaatgcttcttatcttcctgttcgcagggattctcctacccagacaggacattaaacattggtggatttgggcctactggtcatctcccatgacatacagtaataatgctatatcagtcaatgaattccttgccactagatgggccatgccgaacaatgaagcaaacattgttgcaccaacaatagggaaggctattctaaaatataaaggctactttggtggtcaatggggctactggctttccatcggtgccatgataggatatactattcttttcaacattctctttctttgtgctcttacattcttgagccctggtggcagttcaaatactgtagtttctgtttctgatgatggcgacaaagagaagtctacagatcaagaaatgtttgatgttgccaatggcacaaatgaagcagcaaacaggagaacccagacaggaatggtcttgcccttccagccactttcactctctttcaaccacatgaactactatgttgacatgcctgctgcaatgaaagatcaaggtttcactgaaagtcgcctccagctgctatctgatattagtggtgcattcagaccaggcgttctgactgccctagttggtgtcagtggagctggaaagaccactctaatggatgtactagcaggaagaaagacaagtggaaccattgagggagatatcaaactttctggttatcctaagaaacaggaaacttttgctcgtgtcagtggctattgtgaacaaactgatatccattcaccaaatgttactgtgtatgaatcactcgtttattctgcttggttgcgcctttcttcagaagttgatgacaatactagaaagatgtttgtggaagaagtgatgtcactagttgagcttgatgtattacgtgatgctctggttggtctccctggtgttagtgggttatcgactgaacaaaggaagaggctgacgattgctgtagaacttgtagcaaacccttcaattatattcatggatgaaccaacttctggccttgatgctagagctgcagcaattgtcatgcgcacacttctgttgctgaagagaggaggtcgtgtcatatatgctggccagcttggtgttcagtctcgcgtactagttgaatatttcgaggcaattccaggtgttccaaaaatcacagaaggatacaatcccgcaacatggatgctggaagttagctctcctctagctgaggctcgcttggatgttgattttgctgaaatttatgcaaattctgccctgtaccggcacaatcaagaacttatcaaggagttgagcattccaccaccaggctaccaggatctctcgtttcctactaaatatgcccagaatttcctaaatcaatgtatggccaatacatggaagcaatttcgatcttattggaagaatccaccctacaatgccatgcgctatcttatgacaatcctctacggtctcgtgttcggttcagtcttttggcgcatgggaaagaacgtgaaatcagagcaggaactgcaaaacctacttggagccacctatgctgctgttttcttccttggatctgcaaacttgctctcatctgtacctgttttttctatcgaaaggacagtcttctaccgtgaaaaggctgctgggatgttctctccgctgtcctattcgtttgcggtgacagttgtggagcttgtctacagcatagctcagggcatcctttataccatccctctgtattcaatgattggttatgagtggaaggcagacaagttcttctacttcatgttcttcctaacctgctccttcctctacttttcactttttggtgcgatgctggttacctgcactccttccgcaatgcttgcgagtattgttgtctcattcagtctaaccggctggaacatcttcgccggattcctcgtaccccgaccggcgttgcctatctggtggcgatggttctactggtgcaacccagtgtcctggaccatctacggcgtcacggcgtcgcagttcggcgatgtaggccgcaacgtgacggctactggcaacgccggcacagtcgtggtgaaggaatttctggaacaaaacctgggcatgaagcacgacttcctcggctacgtcgtgctggcgcatttcggctacatccttctgttcgtcttcctcttcgcgtacggcaccaaggctttgaacttccagaaacgaattggagctatctttactactttatatgttagcagtgtaggcgtgcacactgccttgttctgccatcgcgcgctcgcctccctccccgcgcccgcagtccccgcatccgcgcccgcagtcccgccgcgcccgcagtccccgctgccgagcagtcctgccgcgccccctccccctgcaaaccccaccacgacgcagcaacagatccaccatcgacgtgcgcgccgcgcgccccgacgcggaacgctggatcccacgcagcaggaggtggccaaccagtcgccatcgcccccggcccccaccccgcctgctgcagcaagcggcgtccgctaccgcacgccctcgtccccggacctcctcctccctgccgacgccgccaagatgcgccgctactccgcgctgcccaacggcggccgccaggagacgctggccgaccgcgcgcaccgctaccggggcatcgtgctcgtcatcctcgccccgctcgcgctcgtctctctcgtcctcctcctcatgccacgctcacccgctggcaccatgggcagcgcccgggatagacagcgagatcgagctcttcgtccaggtacgcactcccccgcccggtgacccgttgccggacctggagtcacgctgcctagactcgccgctgggtggattcgtcgaggtggaggtcggattgtgaccacgccatccagttaggacgtcgtcgtctccagatccaggggatggggttgctcggcatggcggccaagggcccctcgcccacgcgtcgcctcctgccgcagccgcacttggccgtctcctcgctggtggcctccgtggctctgatccacccttcctcaacacccaaagatggttgacgtcaccttcgccgtctcctcgccagtggcctccaccagccccgcagtccaagacaaagccgcgacatgagtcaacccaagtccggtcgcacctacaccgatgaccgtacccaacgtgagtcaagccaagtccattcccctcccttgcttcctcaacttgttgtcttgtggtctgaagtttgtctcggagaaggtgatgccatcatcatcagttgtgattatgaattatattctaccgataggtattcaatctctctattcggcaacaccttaaaaagatttacttcaaaatattgacaagtggattgcaggcttagataatttttggaacacaacattgctccaaaaaagttttactgaagaaaaggtatcagtctgcagtttggtaagtgagtctgaatctgcagcaccaaggacttcaagaattagtctgaacctgcacttacagtt

SEQ ID NO: 66794 - DNA, 5806 bp, Zea Mays
ccaagcaagcacaccgctaagcctgctgccgcctcctcgcggcccagcagcatcagctaactaacccgcccgcgcgccgtacgtgcgcgcgcctgcagctgctcacaagtcacagctagatagtagctactagctaggcagctaggaagagaagacgatcagcatggcgggggagatcgtggcaccgtcggggagccggcgcagctggctgtcggcggcgtccatctcgcggtcgctgcacgcggcaggcgacccggacgacccgttccggcggtcccaggctagccgcgacgacggggacgacgaggagaacctgcggtgggcggcgctggagaagctgccgacgtacgaccgcatgcggcggggcatcatccgcagggcgctggacgagggcggcgccaaggcgggcgcggacgaggtggacatcgcgaacctggacccgcgcgccgggcgggagctcatggagcgcgtcttcaaggccgtcgaggacgacaacgagcgcctgatgcgccgcttcagggacagactcgacctggtgggcatcgagcttccgcagatcgaggttcggtacgagcacctgtcggtggaggcggacgtgtatgtgggcgcgcgcgcgctgcccacgctgctcaactccgccatcaacgtcgtcgaggggctcgtcagcaagtttgtttcgtcgaacaagaggacgatcaatatactcaatgatgtcagcgggatcatcaagccatcgaggatgacgcttcttctgggccctccgtcatccgggaaaaccacacttatgcgagctctaaccgggaagcctgctaagaatctcaaggtgtctgggaaaatcacgtactgtggccatgagttttccgagttctatcctgagaggactagtgcatatgtcagtcagtatgatctacacaacggggagatgactgtaagagagacaatggacttctccagaagatgtctaggcattggtgccagatatgatatgttgtcagaattagctagacgggaacgaaatgctggcattaagcctgaccccgagattgatgctttcatgaaggcaactgcagttgaaggaaaggagaccaatgtcataacagatcttatactcaaggttcttgggcttgacatttgtgctgatattattgttggtgatgagatgaaaagaggcatttctggtggccaaaagaaacgtgtgactactggtgagatgctaactggacctgcaaaggctttgttcatggatgaaatatctactgggcttgatagcaacagcacatttcagattgtcaagtacatcagacagacggttcatgtgatgaattatacagtgatgatttcccttctccagcctccacctgagacctataatttgtttgacgacatcattttactgtcagaaggttacatagtctaccatgggccacgggaagacatccttgaattctttgagagtgttggtttccggtgccctgaacggaaaggagtggcggatttccttcaagaggtgacttccaggaaagatcaacagcagtactggtgccacaaccacgaagattaccattatgtgtcagtcccagagttcgtgcaacatttcaagacattccatgttggccagaaactccagaaagagttacaagttccttatgacaaatctaaaacacatcctgctgctttgactacccagaagtatgggctgtctagctgggagtctctcaaggcagtcttgtctagagaatggttgctgatgaagcgcaactccttcctctatatattcaagttttttcaattgtttgtcctggcagtcctcaccatgacagtgtttttcagaacaaagatgcccagtgggaagttttctgataacggaaaatttatgggtgctttggctacttctttgatcacaattatgttcattggaattactgagatgaacatgaccattaaaaagctacaagtattctacaaacagcgagactacttgttctttccaggatggacctttggagttgcaaccattatcttaaaaattcctttttcattcctggactcatttatgtggacaactgttacatatttatgttatgggtttcgcgcctgctgcaggaaggttcttcagccagtttctagcatactttttaacgcaccagatggctgtggccttgtttcggttgctaggtgcaattttgaagacaatggttgtagccaatacatttggcatgtttgcaatgcttcttatcttcctgttcgcagggattctcctacccagacaggacattaaacattggtggatttgggcctactggtcatctcccatgacatacagtaataatgctatatcagtcaatgaattccttgccactagatgggccatgccgaacaatgaagcaaacattgttgcaccaacaatagggaaggctattctaaaatataaaggctactttggtggtcaatggggctactggctttccatcggtgccatgataggatatactattcttttcaacattctctttctttgtgctcttacattcttgagccctggtggcagttcaaatactgtagtttctgtttctgatgatggcgacaaagagaagtctacagatcaagaaatgtttgatgttgccaatggcacaaatgaagcagcaaacaggagaacccagacaggaatggtcttgcccttccagccactttcactctctttcaaccacatgaactactatgttgacatgcctgctgcaatgaaagatcaaggtttcactgaaagtcgcctccagctgctatctgatattagtggtgcattcagaccaggcgttctgactgccctagttggtgtcagtggagctggaaagaccactctaatggatgtactagcaggaagaaagacaagtggaaccattgagggagatatcaaactttctggttatcctaagaaacaggaaacttttgctcgtgtcagtggctattgtgaacaaactgatatccattcaccaaatgttactgtgtatgaatcactcgtttattctgcttggttgcgcctttcttcagaagttgatgacaatactagaaagatgtttgtggaagaagtgatgtcactagttgagcttgatgtattacgtgatgctctggttggtctccctggtgttagtgggttatcgactgaacaaaggaagaggctgacgattgctgtagaacttgtagcaaacccttcaattatattcatggatgaaccaacttctggccttgatgctagagctgcagcaattgtcatgcgcacagtgagaaatacagttaacactgggcgaaccgtggtttgtacgatccatcagcccagcattgatatctttgaggctttcgatgagcttctgttgctgaagagaggaggtcgtgtcatatatgctggccagcttggtgttcagtctcgcgtactagttgaatatttcgaggcaattccaggtgttccaaaaatcacagaaggatacaatcccgcaacatggatgctggaagttagctctcctctagctgaggctcgcttggatgttgattttgctgaaatttatgcaaattctgccctgtaccggcacaatcaagaacttatcaaggagttgagcattccaccaccaggctaccaggatctctcgtttcctactaaatatgcccagaatttcctaaatcaatgtatggccaatacatggaagcaatttcgatcttattggaagaatccaccctacaatgccatgcgctatcttatgacaatcctctacggtctcgtgttcggttcagtcttttggcgcatgggaaagaacgtgaaatcagagcaggaactgcaaaacctacttggagccacctatgctgctgttttcttccttggatctgcaaacttgctctcatctgtacctgttttttctatcgaaaggacagtcttctaccgtgaaaaggctgctgggatgttctctccgctgtcctattcgtttgcggtgacagttgtggagcttgtctacagcatagctcagggcatcctttataccatccctctgtattcaatgattggttatgagtggaaggcagacaagttcttctacttcatgttcttcctaacctgctccttcctctacttttcactttttggtgcgatgctggttacctgcactccttccgcaatgcttgcgagtattgttgtctcattcagtctaaccggctggaacatcttcgccggattcctcgtaccccgaccggcgttgcctatctggtggcgatggttctactggtgcaacccagtgtcctggaccatctacggcgtcacggcgtcgcagttcggcgatgtaggccgcaacgtgacggctactggcaacgccggcacagtcgtggtgaaggaatttctggaacaaaacctgggcatgaagcacgacttcctcggctacgtcgtgctggcgcatttcggctacatccttctgttcgtcttcctcttcgcgtacggcaccaaggctttgaacttccagaaacgaattggagctatctttactactttatatgttagcagtgtaggcgtgcacactgccttgttctgccatcgcgcgctcgcctccctccccgcgcccgcagtccccgcatccgcgcccgcagtcccgccgcgcccgcagtccccgctgccgagcagtcctgccgcgccccctccccctgcaaaccccaccacgacgcagcaacagatccaccatcgacgtgcgcgccgcgcgccccgacgcggaacgctggatcccacgcagcaggaggtggccaaccagtcgccatcgcccccggcccccaccccgcctgctgcagcaagcggcgtccgctaccgcacgccctcgtccccggacctcctcctccctgccgacgccgccaagatgcgccgctactccgcgctgcccaacggcggccgccaggagacgctggccgaccgcgcgcaccgctaccggggcatcgtgctcgtcatcctcgccccgctcgcgctcgtctctctcgtcctcctcctcatgccacgctcacccgctggcaccatgggcagcgcccgggatagacagcgagatcgagctcttcgtccaggtacgcactcccccgcccggtgacccgttgccggacctggagtcacgctgcctagactcgccgctgggtggattcgtcgaggtggaggtcggattgtgaccacgccatccagttaggacgtcgtcgtctccagatccaggggatggggttgctcggcatggcggccaagggcccctcgcccacgcgtcgcctcctgccgcagccgcacttggccgtctcctcgctggtggcctccgtggctctgatccacccttcctcaacacccaaagatggttgacgtcaccttcgccgtctcctcgccagtggcctccaccagccccgcagtccaagacaaagccgcgacatgagtcaacccaagtccggtcgcacctacaccgatgaccgtacccaacgtgagtcaagccaagtccattcccctcccttgcttcctcaacttgttgtcttgtggtctgaagtttgtctcggagaaggtgatgccatcatcatcagttgtgattatgaattatattctaccgataggtattcaatctctctattcggcaacaccttaaaaagatttacttcaaaatattgacaagtggattgcaggcttagataatttttggaacacaacattgctccaaaaaagttttactgaagaaaaggtatcagtctgcagtttggtaagtgagtctgaatctgcagcaccaaggacttcaagaattagtctgaacctgcacttacagtt

SEQ ID NO: 66795 - DNA, 5663 bp, Zea Mays
ccaagcaagcacaccgctaagcctgctgccgcctcctcgcggcccagcagcatcagctaactaacccgcccgcgcgccgtacgtgcgcgcgcctgcagctgctcacaagtcacagctagatagtagctactagctaggcagctaggaagagaagacgatcagcatggcgggggagatcgtggcaccgtcggggagccggcgcagctggctgtcggcggcgtccatctcgcggtcgctgcacgcggcaggcgacccggacgacccgttccggcggtcccaggctagccgcgacgacggggacgacgaggagaacctgcggtgggcggcgctggagaagctgccgacgtacgaccgcatgcggcggggcatcatccgcagggcgctggacgagggcggcgccaaggcgggcgcggacgaggtggacatcgcgaacctggacccgcgcgccgggcgggagctcatggagcgcgtcttcaaggccgtcgaggacgacaacgagcgcctgctgacgaatgcatgcgtgcatggttgcagggtgggcatcgagcttccgcagatcgaggttcggtacgagcacctgtcggtggaggcggacgtgtatgtgggcgcgcgcgcgctgcccacgctgctcaactccgccatcaacgtcgtcgaggggctcgtcagcaagtttgtttcgtcgaacaagaggacgatcaatatactcaatgatgtcagcgggatcatcaagccatcgaggatgacgcttcttctgggccctccgtcatccgggaaaaccacacttatgcgagctctaaccgggaagcctgctaagaatctcaaggtgtctgggaaaatcacgtactgtggccatgagttttccgagttctatcctgagaggactagtgcatatgtcagtcagtatgatctacacaacggggagatgactgtaagagagacaatggacttctccagaagatgtctaggcattggtgccagatatgatatgttgtcagaattagctagacgggaacgaaatgctggcattaagcctgaccccgagattgatgctttcatgaaggcaactgcagttgaaggaaaggagaccaatgtcataacagatcttatactcaaggttcttgggcttgacatttgtgctgatattattgttggtgatgagatgaaaagaggcatttctggtggccaaaagaaacgtgtgactactggtgagatgctaactggacctgcaaaggctttgttcatggatgaaatatctactgggcttgatagcaacagcacatttcagattgtcaagtacatcagacagacggttcatgtgatgaattatacagtgatgatttcccttctccagcctccacctgagacctataatttgtttgacgacatcattttactgtcagaaggttacatagtctaccatgggccacgggaagacatccttgaattctttgagagtgttggtttccggtgccctgaacggaaaggagtggcggatttccttcaagaggtgacttccaggaaagatcaacagcagtactggtgccacaaccacgaagattaccattatgtgtcagtcccagagttcgtgcaacatttcaagacattccatgttggccagaaactccagaaagagttacaagttccttatgacaaatctaaaacacatcctgctgctttgactacccagaagtatgggctgtctagctgggagtctctcaaggcagtcttgtctagagaatggttgctgatgaagcgcaactccttcctctatatattcaagttttttcaattgtttgtcctggcagtcctcaccatgacagtgtttttcagaacaaagatgcccagtgggaagttttctgataacggaaaatttatgggtgctttggctacttctttgatcacaattatgttcattggaattactgagatgaacatgaccattaaaaagctacaagtattctacaaacagcgagactacttgttctttccaggatggacctttggagttgcaaccattatcttaaaaattcctttttcattcctggactcatttatgtggacaactgttacatatttatgttatgggtttcgcgcctgctgcaggaagggattctcctacccagacaggacattaaacattggtggatttgggcctactggtcatctcccatgacatacagtaataatgctatatcagtcaatgaattccttgccactagatgggccatgccgaacaatgaagcaaacattgttgcaccaacaatagggaaggctattctaaaatataaaggctactttggtggtcaatggggctactggctttccatcggtgccatgataggatatactattcttttcaacattctctttctttgtgctcttacattcttgagccctggtggcagttcaaatactgtagtttctgtttctgatgatggcgacaaagagaagtctacagatcaagaaatgtttgatgttgccaatggcacaaatgaagcagcaaacaggagaacccagacaggaatggtcttgcccttccagccactttcactctctttcaaccacatgaactactatgttgacatgcctgctgcaatgaaagatcaaggtttcactgaaagtcgcctccagctgctatctgatattagtggtgcattcagaccaggcgttctgactgccctagttggtgtcagtggagctggaaagaccactctaatggatgtactagcaggaagaaagacaagtggaaccattgagggagatatcaaactttctggttatcctaagaaacaggaaacttttgctcgtgtcagtggctattgtgaacaaactgatatccattcaccaaatgttactgtgtatgaatcactcgtttattctgcttggttgcgcctttcttcagaagttgatgacaatactagaaagatgtttgtggaagaagtgatgtcactagttgagcttgatgtattacgtgatgctctggttggtctccctggtgttagtgggttatcgactgaacaaaggaagaggctgacgattgctgtagaacttgtagcaaacccttcaattatattcatggatgaaccaacttctggccttgatgctagagctgcagcaattgtcatgcgcacagtgagaaatacagttaacactgggcgaaccgtggtttgtacgatccatcagcccagcattgatatctttgaggctttcgatgagcttctgttgctgaagagaggaggtcgtgtcatatatgctggccagcttggtgttcagtctcgcgtactagttgaatatttcgaggcaattccaggtgttccaaaaatcacagaaggatacaatcccgcaacatggatgctggaagttagctctcctctagctgaggctcgcttggatgttgattttgctgaaatttatgcaaattctgccctgtaccggcacaatcaagaacttatcaaggagttgagcattccaccaccaggctaccaggatctctcgtttcctactaaatatgcccagaatttcctaaatcaatgtatggccaatacatggaagcaatttcgatcttattggaagaatccaccctacaatgccatgcgctatcttatgacaatcctctacggtctcgtgttcggttcagtcttttggcgcatgggaaagaacgtgaaatcagagcaggaactgcaaaacctacttggagccacctatgctgctgttttcttccttggatctgcaaacttgctctcatctgtacctgttttttctatcgaaaggacagtcttctaccgtgaaaaggctgctgggatgttctctccgctgtcctattcgtttgcggtgacagttgtggagcttgtctacagcatagctcagggcatcctttataccatccctctgtattcaatgattggttatgagtggaaggcagacaagttcttctacttcatgttcttcctaacctgctccttcctctacttttcactttttggtgcgatgctggttacctgcactccttccgcaatgcttgcgagtattgttgtctcattcagtctaaccggctggaacatcttcgccggattcctcgtaccccgaccggcgttgcctatctggtggcgatggttctactggtgcaacccagtgtcctggaccatctacggcgtcacggcgtcgcagttcggcgatgtaggccgcaacgtgacggctactggcaacgccggcacagtcgtggtgaaggaatttctggaacaaaacctgggcatgaagcacgacttcctcggctacgtcgtgctggcgcatttcggctacatccttctgttcgtcttcctcttcgcgtacggcaccaaggctttgaacttccagaaacgaattggagctatctttactactttatatgttagcagtgtaggcgtgcacactgccttgttctgccatcgcgcgctcgcctccctccccgcgcccgcagtccccgcatccgcgcccgcagtcccgccgcgcccgcagtccccgctgccgagcagtcctgccgcgccccctccccctgcaaaccccaccacgacgcagcaacagatccaccatcgacgtgcgcgccgcgcgccccgacgcggaacgctggatcccacgcagcaggaggtggccaaccagtcgccatcgcccccggcccccaccccgcctgctgcagcaagcggcgtccgctaccgcacgccctcgtccccggacctcctcctccctgccgacgccgccaagatgcgccgctactccgcgctgcccaacggcggccgccaggagacgctggccgaccgcgcgcaccgctaccggggcatcgtgctcgtcatcctcgccccgctcgcgctcgtctctctcgtcctcctcctcatgccacgctcacccgctggcaccatgggcagcgcccgggatagacagcgagatcgagctcttcgtccaggtacgcactcccccgcccggtgacccgttgccggacctggagtcacgctgcctagactcgccgctgggtggattcgtcgaggtggaggtcggattgtgaccacgccatccagttaggacgtcgtcgtctccagatccaggggatggggttgctcggcatggcggccaagggcccctcgcccacgcgtcgcctcctgccgcagccgcacttggccgtctcctcgctggtggcctccgtggctctgatccacccttcctcaacacccaaagatggttgacgtcaccttcgccgtctcctcgccagtggcctccaccagccccgcagtccaagacaaagccgcgacatgagtcaacccaagtccggtcgcacctacaccgatgaccgtacccaacgtgagtcaagccaagtccattcccctcccttgcttcctcaacttgttgtcttgtggtctgaagtttgtctcggagaaggtgatgccatcatcatcagttgtgattatgaattatattctaccgataggtattcaatctctctattcggcaacaccttaaaaagatttacttcaaaatattgacaagtggattgcaggcttagataatttttggaacacaacattgctccaaaaaagttttactgaagaaaaggtatcagtctgcagtttggtaagtgagtctgaatctgcagcaccaaggacttcaagaattagtctgaacctgcacttacagtt

SEQ ID NO: 66796 - DNA, 714 bp, Zea Mays
tggtttcaattgaagttctgaatgtgatggctcttttaggtgaacgttcctaagaccaagaagacctactgcaagaacaaggagtgcaagaagcacactctccacaaggttactcagtacaagaagggtaaggatagcctgtctgcccagggaaagcgccgttatgaccgcaagcagtcaggatatggtggccagaccaagcctgtcttccacaagaaggccaagaccaccaagaaaatcgtattgaagctgcagtgccagagctgcaagcactactcacagcacgcaattaagaggtgcaagcattttgagattggtggagacaagaagggcaagggaacatctctcttctaagtttctcatcgcccatctcgatgttggatcgaacctgtgggtctactactgttctaaaaactcgtcaaatttcaatgttactagtagttctgaaagcaggtcatgctgtgtatcaaattccaatgcctgacatttgcgctgagtgtgggttgtcttttggctaaatgaagttttgcaccctgaatcttcattgaatgtgttgtgtgtttgtttgattttgttctgcgattgccttagtctaaagcttgatcacaccgaggatggtttatgtaatgtaactggctgaatggaatcccacagttcgctcactgaattgttggagatgatattgcatatgaaataaatccatcgattttgtaa

SEQ ID NO: 66797 - DNA, 725 bp, Zea Mays
cttcggtggctgtcatttatgtagatacttgtccccattctgatcaactggtgaacgttcctaagaccaagaagacctactgcaagaacaaggagtgcaagaagcacactctccacaaggttactcagtacaagaagggtaaggatagcctgtctgcccagggaaagcgccgttatgaccgcaagcagtcaggatatggtggccagaccaagcctgtcttccacaagaaggccaagaccaccaagaaaatcgtattgaagctgcagtgccagagctgcaagcactactcacagcacgcaattaagaggtgcaagcattttgagattggtggagacaagaagggcaagggaacatctctcttctaagtttctcatcgcccatctcgatgttggatcgaacctgtgggtctactactgttctaaaaactcgtcaaatttcaatgttactagtagttctgaaagcaggtcatgctgtgtatcaaattccaatgcctgacatttgcgctgagtgtgggttgtcttttggctaaatgaagttttgcaccctgaatcttcattgaatgtgttgtgtgtttgtttgattttgttctgcgattgccttagtctaaagcttgatcacaccgaggatggtttatgtaatgtaactggctgaatggaatcccacagttcgctcactgaattgttggagatgatattgcatatgaaataaatccatcgattttgtaa

SEQ ID NO: 66798 - DNA, 1344 bp, Zea Mays
tcgatgcggtctgaaattgatgcacaagctatatatattcttgcatcgccatgtatatataattggttagatcgtggttccaggttccaaacgaaaaaaaaaacatcttcattttccatgtaacagaaacggcgcatctaacggttgatttcaacaccccaactacctgtcgctttaatttccactcctctcgatgtcatgcacctagcgcctctctctcttctctctctctctctctctctcttctctctctctctctctctctctctctctctccccggcccccctcttctgtatatatatagccaggctgtgtttacccctttgcaaaaggcattcgttcgttcataaacatcgcctgaacaccaaagtcaccctccagcagtttcgctttcttgcttcaccctgcgatcgagatcgagctcaacaaccatggaggatttagtgagtagcccatctttcaggagcgtcctcagcagcagtagcgaagggcaggctcagtcaggagagagttcttggacggattacttcgtggatttcatgttatccgaggaggagaggaagagacaggcagatgctagctcatactcatactgcgctaccgaagacgaaggcggcagcaaatacggtggcgatggaagcaaccgcgatgaggaggaggaggaggaagaagaggagtccatggtctccgatgccgcctctcatgcccctacgactgcaggcgccaccgcactgataccagctggcaggtacaaggagctgaagaagctcaagaaaaagcctttcggcaaagccctggatcatgacggttccctggaggataccgcaagctctccggtgaatagcccaaagtgttgtgtcacagctggaattgagtgctaaaaggaggtgcaacatcagggacctcaccaagggagtcgttggaattggcgatgatcacggcggggaggggatggacgtctgtacagatgcaacgaccacggaaggagcgaggcttggtgatcagtaccacacgagcatagctccatgtgcggagctgaaggacaaggggatttgtttgttccccttttccgtgctgctgcactaccatgggccaaactgaggaaaaaagcaatgtgcgaatgaacagcatatgtagtgtttcgcaacttacactctatgcgcgcatgcatgtgtggtatgaacgaataccagaagaatgtgatactgtggatatatatatgtttttccttaattaatatatgtgaatactactatgaaattgttactcgtacacgtgtgttcctgctggtggtttcatttccatttttttgctttaccaatacacaatatatattgagtagg

SEQ ID NO: 66799 - DNA, 1279 bp, Zea Mays
gcataagtatcttccattcttctttatggtatcttttgtcactcatgtatcagcttctagactaaatgagtcaacaatctcaaacaggatgactccaaatatggctgcttgcattgctgtagagagcatatcaattcttgagaagctccattctaaagggtttgtgcatggtgatgtgaaaccagagaattttctgcttggtcagcctggatcgcctgaagataagaagctttaccttacagatcttggtttagcatccaagtggagagagaataatggtcatcatgttgattatgatcaacggcctgatatctttaggggaacaattagatatgcgagtgtccatgctcatttggggcgcactggtagtaggagggatgatttagagtcaatggcatacacccttattttcctgataagaggaagattaccttggcaaggctaccagggagataccaagagtttccttgtttgcaagaagaaaatgtctacttctccggagatgctttgttgttattgtccagctccattcaaacagtttcttgagattgtcacaaatatgaaatttgacaaagagccaaattatgccaagcttatctctctttttgatggtttgattgaagcacctgcttcgagacaaatcagaaatgatggggctctcaaggttggacagaaacgtggaagattggttgcagatctagaagaagatgaacaacctaaaaagaaggttagattagggagcccagcggctcaatggatttcagtttataatgcgaggtggcccatcaagcagaggtaccattacaatgtggctgactcgaggctaagccaacatatagaaaagggcaacgatgatgggctttacattagcagcatggcttcctcggcaaacctttgggcactcatcatggacgcaggaactggtttctgttctcaggtttatgagctcttactagttttcctccacaaggactgaataatggagcagtgggagaaaagctactacataacagcaattgctggatcatccaacgggagctcattggttgtcatgtccaaaggaactccttacacccagaaatcatacaaggttagtctatgttaggcaaagggtaatatatttccactgctccggacctccgccttccccagctcacacgtcaaggagaaatgggccaagaacctctacatcgcttcgatctgctacgggcggaccgtgtgctgatggcgcgcacgtgggaagtggagagagaataatggtcatcatgttgattatgat

SEQ ID NO: 66800 - DNA, 2033 bp, Zea Mays
ctcgtaccgtccaagacggggcaaagaatgcccggggaagccggcgagctggagcgtggcggcagcttggaaccggtcgtcctcctccctccccgtcgctcccgacctcttcctcctcctaatttaatcccacccggcctccccgttctccccgaccgcatccccccttaacctcccttcctcctcctcctcctgcggtcccaactcccatacttcggttcaggaggcaggcaggcaggaaggcaggttcgaggggggattggctccgctcctgctccattgcgcgcgatcgggctcgttcttgtgatctatctagccgtttcttgggtcagtgctggaaggtcaaactgttggtggaaacctcaccggggtgcttcaacgaacgcgaaggctgcatttagtcccgatggctgtcttgatattgcctcagtcctaagccggatacaaagaggaggtgtccatccgacagtcagaggagaggtctgggaattcttacttggttgtttcgatcccagaagtacctttgatgaaagggaagagatcaggcaaatacggaggatacaatatgacagatggaaggaagattgtcgacagatggattcgcatgttggtagcggtaaagttatcacagcaccacttatcactgaggatggcagacctattaaggatcctctggttttacttgaggctactgccgacaaggacacttcagaagttgctccatctaccagtataaatggaaatgaaattgatgaatctgcagaacgcattaccgataaacaaattatcgagtggaagctgacattgcatcaaattgggcttgacgttttacgcactgatcgtaccatggtattttatgagaacaaagaaaatctttccaaattatgggatattctagccgtgtatgcatggattgacaaagatgttggttactgccaaggaatgagtgatttatgctcaccaatgatagttctactaaaggatgaagcagatgccttttggtgctttgagaaattgatgcgtagattgcgaggaaatttcaaatgcacagatcaatctgtgggagtatccaaccaacttcaacatcttgcatctattattcaggttcttgacccaaagctacatgaccacctagaaactcttggcggaggtgactacctttttgcgttccgaatgttcatggtgctatttaggcgtgaagtatcatttggagactccttatacctctgggagatgatgtgggctctagaatacgaccctgacattttcttcgcaacatgcgaagaacaaggtgcagtacataaaaataaagtttctaaatccaaactgaaaggactgcgccattttggcaagtgggataaggacaaggataaggaagatgataagaatggggctgaggacggtgaagatggtccggttccgatttcagtcttcatggttgcaagtgtcctcaaggagaagagagaaaagctgttacaagaagccagaggactggatgatcttatcaggatattgaacgatgtaaatgggaacttagatgctaagaaagcttgcgctggagcattgaaacttcacaaaaaatacctgaaaaaggtacaagcaaagaaaccttaaacgtgccatggaacacacgtccccaatggggctatcgttaccatttcaacatacacgaccattttctacacacaactttgagtgaagatttatcggacacaggtggtaatcgtctgacatgtcctgagatacacggagactgatggtgccaggctagtgggttgagtacaggatgagcgcaaccggtagtgtgtatatcacgttctttgtactcaagaattttgtacagacagaaggcggtgcggatagcatgccttgcatacataataatttcaatacaggttgaaaacttgaaatcaacacaccttgcgacagaattcagcttcaagaaagttcttctgcacatattgtaaagctgtaaaagtgtacgatctaatgttttcattaatgtacacataccaagagaactaataagatga

SEQ ID NO: 66801 - DNA, 3111 bp, Zea Mays
atctcctctgcctgctccaccagtccaccccaccaggcaccagtccaccaccgacgcccgcacgcacgaggcacacgatggcctcgctggaggcggcggagacatcaccgccgtctacgcccaccaccagcgcgtccccctgcccgaccccgcgcccgctggctaccgcaccgccgaccatgggtgcggcgcttctccgcgccgcgcgcagcggcgacgagagacagctcgtgaaagcgcttctggcggaccctgcggccccagaccttgagaccgccgccacagccggagggaacacgctcctccacgtggcggccgcgggcgggcacgtggacctcgcgttgctcctcctccgccgcgccccgcgcctcctcacggcgcgtaacgcggcgctcgacaccccgctccacctcgccgcacgcgcgggggcgcacaaggtcgtcgcgctcctcgccgcctcctcgtcctcgtcatcgtcctcaccagcttgctccctgcgcgccctgacccgggccacgaaccggcgcggggagacggcgctgcacgacgccgtgcggggcggccacgaggccgcggcgcgtgcgctggccaccgcggaccctggtctcgtggggatgtgcggcggcgctggggagtcgccgttttacatggcgtcggcggctgggtccctggggatgctgcgcatgctcttaaaggcatataaggacgcggaggaggaggtgcccgacctcgggtcgagcataggtccgggtggccgcacggtgatgcacgccgctgtgctcacgagcaatgaaatgatacaggaattgctgcagtggaaccccactcttgtgaaagaagttgatgactcgggcagtactccttttcactacatcgcttctgttggaaatatttccgcaatgaagctcttattgcgccgtgacagttctccagcatatagctcagattcaaacggtttatttcctgtacatattgctgctaagatgggctacggtcaattcatctacgagctctgtagattttgcccagattgtgacgaattgcttgacagtagaggaagaaatttccttcatactgctattgagcataagaaatggaaagttgtctggcgtttctctggtactgcagatcttggaaggatggcaaatgtcatggattcagaaggcaacacacctctgcatcttgcaatcaagaatgcagaccagatgatagtgagccttcttatggcaacaaatagtgtgctgccgaatatagtgaacaaccagggcctcaccgccttagatcttgctgtactggcaactgacaaaggcataagttatacactgaatcctcaggtcatcatactccgctgtttggcatggactggagctgtccttagtcctcgtcgccttgatcatttcatcgatgattttggcattggcaaaacttcaggaaacgagctcaagaaattcaccaacattgcacagaacttaattgttggttccgtccttgtttcaacggtcacgtttgcagcagttttcactcttcctggcggctacatatcggaggggcatccacacgccggtgcaccaattctgtcacacaggtacaccttcaaggcgttcgtgatggcaaacaccctcgcatttgtcggctccaccttgtccaccatctggctcacctatgctgggtcggaacacgtccacccactgcttcgtgcaatctacatgttcctctccgtaatttcgatggagcaggcaacaagaagtatggttataggattcgcattgggtgcgtatgtcgttctgagcccagtcagcgagcggattgccattgtggtctgcatgtccaccttcatgacgctcttgcttcgcaacccttctagctggcagctgtggttcctgttcatgccgattaagaggcgattgggatggaaaggagcttttaagacccacttgcctccggaaacaaggagccgccttacaattggtgttggctccaattttgcttgccagttccttcggaggatgctcggattcctttgagagggatgagaagccagaaagcgagagggacatcgagatggggaatcgaaatcccaaggacaactccgactacggtctcaaagacttctttgaacaggtcaaggagattgaggtgctgttggataagatgtccaacatagttcacaaacttcaggaagctaatgaggaatccaagtcagtcaccaaggcttctgcaatgaaagtgataaaggagcgcatggagaaggacatcgatggagtactgaagatcgcacgcaacgtgaaagtgaagctggaacagatggacagaaacaatctcgagaacagacagaagccggggtgtgggaagggcaccagcgtagaccgatcaaggatgtccatgaccattgcattgaagaagaagctgaaagaaaggatgaacgatttccagaatctaagacaaactatacaagaggagtaccgagaagttgtagagaggaggatcttcacagtcacgggaacaaagccttctgaggaggtgattgatcgtctcatcgagaccggaagcagcgagcagatctttgagagagcaatccaagggacaggtagaggacagatccttgacacggttgaagaaattcaggaacggcatgatgcagtcatggagatagagaaaaggctccttgaactgcagatgatttttgcagacatggcggcactcgttgatgcacaaagagaggatctagacaacatagagaacctggttcaaaatgctgtaaaccatgtggtgtctggtaccgaggcgctacgcaccgcgaagagcctgcagaagaagtcgagaaagtgcatgttgattgcgattatcattctgctggtaattgccgccatagtcgtgctttcgatcttaaagccttgggctaagtaaggaggagcaagggaaaacgaacactatcttctgttgcatgtattctaagctaattcttttggctacaccattcagcttataccttaagtttttttttttttggtgcaaacgaaatgaaatttcagcttatcacattattcacatgctggttttttctctgtaaatatgaaacttcagctcttagtttacgaatatgaaactgat

SEQ ID NO: 66802 - DNA, 2126 bp, Zea Mays
cacgatggcctcgctggaggcggcggagacatcaccgccgtctacgcccaccaccagcgcgtccccctgcccgaccccgcgcccgctggctaccgcaccgccgaccatgggtgcggcgcttctccgcgccgcgcgcagcggcgacgagagacagctcgtgaaagcgcttctggcggaccctgcggccccagaccttgagaccgccgccacagccggagggaacacgctcctccacgtggcggccgcgggcgggcacgtggacctcgcgttgctcctcctccgccgcgccccgcgcctcctcacggcgcgtaacgcggcgctcgacaccccgctccacctcgccgcacgcgcgggggcgcacaaggtcgtcgcgctcctcgccgcctcctcgtcctcgtcatcgtcctcaccagcttgctccctgcgcgccctgacccgggccacgaaccggcgcggggagacggcgctgcacgacgccgtgcggggcggccacgaggccgcggcgcgtgcgctggccaccgcggaccctggtctcgtggggatgtgcggcggcgctggggagtcgccgttttacatggcgtcggcggctgggtccctggggatgctgcgcatgctcttaaaggcatataaggacgcggaggaggaggtgcccgacctcgggtcgagcataggtccgggtggccgcacggtgatgcacgccgctgtgctcacgagcaatgaaatgatacaggaattgctgcagtggaaccccactcttgtgaaagaagttgatgactcgggcagtactccttttcactacatcgcttctgttggaaatatttccgcaatgaagctcttattgcgccgtgacagttctccagcatatagctcagattcaaacggtttatttcctgtacatattgctgctaagatgggctacggtcaattcatctacgagctctgtagattttgcccagattgtgacgaattgcttgacagtagaggaagaaatttccttcatactgctattgagcataagaaatggaaagttgtctggcgtttctctggtactgcagatcttggaaggatggcaaatgtcatggattcagaaggcaacacacctctgcatcttgcaatcaagaatgcagaccagatgatagtgagccttcttatggcaacaaatagtgtgctgccgaatatagtgaacaaccagggcctcaccgccttagatcttgctgtactggcaactgacaaaggcataagttatacactggtcatcatactccgctgtttggcatggactggagctgtccttagtcctcgtcgccttgatcatttcatcgatgattttggcattggcaaaacttcaggaaacgagctcaagaaattcaccaacattgcacagaacttaattgttggttccgtccttgtttcaacggtcacgtttgcagcagttttcactcttcctggcggctacatatcggaggggcatccacacgccggtgcaccaattctgtcacacaggtacaccttcaaggcgttcgtgatggcaaacaccctcgcatttgtcggctccaccttgtccaccatctggctcacctatgctgggtcggaacacgtccacccactgcttcgtgcaatctacatgttcctctccgtaatttcgatggagcaggcaacaagaagtatggttataggattcgcattgggtgcgtatgtcgttctgagcccagtcagcgagcggattgccattgtggtctgcatgtccaccttcatgacgctcttgcttcgcaacccttctagctggcagctgtggttcctgttcatgccgattaagaggcgattgggatggaaaggagcttttaagacccacttgcctccggaaacaaggagccgccttacaattggtgttggctccaattttgcttgccagttccttcggaggatgctcggtatgttatttacgtacagctttatctttctgttagcattgctatgatgagaaacaatatagtgtgcctcggtgtaatattcatgttccttggagctgtatgttttgtacttttgtatataaatagttcaagttccacgaatggttgctttattcctgaactcagatattttaatcatctaatgcgatggtggaa

SEQ ID NO: 66803 - DNA, 1350 bp, Zea Mays
gctaaacccggctgtttgctagttaatggcttctagtgctggccggcgtcgccaagatcatccttccttgctcactatactagtttattaatactagttatcctcgccagaacggcctttccaaagtcctatgaatacaccactgtttctttctccatcggctagctgttcttcgcaccctgcacgagaaacccaagggaaggctcctccgtctctttctccgaggaccacaggatgaacaatcttctctcggattcctttgagagggatgagaagccagaaagcgagagggacatcgagatggggaatcgaaatcccaaggacaactccgactacggtctcaaagacttctttgaacaggtcaaggagattgaggtgctgttggataagatgtccaacatagttcacaaacttcaggaagctaatgaggaatccaagtcagtcaccaaggcttctgcaatgaaagtgataaaggagcgcatggagaaggacatcgatggagtactgaagatcgcacgcaacgtgaaagtgaagctggaacagatggacagaaacaatctcgagaacagacagaagccggggtgtgggaagggcaccagcgtagaccgatcaaggatgtccatgaccattgcattgaagaagaagctgaaagaaaggatgaacgatttccagaatctaagacaaactatacaagaggagtaccgagaagttgtagagaggaggatcttcacagtcacgggaacaaagccttctgaggaggtgattgatcgtctcatcgagaccggaagcagcgagcagatctttgagagagcaatccaagggacaggtagaggacagatccttgacacggttgaagaaattcaggaacggcatgatgcagtcatggagatagagaaaaggctccttgaactgcagatgatttttgcagacatggcggcactcgttgatgcacaaagagaggatctagacaacatagagaacctggttcaaaatgctgtaaaccatgtggtgtctggtaccgaggcgctacgcaccgcgaagagcctgcagaagaagtcgagaaagtgcatgttgattgcgattatcattctgctggtaattgccgccatagtcgtgctttcgatcttaaagccttgggctaagtaaggaggagcaagggaaaacgaacactatcttctgttgcatgtattctaagctaattcttttggctacaccattcagcttataccttaagtttttttttttttggtgcaaacgaaatgaaatttcagcttatcacattattcacatgctggttttttctctgtaaatatgaaacttcagctcttagtttacgaatatgaaactgat

SEQ ID NO: 66804 - DNA, 1352 bp, Zea Mays
ccaagatcatccttccttgctcactatactagtttattaatactagttatcctcgccagaacggcctttccaaagtcctatgaatacaccactgtttctttctccatcggctagctgttcttcgcaccctgcacgagaaacccaagggaaggctcctccgtctctttctccgaggaccacaggatgaacaatcttctctcggattcctttgagagggatgagaagccagaaagcgagagggacatcgagatggggaatcgaaatcccaaggacaactccgactacggtctcaaagacttctttgaacaggtcaaggagattgaggtgctgttggataagatgtccaacatagttcacaaacttcaggaagctaatgaggaatccaagtcagtcaccaaggcttctgcaatgaaagtgataaaggagcgcatggagaaggacatcgatggagtactgaagatcgcacgcaacaatctcgagaacagacagaagccggggtgtgggaagggcaccagcgtagaccgatcaaggatgtccatgaccattgcattgaagaagaagctgaaagaaaggatgaacgatttccagaatctaagacaaactatacaagaggagtaccgagaagttgtagagaggaggatcttcacagtcacgggaacaaagccttctgaggaggtgagatggtggttctacttctaccacgctacacaaggcacagcgaacgcttacctcttctgaccaagttttggcacaatgcctaggtgattgatcgtctcatcgagaccggaagcagcgagcagatctttgagagagcaatccaagggacaggtagaggacagatccttgacacggttgaagaaattcaggaacggcatgatgcagtcatggagatagagaaaaggctccttgaactgcagatgatttttgcagacatggcggcactcgttgatgcacaaagagaggatctagacaacatagagaacctggttcaaaatgctgtaaaccatgtggtgtctggtaccgaggcgctacgcaccgcgaagagcctgcagaagaagtcgagaaagtgcatgttgattgcgattatcattctgctggtaattgccgccatagtcgtgctttcgatcttaaagccttgggctaagtaaggaggagcaagggaaaacgaacactatcttctgttgcatgtattctaagctaattcttttggctacaccattcagcttataccttaagtttttttttttttggtgcaaacgaaatgaaatttcagcttatcacattattcacatgctggttttttctctgtaaatatgaaacttcagctcttagtttacgaatatgaaactgat

SEQ ID NO: 66805 - DNA, 1077 bp, Zea Mays
agaaacccaagggaaggctcctccgtctctttctccgaggaccacaggatgaacaatcttctctcggattcctttgagagggatgagaagccagaaagcgagagggacatcgagatggggaatcgaaatcccaaggacaactccgactacggtctcaaagacttctttgaacaggtcaaggagattgaggtgctgttggataagatgtccaacatagttcacaaacttcaggaagctaatgaggaatccaagtcagtcaccaaggcttctgcaatgaaagtgataaaggagcgcatggagaaggacatcgatggagtactgaagatcgcacgcaacgtgaaagtgaagctggaacagatggacagaaacaatctcgagaacagacagaagccggggtgtgggaagggcaccagcgtagaccgatcaaggatgtccatgaccattgcattgaagaagaagctgaaagaaaggatgaacgatttccaggtgattgatcgtctcatcgagaccggaagcagcgagcagatctttgagagagcaatccaagggacaggtagaggacagatccttgacacggttgaagaaattcaggaacggcatgatgcagtcatggagatagagaaaaggctccttgaactgcagatgatttttgcagacatggcggcactcgttgatgcacaaagagaggatctagacaacatagagaacctggttcaaaatgctgtaaaccatgtggtgtctggtaccgaggcgctacgcaccgcgaagagcctgcagaagaagtcgagaaagtgcatgttgattgcgattatcattctgctggtaattgccgccatagtcgtgctttcgatcttaaagccttgggctaagtaaggaggagcaagggaaaacgaacactatcttctgttgcatgtattctaagctaattcttttggctacaccattcagcttataccttaagtttttttttttttggtgcaaacgaaatgaaatttcagcttatcacattattcacatgctggttttttctctgtaaatatgaaacttcagctcttagtttacgaatatgaaactgat

SEQ ID NO: 66806 - DNA, 2218 bp, Zea Mays
gtgtgattcctcgggtagataataagacacaagacgcgctgctccaccttgtgcttcaccccgcccccgcccgaaggcagcatctgccagcagcaaccgtatacagagagagagagagagagagcttcacgactccggtcggccgtcagctcgattcgccttcccccccacctcccccgccctccgatgacggggcgtccgtgggcgggcgcgccgccgccgcctcttcctctcgccgtcgccgtgggcgtcgcggcgctgctgtcctgctgctgctgctgctgctgccagggcgcgtcggcgacggcggcggcgtcgttcggcgacaacttcgagatcacgggcgccgaggaccacgtgaagacctccgccgacgggcagacctggtacctatacctcgacaacaagacaggcgtcgggttccagacgaagcagcgctacctgttcggctggttcagcatgaagctgaagctggtgggcaacgactccgcgggcgtcgtcaccgcctactacatgtgctccgacctggacgcggcgcccctgcgcgacgagctggacttcgagttcctgggcaaccgcagcggggagccctacatcatccagaccaacgtgtaccacagcggcgtcggcggccgggagatgcgccactcgctctggttcgaccccaccgccgacttccacacctacgccatcctctggaaccccaagcagatcgtcgcgtgccgacttcaatgcggccacccacctccacgttcgaccccgcacccctgcactggttggttggcatgaggcatgaggcatggcacgttggatttggatacgatcccgtcggcgcccctgcaaacttggtacacgcccctgtttggggccgaaccatgcacggcgtctcgcccatgccctcccccggtcgcggtcggtccatgcctattattcccggtccacgacaccgcacatggatccactgcctgcctgcccccagggcccaggccccagtcctgtccgatccttggcatcggcagtcggcaccaccgaggatcgagatccataccctaccctaccctaccatacctcatcacgagtggtccatgacggtgctggcaggttcttcgtggacaaggtggcgatccgggtgtacccgaacgacgcgtccaaaccgccgggcggaggaggcggcggcgacggcttcttcccgatcgccaagcccatgtacatcttttccagcatctggaacgcggacgactgggcgacgcgcggcgggctggagaagacggactgggccaaggcgcccttcgtgtcgtcctaccgcgacttcgccgccgacgcctgcgcctggccgccgccggccgcgggggtcgccccgtccccgccgacgcccgcgtgcgccgcggccacgggggacagctggtgggaccagccccccgcgtgggcgctggacgccggccagcgcctggacaacgcctgggtggcaaggaacctcctcgtctacgactactgcgacgaccgcaagcgcttcccgacgccgcccgaggagtgcaagctccggcccgccgcgaccgcatcgtgatcatactatactgttggattggttcgtgcatgatgatgagatggttttttttttggggtttgtttcttggtgcgtaaaaccgggctgattgttgggggtgggggatggagaaaggccgtattatgcgtacattgtgtgtgggcgcatggacagtccggaccgatggttgtggcgttggaacggaccatgtcggccattcttttgttacgaggaaacgaggaatggattcagttttgtaccaccaaagcaattttgtttcccgttggcaaagccgccattttcacttagttaagttagacagcggaccgaacagacctaacaaactgtacagtaaggtggtgtttggttactgtacagtaaggtggtgtttggttagccatgcacagaagcggcaccgtcgtcctccagcagggatccatgcatcgcacatgcaactagtcaccaagcatcaagcaagcagcttaattagctaccacctcacgcacctcgaccggtcggaatcggaaatgcatgcgctggagttgaagcaatcctagctagcttttcttaccgaccaagaattcctggatctggaggcgagaaacaccccctgcggcgatggcctagctcagattctcctgcctctcgtgtccttccctccggtcttcttgcttt

SEQ ID NO: 66807 - DNA, 2345 bp, Zea Mays
gtgtgattcctcgggtagataataagacacaagacgcgctgctccaccttgtgcttcaccccgcccccgcccgaaggcagcatctgccagcagcaaccgtatacagagagagagagagagagagcttcacgactccggtcggccgtcagctcgattcgccttcccccccacctcccccgccctccgatgacggggcgtccgtgggcgggcgcgccgccgccgcctcttcctctcgccgtcgccgtgggcgtcgcggcgctgctgtcctgctgctgctgctgctgctgccagggcgcgtcggcgacggcggcggcgtcgttcggcgacaacttcgagatcacgggcgccgaggaccacgtgaagacctccgccgacgggcagacctggtacctatacctcgacaacaagacaggcgtcgggttccagacgaagcagcgctacctgttcggctggttcagcatgaagctgaagctggtgggcaacgactccgcgggcgtcgtcaccgcctactacgtacgaagcagcgatgtgctccgacctggacgcggcgcccctgcgcgacgagctggacttcgagttcctgggcaaccgcagcggggagccctacatcatccagaccaacgtgtaccacagcggcgtcggcggccgggagatgcgccactcgctctggttcgaccccaccgccgacttccacacctacgccatcctctggaaccccaagcagatcgtgtaagtaaataaaactactctccgtttcattcatccctctccacttgttgcctgctgctcctgctggctgctgctgctgctctgggtactgagagagagctgaccgtgacacagcgcgtgccgacttcaatgcggccacccacctccacgttcgaccccgcacccctgcactggttggttggcatgaggcatgaggcatggcacgttggatttggatacgatcccgtcggcgcccctgcaaacttggtacacgcccctgtttggggccgaaccatgcacggcgtctcgcccatgccctcccccggtcgcggtcggtccatgcctattattcccggtccacgacaccgcacatggatccactgcctgcctgcccccagggcccaggccccagtcctgtccgatccttggcatcggcagtcggcaccaccgaggatcgagatccataccctaccctaccctaccatacctcatcacgagtggtccatgacggtgctggcaggttcttcgtggacaaggtggcgatccgggtgtacccgaacgacgcgtccaaaccgccgggcggaggaggcggcggcgacggcttcttcccgatcgccaagcccatgtacatcttttccagcatctggaacgcggacgactgggcgacgcgcggcgggctggagaagacggactgggccaaggcgcccttcgtgtcgtcctaccgcgacttcgccgccgacgcctgcgcctggccgccgccggccgcgggggtcgccccgtccccgccgacgcccgcgtgcgccgcggccacgggggacagctggtgggaccagccccccgcgtgggcgctggacgccggccagcgcctggacaacgcctgggtggcaaggaacctcctcgtctacgactactgcgacgaccgcaagcgcttcccgacgccgcccgaggagtgcaagctccggcccgccgcgaccgcatcgtgatcatactatactgttggattggttcgtgcatgatgatgagatggttttttttttggggtttgtttcttggtgcgtaaaaccgggctgattgttgggggtgggggatggagaaaggccgtattatgcgtacattgtgtgtgggcgcatggacagtccggaccgatggttgtggcgttggaacggaccatgtcggccattcttttgttacgaggaaacgaggaatggattcagttttgtaccaccaaagcaattttgtttcccgttggcaaagccgccattttcacttagttaagttagacagcggaccgaacagacctaacaaactgtacagtaaggtggtgtttggttactgtacagtaaggtggtgtttggttagccatgcacagaagcggcaccgtcgtcctccagcagggatccatgcatcgcacatgcaactagtcaccaagcatcaagcaagcagcttaattagctaccacctcacgcacctcgaccggtcggaatcggaaatgcatgcgctggagttgaagcaatcctagctagcttttcttaccgaccaagaattcctggatctggaggcgagaaacaccccctgcggcgatggcctagctcagattctcctgcctctcgtgtccttccctccggtcttcttgcttt

SEQ ID NO: 66808 - DNA, 1143 bp, Zea Mays
gtgtgattcctcgggtagataataagacacaagacgcgctgctccaccttgtgcttcaccccgcccccgcccgaaggcagcatctgccagcagcaaccgtatacagagagagagagagagagagcttcacgactccggtcggccgtcagctcgattcgccttcccccccacctcccccgccctccgatgacggggcgtccgtgggcgggcgcgccgccgccgcctcttcctctcgccgtcgccgtgggcgtcgcggcgctgctgtcctgctgctgctgctgctgctgccagggcgcgtcggcgacggcggcggcgtcgttcggcgacaacttcgagatcacgggcgccgaggaccacgtgaagacctccgccgacgggcagacctggtacctatacctcgacaacaagacaggcgtcgggttccagacgaagcagcgctacctgttcggctggttcagcatgaagctgaagctggtgggcaacgactccgcgggcgtcgtcaccgcctactacatgtgctccgacctggacgcggcgcccctgcgcgacgagctggacttcgagttcctgggcaaccgcagcggggagccctacatcatccagaccaacgtgtaccacagcggcgtcggcggccgggagatgcgccactcgctctggttcgaccccaccgccgacttccacacctacgccatcctctggaaccccaagcagatcgtaaaaaggtgaaaaggagaggcgggaaaaaaaggtgacgccaggagcgaacaagtgcatgtgaggctgacgacgaggaaaagaaagaaaaggggagcacggataaaggaaagaatcatccagagaaagacgccgccacattttcaacggtaggatacaagccaagccgagaaaaaaaaagtcactgcgaccggatgctgcaggctccgtctgatacgtgtgcatcttatatcaatattaaagcaaaagaaccctaattttttttagcttagtgaccttgcttaccttttgtaactatgtagctatagctctctagctatgtgttgtgtagtgcaacgagtgagtagaggtgctaataacaacgtgtgctttaatttgtgctctttgcttactagtatatgtagaagcttttagcgtgcttaatcgacg

SEQ ID NO: 66809 - DNA, 958 bp, Zea Mays
gtgtgattcctcgggtagataataagacacaagacgcgctgctccaccttgtgcttcaccccgcccccgcccgaaggcagcatctgccagcagcaaccgtatacagagagagagagagagagagcttcacgactccggtcggccgtcagctcgattcgccttcccccccacctcccccgccctccgatgacggggcgtccgtgggcgggcgcgccgccgccgcctcttcctctcgccgtcgccgtgggcgtcgcggcgctgctgtcctgctgctgctgctgctgctgccagggcgcgtcggcgacggcggcggcgtcgttcggcgacaacttcgagatcacgggcgccgaggaccacgtgaagacctccgccgacgggcagacctggtacctatacctcgacaacaagacaggcgtcgggttccagacgaagcagcgctacctgttcggctggttcagcatgaagctgaagctggtgggcaacgactccgcgggcgtcgtcaccgcctactacatgtgctccgacctggacgcggcgcccctgcgcgacgagctggacttcgagttcctgggcaaccgcagcggggagccctacatcatccagaccaacgtgtaccacagcggcgtcggcggccgggagatgcgccactcgctctggttcgaccccaccgccgacttccacacctacgccatcctctggaaccccaagcagatcgtgcatgaattgaagataagtgttatcgactagcccttgaatacatcagctctgttggaatggaagccaagatgctctaaaggttggcatggaataatatttctggttgactttgcctggctgtagtggattactctttttctcgaacacgcaagaaaattgtgtatcattatattaagaagggaaaaaaggtctaaagtaaacccagtacaagccgcctaaaggcagccaaagacaaaagaac

SEQ ID NO: 66810 - DNA, 4214 bp, Zea Mays
caaatttctcctgatcgcagttcctggtttcgcacaccggatgtttctctgtcctgtggaccgcccactttcagttgcttcgaggagttcgccagagaagtattaaaaaaatctgaatcggcacctcctccgtccctgacgctttctctgggcgtcacttcagcaaaaccccaacttgctccgtcttcgcctgctggttgtcgatcctcgcctcctgctccgatggcgtttaggcgcgtggatcctgaacccttccttcctctgggcttcagcgcttcggtggtccttcaccgggaaattatggccaggtcagtttctcggcgcctcccgccattgcatgaggactgggctatcatcagcatccaacctttacctgaccatgagattgcgttcccggcggtgagggatgtggttagagaataccttgtggagcaccgtcaacttggggtgcgtgatatccagcggtcgcacctgggacaagttttggttcagtttagcagcattcttgaaagagacaaccttgtccttctcggtccgcagcagtaccttgatgcctccttcactgttcagcgacacaatgatgcttggaaccatagggccctgtattttaatcgggaatgttggctcatgttgttgggtttccctctggattatcgttcttctgagcacttgcaggtggctattggctcctttggcagattgattctgtgggaagaagacagacgcaacatttctaggactttgctcagggttcggatcacgtccctggaggaggtcccacagttcattgttttctcagacgctgatggctttcttggagattcgtggacggtgcagtgtgagatcatccagcaatctttgttgggaggtcagcctcaagatgaggacccagtgccagcggccccggcggacgggcaacagcttccctttgagttttttggcctgggtcaacctgtgccggcggcgggctgggatcttaattttcctcctgatgacaacgttcaagctcaacctgcagacaacattcaaggtgactgggaccagtggattgtcaatgatccccctgctcaaccacctctgcagccccttctggaccagccacctgatgagcggcaagtcagcaacccccattcggacctgtcctcagatagctcttctagtcacattcatggtgccttgctgcagaatgggcagcctctgaatgggcagattcctgaagatccggtggatgtggggccggtgccaaactttaatgcccctgccgttcatcccatgattgggccccaagaggttgatggcccacctatacaggaggtccctcctgtgcctggagatatagttattcctgatgcccaaccggtggagccccttgtgaatgggcacaataacgtggagctgaactttatgttttcgcctggctggcattcagatcctgttctgttgagccacttagagaggaaaaggaatgcccagttttacaggatctgggagagattttttgctccagccgactactcagtgacctcggtgcaggtttccaagaaatgggcaccttttttcttatccaacttgatgcacgaggattcctttagctggtccaaaaagttcctatcctcagatattccttcagctttgttggagccggagtctatgtcactcccttttgtcctccccaggaagtgtcctgaggacaagctccctgatttggctgtttctgaggaatctgctgatgacacctctgtccctgcggacacaacctcctccaagcccaatattgctattgtggaatcagacctgaggagaagtaagaggcttcgtgacgcccgggctggtttcaggcaaggctcttgccaaaagaagaattgtttgatgtgtcagcacaaatgtgagggccccccctcgctttctgctaaagctatcaggcgcttaggagagcgcttttgtaatctgtcagaggaagacttggctgacaaagttctgaagaaaaagaagaatccgcctggctgtgttggttctagcaagtcaggcaagaaagatgagggagacaagaatcaagaatcttcagatgatgacaaatgattcgttatttctgccttgggtgggtgtcttttgcaggtctcaacctcgccaggctttttggctgtctcggccctggcgtttatatctgatctctgtgttcttgaacttggcggtttctggctgtgcccggttctgtcttaacagatactcttttgccctcccaatttttgggtttgggctcatttccgttgacaaacttaatctctatgatgaatagtcgcaatgctattaattactccgactggtctgttttaagttttaatgtccgaggtattaatgccgtggctaaggggaatggaattcattgtgtgattcgggagtccaatagcgatattatctgcttgcaggagacgaagagagaatcttttgttagggcagacttaagaaggttctgcccaagttatttcgatgagttcgcttttgtcccttcgatcggaaactccgggggtttcattactgtttggaatagttcgaagctggttggcaatgttgttttccaaaatgagtatgctctttcggttgaattttttgctacttcgtcggaggaatcttggattatcacaaacgtctatgcgccctgttccccagctgggaaaattgattttcttcactggttttctaatatcaacatgccctccgataagcgttggttgattgttggggactttaacctaacacgtaggcctgagaatagaaattctgcagggggggacattaatctgatgctgtgctttaatgaggcaatcagccagctagacctggtggaaatccccctccatggcctctcctttacttggtcgaataaacaaagggaaccccttctccagagactcgattggtttttcatgtcgcaagagtgggcggtcagttacccgaatactctcgctacaacgttgcccagggatatttcagatcatgtgccctgcttgatttcttttaagtcaaagattcctaagcccaagatctttagatttgaaaatttctggttacagtttgacgagttcatgacaatttttcaaaattcgtggacgggtatgccaagcattttggacaaagcgaagaatttaacagcaaagttcaagtccaccagaaagattctaaaagaatggcagcggtccctgccaaaaatcgacaaaactgtgagccaaattaagttgattattgaattcattgatcttatcgaagagcatcgagaccttttgattgaagaatggaatttccgtgagcttttgcaactcaaggctgctgagttgcttcggcttcaaaaaatctattggaagcaacgggcctccatcaaatgggttacggatggagatatctgctccagattctttcatacccatgcaacggtaaggcatggccgcaatacaattgcgttgctcgcagatgacagtggtgcagccttttcagagcatgacctcaaagccaacctgctctggaatgcgttcaaacaacgactgggttcctccgatttcgtggacaatgtctttgatcttcctagtttgatactctgcaacagtgacttacagtggcttgatgagcctttttcaaagcaagaaattgatagtattgtggcgggcctaccttctgataaatccccgggacctgatgggtttaatactaactttatcaaaaaatgctggccgattatttcacaagacttctatgacttatgtgatcaattctaccacggagatgtttgccttcgaagcattaatggttcctatattgttctgattccaaagaaggataatgccagagtagtgggcgatttcagaccaatctctcttctgaataatagtatgaaaatcattactaagctgctggctaaccggcttcagactgtgatgacttcccttgttcacaaaaatcaatatggcttcatcaaaggaagaaccattcaagactgcctggcctgggcattcgaatatatccatctttgccatatttcaaaaaaagagattattgtgctcaaactggactttgaaaaggcgtttgattctctagagcatgagttcattcttcaggtgttgctacacaatggcttcggccccagatggataaactggattagggacattcttcggtctggcacgtcttcagttcttcttaatggtgtacctgggaaaactttt

SEQ ID NO: 66811 - DNA, 2206 bp, Zea Mays
cctgaactcttttgctttttcaacggggctgaaggtgaactacaacaaatcaagtatgtaccccatcaacgtcagtccggctaaaatggtgatccttgctggaactcttaactgtcagataggttcaatgccatttacctatctgggtatcccgctgggtctttcaaaacctaaaatatgccactttttaccactcattcagaggattcaacagcgactttcatgcacttctgccctcctctcacaggctggcaggctcgagcttgttaactcggttttctcagctctcccgacttttttgatgtgtacgctgaagatcccggtgaccacgattaagaagattgattcctatcggaagcactgtctctggagggggaacgacgtcaattcaaagaaaccggcgctagctgcctggagtatgattacccagacaaaaaaatgggggcctgggagtggtaagactagagactcacaataaagccttgctcctgaagttcttacacaagttcttcaacagtcacgatattccctgggttaacttggtctggagcaactattacaggacaaccaggatgcctggctgctcgaaaattggctccttctggtggaaaagcttacttacgtttgtccaagactacaagggtatggctgccccaaaaattggagatggaagaaccattcttttctgggaagatatgtggaattcgggcatcccggctaatcaattccctgaattattttcctttgcccgcaatagcaaactgtccatcaaagaggctctccaaaaagagcaacttattgaaattttccagcttcctctgtcggttcaagctcatgaacaatttttagacttagacgcaacctggggccaaatcatggtaaacagcacaaatgattcttggaaactcatttggggagcagacatttactctacaaaaaaaacgtataagcatttgatgggtcaggcccaggttcaccagatcttcagattgctttggaaaaacaagtgtcaaccaaagcacaaggtctttttttggctttggctaaaaaacagactcaatacaagagatctgctgaaaaggaagaatatgaacctagagtcctacacttgtgagaactgcatctggcaaaaggaagaaactctttaccatcttttcctcaagtgtaactttgcaaaggcttgctggacttctattggtttgacgtctcccagaattgctaatcctgaggccgcggcagtaaacctaatgcaacaactcaatgttccattctctatggaaattgtcattctcatgaactggagcatttggaaaacccgcaatgcttggttttttcagaataaagccccgactgtgcaacactgcaaaaatgagtttgcaagggaacttcatcttgtcatgctgagggctaaaggccgttttgattcgacaattcctgcatggcttcagctctggcagtagacctcgtctcttttccttttcccgttgtagttaggctgttttaccctttgtaatctgctttctgtctgcttctaactctgttattctaaagttttaataaaattttcagtaggggctcgcccctcctgtcttatcaaaacaaaaaaggtggtgtttggtttctaggaactaatatttagtcccttattttattcctttttagtctataaattgttaaatataaaaaataaaataaagttttattttctatatttgacaatttttgaattaaaatggaataaaatgtagggactaaacattagtccctgaaaaccaaacaacccctaagttggacaacaaatcaaacaaattctatatacggttttagtcccgctatagccgttttttaaattatgtgagaattggaggagattcagaggttagcaaaagaattaatcatatttaatccacctataatcatctttaatctaaaattttactagtaagaaaatatgaattaaaaaatcgggttagccgaacatgcgcccaatgtagatctcagactacctcagccagcaagcctgtcaggcagtcgtgcctttgtttgcccgtgtctggccacagatcccgcagccgacatgcgctgtgctctgcctacgcggctagctcggctgatacgaaaacggtcgatgactccatctaccctacccgtctacagactacagcgccatatctatagatctgggtagcgagccttttcccttttg

SEQ ID NO: 66812 - DNA, 2819 bp, Zea Mays
cagaaggtccatgggctggctcggttggctcaaaggcaatctttgcggccgggcctggcccaaaaggatcgcttaagggagagggtgatcttccttgagttgtaccagccctcgaggtgagcatccctcccccggcgccgcgccctcggctttgtagcagccagccgtcatggcgccgccggccagcaccgacgagaccgcacgccacaagaaggccaggaaatccaagatcgatatagaagagaagaagcacaagaaaacaaataaggcgcgcgccgccgcagaggacgccccgatacccgacgccgccgagcgcaagaagcgtaagcacaaggacgggcgcgaggagaagcgggacggccagaagtccaagaaggagcgcaagtccgagggaaagggagaggaagccgaggcggccgtggggagggacgagaagatgaggcgtgcgatggaggacgagcggttcgcggcggcgcggactgacccgcggttccggccgatgcggaggaaggaatccaaggtggcgctggactcgaggttcagcagcatgatgacggacccgaggttcgcctcgtcggcggcgcccgtggacaagcgcgggaggcgccgcaagaaacgcgagaaccccatgctgcattactatctcaaccaagaggacttggaggatgatgggaaggggaaggaaaaggggaagaaggagaaaccagtgcttgttcaagaagaggaggaagatgaagaggaactagaggaacaggaggaagaagagagctctagcagcgatgacgacgaagatgaagatttggatgacgacgacgaagagtgctctgttggcagtgacattgctcattacttaatgggaaggcatgatgatacacctatgattgacaaggaaactcacaggcttgctgttgttaatatggactgggatcatattaagttgacctgtatatggtgatgacttcttgcctcccaaagggtgggcgagttttgtcggtctcaatctatccatcagaatttggactgaagtgcatggaaattgagtcaacacagggcccagctgctctggtcaatgccaatgttgataaaaaagacagtgatgaagatgaggatgacacggatgatgatgaagagagcactgatgatgatgttgatgaagaagaagaggaagttgactctgataaagagaataacaaactgcgtgcttacgagctaaacagattgaggtattactatgcagttgtggtgtgtgattccagcgcaacagcaaatcacctgtacatgactcttgatgggactgagttcttgaaaacagcaaatgtgtttgatttgcagttcattcctgactctagggagttcaaacatcctgctcgagacgccgctacagaggcacctccgagttacaaggaacctgattttgagactcgtgctttgcaacatagcagagttaagctcacctgggatgatgatgaacctgaacgtaagaaagtcttgaggcgaaagttcaatgatgatcagctagatgagcttaacatgtatttagcaagtgatgacagcgcgtcagataatgaaggtgtagacgattctgaggatgaatctctgccaaatgggggatccaaacggaagctaacaaaagaggagaggttggctcttctgctgcaaggagacaaatctgatgaggagcaaactgatgaccaggatatggagattacattcaacacggagcttgaggatcttagtaaacggatcctagagagaaagaacaatgaggagaagaccatctgggagaagcaccaagagaaaatgaaagagaaaaggaagggtaggaagaggggactaaaggacgaagatgatgataaccactacatcagcgatgatgagcctgagaatgatgatgatttctttgcagatgaacagtctgatgaagaacctaagccgagcaaaagcaagaaacacaaggcaaaggcaaaaggcgaagcaaagaggaaaggaaatgatgggaccacagatgagcatttggaacaagaagcaaccaaagatgagttggagctcttggttgctggtgaccaggatactgccaatggtgcaaagggttataacttgaagcgtaaaaagggcaagaagggcaaagaggaatctgctgatgacaaacttcctgacattgaccttagcaaggatgagaggttctcagcaatgtttacttcccacttgttcgcattggatccaactgatccccagtacaagaggagtgccgccttcatgcgaaagcaagctgggaagccaggggtacatgggggcaaatcaagcagagaacctccgctggagggttcgtctctgggaggtacagtaccacctgacgatgctgttactaacaatgatggtcagaaacctgatggttcagccacagagaagctgcaaattttgtctgctgttaagtctctcaagagaaaccttggtgcattcaaaaactcaaagacaggtgaccgataaaaagagcatcatttttgttccggctattacacttaatcagtgaaatccctttgttggaaaatggtctcagttatatagtcttcgagatagtttcatggttatgtatgcttatctctgattctgtagacacgcgtccaatctttggattttcagttttgacactatccagattccagaatccaatagaacgattctgttcatttctagtgagataattggtttaatttatcaatttagtcacagcgcatttgaatatctggccttgttgatgtaatctctatgcgggatactagcaagaggttgagactcgtagaaagtttattaggctgtgc

SEQ ID NO: 66813 - DNA, 2681 bp, Zea Mays
gatcttccttgagttgtaccagccctcgaggtgagcatccctcccccggcgccgcgccctcggctttgtagcagccagccgtcatggcgccgccggccagcaccgacgagaccgcacgccacaagaaggccaggaaatccaagatcgatatagaagagaagaagcacaagaaaacaaataaggcgcgcgccgccgcagaggacgccccgatacccgacgccgccgagcgcaagaagcgtaagcacaaggacgggcgcgaggagaagcgggacggccagaagtccaagaaggagcgcaagtccgagggaaagggagaggaagccgaggcggccgtggggagggacgagaagatgaggcgtgcgatggaggacgagcggttcgcggcggcgcggactgacccgcggttccggccgatgcggaggaaggaatccaaggtggcgctggactcgaggttcagcagcatgatgacggacccgaggttcgcctcgtcggcggcgcccgtggacaagcgcgggaggcgccgcaagaaacgcgagaaccccatgctgcattactatctcaaccaagaggacttggaggatgatgggaaggggaaggaaaaggggaagaaggagaaaccagtgcttgttcaagaagaggaggaagatgaagaggaactagaggaacaggaggaagaagagagctctagcagcgatgacgacgaagatgaagatttggatgacgacgacgaagagtgctctgttggcagtgacattgctcattacttaatgggaaggcatgatgatacacctatgattgacaaggaaactcacaggcttgctgttgttaatatggactgggatcatattaaggcagttgacctgtatatggtgatgacttcttgcctcccaaagggtgggcgagttttgtcggtctcaatctatccatcagaatttggactgaagtgcatggaaattgagtcaacacagggcccagctgctctggtcaatgccaatgttgataaaaaagacagtgatgaagatgaggatgacacggatgatgatgaagagagcactgatgatgatgttgatgaagaagaagaggaagttgactctgataaagagaataacaaactgcgtgcttacgagctaaacagattgaggtattactatgcagttgtggtgtgtgattccagcgcaacagcaaatcacctgtacatgactcttgatgggactgagttcttgaaaacagcaaatgtgtttgatttgcagttcattcctgactctagggagttcaaacatcctgctcgagacgccgctacagagagttaagctcacctgggatgatgatgaacctgaacgtaagaaagtcttgaggcgaaagttcaatgatgatcagctagatgagcttaacatgtatttagcaagtgatgacagcgcgtcagataatgaaggtgtagacgattctgaggatgaatctctgccaaatgggggatccaaacggaagctaacaaaagaggagaggttggctcttctgctgcaaggagacaaatctgatgaggagcaaactgatgaccaggatatggagattacattcaacacggagcttgaggatcttagtaaacggatcctagagagaaagaacaatgaggagaagaccatctgggagaagcaccaagagaaaatgaaagagaaaaggaagggtaggaagaggggactaaaggacgaagatgatgataaccactacatcagcgatgatgagcctgagaatgatgatgatttctttgcagatgaacagtctgatgaagaacctaagccgagcaaaagcaagaaacacaaggcaaaggcaaaaggcgaagcaaagaggaaaggaaatgatgggaccacagatgagcatttggaacaagaagcaaccaaagatgagttggagctcttggttgctggtgaccaggatactgccaatggtgcaaagggttataacttgaagcgtaaaaagggcaagaagggcaaagaggaatctgctgatgacaaacttcctgacattgaccttagcaaggatgagaggttctcagcaatgtttacttcccacttgttcgcattggatccaactgatccccagtacaagaggagtgccgccttcatgcgaaagcaagctgggaagccaggggtacatgggggcaaatcaagcagagaacctccgctggagggttcgtctctgggaggtacagtaccacctgacgatgctgttactaacaatgatggtcagaaacctgatggttcagccacagagaagctgcaaattttgtctgctgttaagtctctcaagagaaaccttggtgcattcaaaaactcaaagacaggtgaccgataaaaagagcatcatttttgttccggctattacacttaatcagtgaaatccctttgttggaaaatggtctcagttatatagtcttcgagatagtttcatggttatgtatgcttatctctgattctgtagacacgcgtccaatctttggattttcagttttgacactatccagattccagaatccaatagaacgattctgttcatttctagtgagataattggtttaatttatcaatttagtcacagcgcatttgaatatctggccttgttgatgtaatctctatgcgggatactagcaagaggttgagactcgtagaaagtttattaggctgtgc

SEQ ID NO: 66814 - DNA, 2726 bp, Zea Mays
cttgagttgtaccagccctcgaggtgagcatccctcccccggcgccgcgccctcggctttgtagcagccagccgtcatggcgccgccggccagcaccgacgagaccgcacgccacaagaaggccaggaaatccaagatcgatatagaagagaagaagcacaagaaaacaaataaggcgcgcgccgccgcagaggacgccccgatacccgacgccgccgagcgcaagaagcgtaagcacaaggacgggcgcgaggagaagcgggacggccagaagtccaagaaggagcgcaagtccgagggaaagggagaggaagccgaggcggccgtggggagggacgagaagatgaggcgtgcgatggaggacgagcggttcgcggcggcgcggactgacccgcggttccggccgatgcggaggaaggaatccaaggtggcgctggactcgaggttcagcagcatgatgacggacccgaggttcgcctcgtcggcggcgcccgtggacaagcgcgggaggcgccgcaagaaacgcgagaaccccatgctgcattactatctcaaccaagaggacttggaggatgatgggaaggggaaggaaaaggggaagaaggagaaaccagtgcttgttcaagaagaggaggaagatgaagaggaactagaggaacaggaggaagaagagagctctagcagcgatgacgacgaagatgaagatttggatgacgacgacgaagagtgctctgttggcagtgacattgctcattacttaatgggaaggcatgatgatacacctatgattgacaaggaaactcacaggcttgctgttgttaatatggactgggatcatattaaggcagttgacctgtatatggtgatgacttcttgcctcccaaagggtgggcgagttttgtcggtctcaatctatccatcagaatttggactgaagtgcatggaaattgagtcaacacagggcccagctgctctggtcaatgccaatgttgataaaaaagacagtgatgaagatgaggatgacacggatgatgatgaagagagcactgatgatgatgttgatgaagaagaagaggaagttgactctgataaagagaataacaaactgcgtgcttacgagctaaacagattgaggtattactatgcagttgtggtgtgtgattccagcgcaacagcaaatcacctgtacatgactcttgatgggactgagttcttgaaaacagcaaatgtgtttgatttgcagttcattcctgactctagggagttcaaacatcctgctcgagacgccgctacagaggcacctccgagttacaaggaacctgattttgagactcgtgctttgcaacatagcagagttaagctcacctgggatgatgatgaacctgaacgtaagaaagtcttgaggcgaaagttcaatgatgatcagatgagcttaacatgtatttagcaagtgatgacagcgcgtcagataatgaaggtgtagacgattctgaggatgaatctctgccaaatgggggatccaaacggaagctaacaaaagaggagaggttggctcttctgctgcaaggagacaaatctgatgaggagcaaactgatgaccaggatatggagattacattcaacacggagcttgaggatcttagtaaacggatcctagagagaaagaacaatgaggagaagaccatctgggagaagcaccaagagaaaatgaaagagaaaaggaagggtaggaagaggggactaaaggacgaagatgatgataaccactacatcagcgatgatgagcctgagaatgatgatgatttctttgcagatgaacagtctgatgaagaacctaagccgagcaaaagcaagaaacacaaggcaaaggcaaaaggcgaagcaaagaggaaaggaaatgatgggaccacagatgagcatttggaacaagaagcaaccaaagatgagttggagctcttggttgctggtgaccaggatactgccaatggtgcaaagggttataacttgaagcgtaaaaagggcaagaagggcaaagaggaatctgctgatgacaaacttcctgacattgaccttagcaaggatgagaggttctcagcaatgtttacttcccacttgttcgcattggatccaactgatccccagtacaagaggagtgccgccttcatgcgaaagcaagctgggaagccaggggtacatgggggcaaatcaagcagagaacctccgctggagggttcgtctctgggaggtacagtaccacctgacgatgctgttactaacaatgatggtcagaaacctgatggttcagccacagagaagctgcaaattttgtctgctgttaagtctctcaagagaaaccttggtgcattcaaaaactcaaagacaggtgaccgataaaaagagcatcatttttgttccggctattacacttaatcagtgaaatccctttgttggaaaatggtctcagttatatagtcttcgagatagtttcatggttatgtatgcttatctctgattctgtagacacgcgtccaatctttggattttcagttttgacactatccagattccagaatccaatagaacgattctgttcatttctagtgagataattggtttaatttatcaatttagtcacagcgcatttgaatatctggccttgttgatgtaatctctatgcgggatactagcaagaggttgagactcgtagaaagtttattaggctgtgc

SEQ ID NO: 66815 - DNA, 1621 bp, Zea Mays
aaaagtgtgtaatagattagttaaggtattactatgcagttgtggtgtgtgattccagcgcaacagcaaatcacctgtacatgactcttgatgggactgagttcttgaaaacagcaaatgtgtttgatttgcagttcattcctgactctagggagttcaaacatcctgctcgagacgccgctacagaggcacctccgagttacaaggaacctgattttgagactcgtgctttgcaacatagcagagttaagctcacctgggatgatgatgaacctgaacgtaagaaagtcttgaggcgaaagttcaatgatgatcagctagatgagcttaacatgtatttagcaagtgatgacagcgcgtcagataatgaaggtgtagacgattctgaggatgaatctctgccaaatgggggatccaaacggaagctaacaaaagaggagaggttggctcttctgctgcaaggagacaaatctgatgaggagcaaactgatgaccaggatatggagattacattcaacacggagcttgaggatcttagtaaacggatcctagagagaaagaacaatgaggagaagaccatctgggagaagcaccaagagaaaatgaaagagaaaaggaagggtaggaagaggggactaaaggacgaagatgatgataaccactacatcagcgatgatgagcctgagaatgatgatgatttctttgcagatgaacagtctgatgaagaacctaagccgagcaaaagcaagaaacacaaggcaaaggcaaaaggcgaagcaaagaggaaaggaaatgatgggaccacagatgagcatttggaacaagaagcaaccaaagatgagttggagctcttggttgctggtgaccaggatactgccaatggtgcaaagggttataacttgaagcgtaaaaagggcaagaagggcaaagaggaatctgctgatgacaaacttcctgacattgaccttagcaaggatgagaggttctcagcaatgtttacttcccacttgttcgcattggatccaactgatccccagtacaagaggagtgccgccttcatgcgaaagcaagctgggaagccaggggtacatgggggcaaatcaagcagagaacctccgctggagggttcgtctctgggaggtacagtaccacctgacgatgctgttactaacaatgatggtcagaaacctgatggttcagccacagagaagctgcaaattttgtctgctgttaagtctctcaagagaaaccttggtgcattcaaaaactcaaagacaggtgaccgataaaaagagcatcatttttgttccggctattacacttaatcagtgaaatccctttgttggaaaatggtctcagttatatagtcttcgagatagtttcatggttatgtatgcttatctctgattctgtagacacgcgtccaatctttggattttcagttttgacactatccagattccagaatccaatagaacgattctgttcatttctagtgagataattggtttaatttatcaatttagtcacagcgcatttgaatatctggccttgttgatgtaatctctatgcgggatactagcaagaggttgagactcgtagaaagtttattaggctgtgc

SEQ ID NO: 66816 - DNA, 1447 bp, Zea Mays
aaggtttttttttgcaagatgttcaccagcagctgagcgagcgttggcaggccacgggggctgtgctgtgctgaaggtcgtccgtagcgtgatctgctagcgctcgcaattctcctctccaccacgccggcgacggcagccggtgaccagtacctacatgtccagcctgaggtcgctagccagcgcactgatcggggacgccgcgaggcttcactcggccactggctctgccggggaggagcctgacagggtctacggcgccgtgctctgccgggcggactccgctggtgctaactacaggcgccgccggggtgcccttggcgccatcgacggcgacggccactcaccttgcgcgctccacagcgacgtgaccgtctactccgagctgtaccatctccgtttctctgacaggaacttcctcgccaacttcaagaacgcgccgaaatgggccgacgtcaaattatggtttctctcagactgctaatggtacatagcagatttacaagggagtatttactgatggacaagaggtagcaataaaaagactgtctgctcacaacaagacgggtgtttgttatggcttaaaattagattctaaccgtcagaatccgattcttgtagccaaaggcttcacttcttagcttgtttctatgagaatcgtttccatgaaaatcactcaaataatccgcaaataatccgtcaagttttgtcacgatgagaaaaattcgttgctttctagatcctaaactctataaactattctagcttcctctatagtctgcaagtaatcccgcgatatttagattatcttgacaactagactatacaagaatccagattctcagaaaagctctttagaaaaaagctataccaaacatacccctttagatatcgcgatattcaggttttagcaaaacttaagcacaaaatccttgttagactccttggtcgttgcatccatgaagagaagatgctgatatacgaataactgacgaaccaaagcttggaccacttcatttttgatccaatcatgcatgcatcacttaaatagaagagaggagtcaaaatagctgatgacctgggaactgtggaaagacaggagatggaataagttcaatgatcaatcatttggtgatgactacgaactggaagagctgatgaaataccttgctgagttgctgtggtattgttgtgtgttatgagaaaaaaaacaatagatcatcctacaatgcctgatgttgttgcaactcttagcagtgatggcatcacattgccagaaccaaagcagccagcttactcctatgcgaaattaaatgtgtcagtcactgtattgagtagcagaaatgatgtcaccatcactactacaaatggcatataacagaatgtgaatatactgttaatcaagtgtgagctacaggtcttggtcatccttcttgcgttaattaat

SEQ ID NO: 66817 - DNA, 1622 bp, Zea Mays
aaggtttttttttgcaagatgttcaccagcagctgagcgagcgttggcaggccacgggggctgtgctgtgctgaaggtcgtccgtagcgtgatctgctagcgctcgcaattctcctctccaccacgccggcgacggcagccggtgaccagtacctacatgtccagcctgaggtcgctagccagcgcactgatcggggacgccgcgaggcttcactcggccactggctctgccggggaggagcctgacagggtctacggcgccgtgctctgccgggcggactccgctggtgctaactacaggcgccgccggggtgcccttggcgccatcgacggcgacggccactcaccttgcgcgctccacagcgacgtgaccgtctactccgagctgtaccatctccgtttctctgacaggaacttcctcgccaacttcaagaacgcgccgaaatgggccgacgtcaaattatggtttctctcagactgctaatggtacatagcagatttacaagggagtatttactgatggacaagaggtagcaataaaaagactgtctgctcacaacaagacgggtgtttgttatggcttaaaattagattctaaccgtcagaatccgattcttgtagccaaaggcttcacttcttagcttgtttctatgagaatcgtttccatgaaaatcactcaaataatccgcaaataatccgtcaagttttgtcacgatgagaaaaattcgttgctttctagatcctaaactctataaactattctagcttcctctatagtctgcaagtaatcccgcgatatttagattatcttgacaactagactatacaagaatccagattctcagaaaagctctttagaaaaaagctataccaaacatacccctttagatatcgcgatattcaggttttagcaaaacttaagcacaaaatccttgttagactccttggtcgttgcatccatgaagagaagatgctgatatacgaataactgacgaaccaaagcttggaccacttcatttttgatccaatcatgcatgcatcacttaaatagaagagaggagtcaaaatagctgatggatatttccatcggatgccactcaagcaacagccagcagacttgtgggcacatagtaaggtggatacatggctaatgaattgcatctgatggccttctctcgatcaagtcagatgttttcagtttagtattaatggtgtatctgtatggtgttctacattatttccttccataaaacctgggaactgtggaaagacaggagatggaataagttcaatgatcaatcatttggtgatgactacgaactggaagagctgatgaaataccttgctgagttgctgtggtattgttgtgtgttatgagaaaaaaaacaatagatcatcctacaatgcctgatgttgttgcaactcttagcagtgatggcatcacattgccagaaccaaagcagccagcttactcctatgcgaaattaaatgtgtcagtcactgtattgagtagcagaaatgatgtcaccatcactactacaaatggcatataacagaatgtgaatatactgttaatcaagtgtgagctacaggtcttggtcatccttcttgcgttaattaat

SEQ ID NO: 66818 - DNA, 3819 bp, Zea Mays
aaggtttttttttgcaagatgttcaccagcagctgagcgagcgttggcaggccacgggggctgtgctgtgctgaaggtcgtccgtagcgtgatctgctagcgctcgcaattctcctctccaccacgccggcgacggcagccggtgaccagtacctacatgtccagcctgaggtcgctagccagcgcactgatcggggacgccgcgaggcttcactcggccactggctctgccggggaggagcctgacagggtctacggcgccgtgctctgccgggcggactccgctggtgctaactacaggcgccgccggggtgcccttggcgccatcgacggcgacggccactcaccttgcgcgctccacagcgacgtgaccgtctactccgagctgtaccatctccgtttctctgacaggaacttcctcgccaacttcaagaacgcgccgaaatgggccgacgtcaaattatggtttctctcagactgctaatgggagtatttactgatggacaagaggtagcaataaaaagactgtctgctcacaacaagacgggtgtttgttatggcttaaaattagattctaaccgtcagaatccgattcttgtagccaaaggcttcacttcttagcttgtttctatgagaatcgtttccatgaaaatcactcaaataatccgcaaataatccgtcaagttttgtcacgatgagaaaaattcgttgctttctagatcctaaactctataaactattctagcttcctctatagtctgcaagtaatcccgcgatatttagattatcttgacaactagactatacaagaatccagattctcagaaaagctctttagaaaaaagctataccaaacatacccctttagatatcgcgatattcaggttttagcaaaacttaagcacaaaatccttgttagactccttggtcgttgcatccatgaagagaagatgctgatatacgaataactgacgaaccaaagcttggaccacttcatttttgatccaatcatgcatgcatcacttaaatagaagagaggagtcaaaatagctgatggtatagcccagggactcctgtaccttcacaacctctcctgaatacgcatcgtccatagggtcttgaaagcaagtaaaatcctgttagatttctgatctaaaccctaagatttctgatgttgggatggcaaggatatttccatcggatgccactcaagcaacagccagcagacttgtgggcacatatggatacatggctaatgaattgcatctgatggccttctctcgatcaaacctgggaactgtggaaagacaggagatggaataagttcaatgatcaatcatttggtgatgactacgaactggaagagctgatgaaataccttgctgagttgctgtggtattgttgtgtgttatgagaaaaaaaacaatagatcatcctacaatgcctgatgttgttgcaactcttagcagtgatggcatcacattgccagaaccaaagcagccagcttactcctatgcgaaattaaatgtgtcagtcactgtattgagtagcagaaatgatgtcaccatcactactacaaatggcatataacagaatgtgaatatactgttaatcaagtgtgagctacaggtcttggtcatccttcttgcgttaattaattgacaacacaattgataacgtcgtgggaattggagttttcctagtggtaatatccattgcttgcttggttatccatatctggatcaaaacacaacaacaaagaggtctgcactaagccactaacataacagataaaaatgtgtgtcattaatatgtgctctcttatatgtataatttcaatattatttttcagaacaagcaatattaaagttacaacgagtgtctttggcaataaaaggtgtgataaacctatggagcatggaaggtggcaacttgggattttcacagtacgattactctcatataaaagaagctacaaataacttttcggttgataataaactgggagaaggtggcttcggccctgtatacaagggccaattgagaagtggaattaaaatagcagccaagaaacttgaagcatgttctttacaaggactattggaattccaaaacgaaatccagcttatagcaaagcttcaacacaaaaatctcgttaagctgctgggttgctgcactaaaggagatcaagaaaagatgcttatatatgaatacatggaaaataaaagtctagattacttcatatttgataatgtgaagggagcagatctaaactggtcaaaacgcctgcacataattaatgggatagctcaagggcttctttaccttcacaattattcacggttatgcgttgtccatagggatttgaaagcaagtaacattctcttggatagtgaaatgaatccaaaaatatcagattttgggatggccagaatattctgttcaaacgcgaaagaatcaaatactacaagaatagtgggcacacagtaagaacatatggatctgtgcactttgagtacatttaaaatttatagaggtgcttcaaaattgtagcatgtcatcaagttaacttaaaaatttcactttttgtattatactgagtactgacactatttaacttccatcctcagtggctacatacctcctgaatatgcttttcatggggtttgctccatcaaatcagatgtttttagctacggggtattgacattggaaattctaagctcaaagaggacggtccaattctatgagtacaaccaaaagctatataatctcatctcatatgtgagtgtaattaaacttaacgaatccagaacttcatctgcggattcccatttgctcataaatacatacctctatctcacttgtttcacaaaaacatgttactttggcaggcttggcaactttggacggacggaaaatcagatgagctgatttattctcctccaggcaatgtacgtgaagagatagaaaggcacattcaggtggcactcttatgtgttcaagaaaatgcggagcatcgacctgatatggagcgagttgtcacaatgctaaacagtaaggatgtggacttacccaagcctatgcagccagcttacttccatgtaaatcctagtgaggaagaagtttcatcacgaagcattaatatgactatgagtatcacgctggaaaggtagaagcacattgtcattgttttttgagaaaaatgcttgtaactatctgcatcaagagggaaaaaaaattgcaccgatatagtcatgtgagtaagtttgattgttatgcatattcattaatacaacatatgttttttacatttttgcttggatacgcagattgattcttgggctcaacctgaatcttcgaaattttaacctcatgtctttaacaacaaaataggtcattctgatcctaaaactcattcattttaaaaaccacagtaccagcagttgcaacagtttcagataaaaacagcagcaacaccactctgatcttgagttgctttattccaagagtaaacttcacaacgggtagtatatccacttgaatgaatcagacaaaattcatgagcacgaactgcaattgggatttggggagcacataaagagggtacagtaaccgctaccgtagtgcgttatcaactcatagcatcagcagacggcactccccacgtggttatttcttctgaatgcctggctcgaatcgaaagcaaaaagcgaaaagaggggattcgtaaggccgaacctcggttcaattggcgcaatgtctgtgccagcacctgcgcgaagctgtacccggagaatgtcgcggtggtagtccgcg

SEQ ID NO: 66819 - DNA, 3509 bp, Zea Mays
aaggtttttttttgcaagatgttcaccagcagctgagcgagcgttggcaggccacgggggctgtgctgtgctgaaggtcgtccgtagcgtgatctgctagcgctcgcaattctcctctccaccacgccggcgacggcagccggtgaccagtacctacatgtccagcctgaggtcgctagccagcgcactgatcggggacgccgcgaggcttcactcggccactggctctgccggggaggagcctgacagggtctacggcgccgtgctctgccgggcggactccgctggtgctaactacaggcgccgccggggtgcccttggcgccatcgacggcgacggccactcaccttgcgcgctccacagcgacgtgaccgtctactccgagctgtaccatctccgtttctctgacaggaacttcctcgccaacttcaagaacgcgccgaaatgggccgacgtcaaattatggtttctctcagactgctaatggtacatagcagatttacaagggagtatttactgatggacaagaggtagcaataaaaagactgtctgctcacaacaagacgggtgtttgttatggcttaaaattagattctaaccgtcagaatccgattcttgtagccaaaggcttcacttcttagcttgtttctatgagaatcgtttccatgaaaatcactcaaataatccgcaaataatccgtcaagttttgtcacgatgagaaaaattcgttgctttctagatcctaaactctataaactattctagcttcctctatagtctgcaagtaatcccgcgatatttagattatcttgacaactagactatacaagaatccagattctcagaaaagctctttagaaaaaagctataccaaacatacccctttagatatcgcgatattcaggttttagcaaaacttaagcacaaaatccttgttagactccttggtcgttgcatccatgaagagaagatgctgatatacgaataactgacgaaccaaagcttggaccacttcatttttgatccaatcatgcatgcatcacttaaatagaagagaggagtcaaaatagctgatggtatagcccagggactcctgtaccttcacaacctctcctgaatacgcatcgtccatagggtcttgaaagcaagtaaaatcctgttagatttctgatctaaaccctaagatttctgatgttgggatggcaaggatatttccatcggatgccactcaagcaacagccagcagacttgtgggcacatatggatacatggctaatgaattgcatctgatggccttctctcgatcaagtcagatgttttcaacctgggaactgtggaaagacaggagatggaataagttcaatgatcaatcatttggtgatgactacgaactggaagagctgatgaaataccttgctgagttgctgtggtattgttgtgtgttatgagaaaaaaaacaatagatcatcctacaatgcctgatgttgttgcaactcttagcagtgatggcatcacattgccagaaccaaagcagccagcttactcctatgcgaaattaaatgtgtcagtcactgtattgagtagcagaaatgatgtcaccatcactactacaaatggcatataacagaatgtgaatatactgttaatcaagtgtgagctacaggtcttggtcatccttcttgcgttaattaattacaacacaattgataacgtcgtgggaattggagttttcctagtggtaatatccattgcttgcttggttatccatatctggatcaaaacacaacaacaaagagaacaagcaatattaaagttacaacgagtgtctttggcaataaaaggtgtgataaacctatggagcatggaaggtggcaacttgggattttcacagtacgattactctcatataaaagaagctacaaataacttttcggttgataataaactgggagaaggtggcttcggccctgtatacaagggccaattgagaagtggaattaaaatagcagccaagaaacttgaagcatgttctttacaaggactattggaattccaaaacgaaatccagcttatagcaaagcttcaacacaaaaatctcgttaagctgctgggttgctgcactaaaggagatcaagaaaagatgcttatatatgaatacatggaaaataaaagtctagattacttcatatttgataatgtgaagggagcagatctaaactggtcaaaacgcctgcacataattaatgggatagctcaagggcttctttaccttcacaattattcacggttatgcgttgtccatagggatttgaaagcaagtaacattctcttggatagtgaaatgaatccaaaaatatcagattttgggatggccagaatattctgttcaaacgcgaaagaatcaaatactacaagaatagtgggcacacatggctacatacctcctgaatatgcttttcatggggtttgctccatcaaatcagatgtttttagctacggggtattgacattggaaattctaagctcaaagaggacggtccaattctatgagtacaaccaaaagctatataatctcatctcatatgcttggcaactttggacggacggaaaatcagatgagctgatttattctcctccaggcaatgtacgtgaagagatagaaaggcacattcaggtggcactcttatgtgttcaagaaaatgcggagcatcgacctgatatggagcgagttgtcacaatgctaaacagtaaggatgtggacttacccaagcctatgcagccagcttacttccatgtaaatcctagtgaggaagaagtttcatcacgaagcattaatatgactatgagtatcacgctggaaaggtagaagcacattgtcattgttttttgagaaaaatgcttgtaactatctgcatcaagagggaaaaaaaattgcaccgatatagtcatgtgagtaagtttgattgttatgcatattcattaatacaacatatgttttttacatttttgcttggatacgcagattgattcttgggctcaacctgaatcttcgaaattttaacctcatgtctttaacaacaaaataggtcattctgatcctaaaactcattcattttaaaaaccacagtaccagcagttgcaacagtttcagataaaaacagcagcaacaccactctgatcttgagttgctttattccaagagtaaacttcacaacgggtagtatatccacttgaatgaatcagacaaaattcatgagcacgaactgcaattgggatttggggagcacataaagagggtacagtaaccgctaccgtagtgcgttatcaactcatagcatcagcagacggcactccccacgtggttatttcttctgaatgcctggctcgaatcgaaagcaaaaagcgaaaagaggggattcgtaaggccgaacctcggttcaattggcgcaatgtctgtgccagcacctgcgcgaagctgtacccggagaatgtcgcggtggtagtccgcg

SEQ ID NO: 66820 - DNA, 4262 bp, Zea Mays
aaggtttttttttgcaagatgttcaccagcagctgagcgagcgttggcaggccacgggggctgtgctgtgctgaaggtcgtccgtagcgtgatctgctagcgctcgcaattctcctctccaccacgccggcgacggcagccggtgaccagtacctacatgtccagcctgaggtcgctagccagcgcactgatcggggacgccgcgaggcttcactcggccactggctctgccggggaggagcctgacagggtctacggcgccgtgctctgccgggcggactccgctggtgctaactacaggcgccgccggggtgcccttggcgccatcgacggcgacggccactcaccttgcgcgctccacagcgacgtgaccgtctactccgagctgtaccatctccgtttctctgacaggaacttcctcgccaacttcaagaacgcgccgaaatgggccgacgtcaaattatggtttctctcagactgctaatggtacatagcagatttacaagggagtatttactgatggacaagaggtagcaataaaaagactgtctgctcacaacaagacgggtgtttgttatggcttaaaattagattctaaccgtcagaatccgattcttgtagccaaaggcttcacttcttagcttgtttctatgagaatcgtttccatgaaaatcactcaaataatccgcaaataatccgtcaagttttgtcacgatgagaaaaattcgttgctttctagatcctaaactctataaactattctagcttcctctatagtctgcaagtaatcccgcgatatttagattatcttgacaactagactatacaagaatccagattctcagaaaagctctttagaaaaaagctataccaaacatacccctttagatatcgcgatattcaggttttagcaaaacttaagcacaaaatccttgttagactccttggtcgttgcatccatgaagagaagatgctgatatacgaataactgacgaaccaaagcttggaccacttcatttttgatccaatcatgcatgcatcacttaaatagaagagaggagtcaaaatagctgatggtatagcccagggactcctgtaccttcacaacctctcctgaatacgcatcgtccatagggtcttgaaagcaagtaaaatcctgttagatttctgatctaaaccctaagatttctgatgttgggatggcaaggatatttccatcggatgccactcaagcaacagccagcagacttgtgggcacatatggatacatggctaatgaattgcatctgatggccttctctcgatcaagtcagatgttttcagtttagtattaatggtgtatctacctgggaactgtggaaagacaggagatggaataagttcaatgatcaatcatttggtgatgactacgaactggaagagctgatgaaataccttgctgagttgctgtggtattgttgtgtgttatgagaaaaaaaacaatagatcatcctacaatgcctgatgttgttgcaactcttagcagtgatggcatcacattgccagaaccaaagcagccagcttactcctatgcgaaattaaatgtgtcagtcactgtattgagtagcagaaatgatgtcaccatcactactacaaatggcatataacagaatgtgaatatactgttaatcaagtgtgagctacaggtcttggtcatccttcttgcgttaattaattgtaaggcaatgtgttctcctttttctcgccagtatgtcaccactaatcctttcaggctgcttcgactattagttttacatatttaacaaaattttccttgttattctatataaactgagacaacattaatttacatcagtgacaaactgtctaccactgggcactgggacataagccattttctgttgtgatgatgaatcacattcccccaataatggacattagacagcatacctagatatcatttgtttgaacatatcataaatctaatcatggctgtttttagtcttcctttgttttttcagtcaggatatcagcctcataatttaggagacataaatatgtaatcaagaagtacaacaacacctgaatgtagacaagtccactgctcacaagagattagaacaaagtaaacttcacatcatgtggaagaatccacaagagacagctctctagaccagtcttccgtggaaatatggccatgtcaccgtctttcaatttatgttgcaaataacacgtctgaatgtaatctaagcttgaccattgaattctcttacctctttgaagacaaagccaatatgacatttggcactcatctgtgaccaagaccacggcgctctagacctctagttaccagtcattctgaaattgttatctctcctatttgtcttcctctcctgcccagcaccattggctggccagacgttctgcagtgattgcaatggtgccagacaacacaattgataacgtcgtgggaattggagttttcctagtggtaatatccattgcttgcttggttatccatatctggatcaaaacacaacaacaaagagaacaagcaatattaaagttacaacgagtgtctttggcaataaaaggtgtgataaacctatggagcatggaaggtggcaacttgggattttcacagtacgattactctcatataaaagaagctacaaataacttttcggttgataataaactgggagaaggtggcttcggccctgtatacaagggccaattgagaagtggaattaaaatagcagccaagaaacttgaagcatgttctttacaaggactattggaattccaaaacgaaatccagcttatagcaaagcttcaacacaaaaatctcgttaagctgctgggttgctgcactaaaggagatcaagaaaagatgcttatatatgaatacatggaaaataaaagtctagattacttcatatttgataatgtgaagggagcagatctaaactggtcaaaacgcctgcacataattaatgggatagctcaagggcttctttaccttcacaattattcacggttatgcgttgtccatagggatttgaaagcaagtaacattctcttggatagtgaaatgaatccaaaaatatcagattttgggatggccagaatattctgttcaaacgcgaaagaatcaaatactacaagaatagtgggcacacatggctacatacctcctgaatatgcttttcatggggtttgctccatcaaatcagatgtttttagctacggggtattgacattggaaattctaagctcaaagaggacggtccaattctatgagtacaaccaaaagctatataatctcatctcatatgcttggcaactttggacggacggaaaatcagatgagctgatttattctcctccaggcaatgtacgtgaagagatagaaaggcacattcaggtggcactcttatgtgttcaagaaaatgcggagcatcgacctgatatggagcgagttgtcacaatgctaaacagtaaggatgtggacttacccaagcctatgcagccagcttacttccatgtaaatcctagtgaggaagaagtttcatcacgaagcattaatatgactatgagtatcacgctggaaaggtagaagcacattgtcattgttttttgagaaaaatgcttgtaactatctgcatcaagagggaaaaaaaattgcaccgatatagtcatgtgagtaagtttgattgttatgcatattcattaatacaacatatgttttttacatttttgcttggatacgcagattgattcttgggctcaacctgaatcttcgaaattttaacctcatgtctttaacaacaaaataggtcattctgatcctaaaactcattcattttaaaaaccacagtaccagcagttgcaacagtttcagataaaaacagcagcaacaccactctgatcttgagttgctttattccaagagtaaacttcacaacgggtagtatatccacttgaatgaatcagacaaaattcatgagcacgaactgcaattgggatttggggagcacataaagagggtacagtaaccgctaccgtagtgcgttatcaactcatagcatcagcagacggcactccccacgtggttatttcttctgaatgcctggctcgaatcgaaagcaaaaagcgaaaagaggggattcgtaaggccgaacctcggttcaattggcgcaatgtctgtgccagcacctgcgcgaagctgtacccggagaatgtcgcggtggtagtccgcg

SEQ ID NO: 66821 - DNA, 3823 bp, Zea Mays
aaggtttttttttgcaagatgttcaccagcagctgagcgagcgttggcaggccacgggggctgtgctgtgctgaaggtcgtccgtagcgtgatctgctagcgctcgcaattctcctctccaccacgccggcgacggcagccggtgaccagtacctacatgtccagcctgaggtcgctagccagcgcactgatcggggacgccgcgaggcttcactcggccactggctctgccggggaggagcctgacagggtctacggcgccgtgctctgccgggcggactccgctggtgctaactacaggcgccgccggggtgcccttggcgccatcgacggcgacggccactcaccttgcgcgctccacagcgacgtgaccgtctactccgagctgtaccatctccgtttctctgacaggaacttcctcgccaacttcaagaacgcgccgaaatgggccgacgtcaaattatggtttctctcagactgctaatgggagtatttactgatggacaagaggtagcaataaaaagactgtctgctcacaacaagacgggtgtttgttatggcttaaaattagattctaaccgtcagaatccgattcttgtagccaaaggcttcacttcttagcttgtttctatgagaatcgtttccatgaaaatcactcaaataatccgcaaataatccgtcaagttttgtcacgatgagaaaaattcgttgctttctagatcctaaactctataaactattctagcttcctctatagtctgcaagtaatcccgcgatatttagattatcttgacaactagactatacaagaatccagattctcagaaaagctctttagaaaaaagctataccaaacatacccctttagatatcgcgatattcaggttttagcaaaacttaagcacaaaatccttgttagactccttggtcgttgcatccatgaagagaagatgctgatatacgaataactgacgaaccaaagcttggaccacttcatttttgatccaatcatgcatgcatcacttaaatagaagagaggagtcaaaatagctgatggatatttccatcggatgccactcaagcaacagccagcagacttgtgggcacatatggatacatggctaatgaattgcatctgatggccttctctcgatcaaacctgggaactgtggaaagacaggagatggaataagttcaatgatcaatcatttggtgatgactacgaactggaagagctgatgaaataccttgctgagttgctgtggtattgttgtgtgttatgagaaaaaaaacaatagatcatcctacaatgcctgatgttgttgcaactcttagcagtgatggcatcacattgccagaaccaaagcagccagcttactcctatgcgaaattaaatgtgtcagtcactgtattgagtagcagaaatgatgtcaccatcactactacaaatggcatataacagaatgtgaatatactgttaatcaagtgtgagctacaggtcttggtcatccttcttgcgttaattaattacaacacaattgataacgtcgtgggaattggagttttcctagtggtaatatccattgcttgcttggttatccatatctggatcaaaacacaacaacaaagagaacaagcaatattaaagttacaacgagtgtctttggcaataaaaggtgtgataaacctatggagcatggaaggtggcaacttgggattttcacagtacgattactctcatataaaagaagctacaaataacttttcggttgataataaactgggagaaggtggcttcggccctgtatacaaggtattatgtccttacaccacaaatgaagtccttaagtgaatgaacattatgttgatcatacaaatataatgccttctctatattatattgtagagatacaaatacaatctgcaatgatgcatattataattgatatttttttgactaaataaaacagatatgaattcccagaagaataagttattgaaaacagtaacttgtttgttttattttgatcaatcccagggccaattgagaagtggaattaaaatagcagccaagaaacttgaagcatgttctttacaaggactattggaattccaaaacgaaatccagcttatagcaaagcttcaacacaaaaatctcgttaagctgctgggttgctgcactaaaggagatcaagaaaagatgcttatatatgaatacatggaaaataaaagtctagattacttcatatttgataatgtgaagggagcagatctaaactggtcaaaacgcctgcacataattaatgggatagctcaagggcttctttaccttcacaattattcacggttatgcgttgtccatagggatttgaaagcaagtaacattctcttggatagtgaaatgaatccaaaaatatcagattttgggatggccagaatattctgttcaaacgcgaaagaatcaaatactacaagaatagtgggcacacagtaagaacatatggatctgtgcactttgagtacatttaaaatttatagaggtgcttcaaaattgtagcatgtcatcaagttaacttaaaaatttcactttttgtattatactgagtactgacactatttaacttccatcctcagtggctacatacctcctgaatatgcttttcatggggtttgctccatcaaatcagatgtttttagctacggggtattgacattggaaattctaagctcaaagaggacggtccaattctatgagtacaaccaaaagctatataatctcatctcatatgtgagtgtaattaaacttaacgaatccagaacttcatctgcggattcccatttgctcataaatacatacctctatctcacttgtttcacaaaaacatgttactttggcaggcttggcaactttggacggacggaaaatcagatgagctgatttattctcctccaggcaatgtacgtgaagagatagaaaggcacattcaggtggcactcttatgtgttcaagaaaatgcggagcatcgacctgatatggagcgagttgtcacaatgctaaacagtaaggatgtggacttacccaagcctatgcagccagcttacttccatgtaaatcctagtgaggaagaagtttcatcacgaagcattaatatgactatgagtatcacgctggaaaggtagaagcacattgtcattgttttttgagaaaaatgcttgtaactatctgcatcaagagggaaaaaaaattgcaccgatatagtcatgtgagtaagtttgattgttatgcatattcattaatacaacatatgttttttacatttttgcttggatacgcagattgattcttgggctcaacctgaatcttcgaaattttaacctcatgtctttaacaacaaaataggtcattctgatcctaaaactcattcattttaaaaaccacagtaccagcagttgcaacagtttcagataaaaacagcagcaacaccactctgatcttgagttgctttattccaagagtaaacttcacaacgggtagtatatccacttgaatgaatcagacaaaattcatgagcacgaactgcaattgggatttggggagcacataaagagggtacagtaaccgctaccgtagtgcgttatcaactcatagcatcagcagacggcactccccacgtggttatttcttctgaatgcctggctcgaatcgaaagcaaaaagcgaaaagaggggattcgtaaggccgaacctcggttcaattggcgcaatgtctgtgccagcacctgcgcgaagctgtacccggagaatgtcgcggtggtagtccgcg

SEQ ID NO: 66822 - DNA, 1351 bp, Zea Mays
gccagacgttctgcagtgattgcaatggtgccagataatgtgaagggagcagatctaaactggtcaaaacgcctgcacataattaatgggatagctcaagggcttctttaccttcacaattattcacggttatgcgttgtccatagggatttgaaagcaagtaacattctcttggatagtgaaatgaatccaaaaatatcagattttgggatggccagaatattctgttcaaacgcgaaagaatcaaatactacaagaatagtgggcacacatggctacatacctcctgaatatgcttttcatggggtttgctccatcaaatcagatgtttttagctacggggtattgacattggaaattctaagctcaaagaggacggtccaattctatgagtacaaccaaaagctatataatctcatctcatatgcttggcaactttggacggacggaaaatcagatgagctgatttattctcctccaggcaatgtacgtgaagagatagaaaggcacattcaggtggcactcttatgtgttcaagaaaatgcggagcatcgacctgatatggagcgagttgtcacaatgctaaacagtaaggatgtggacttacccaagcctatgcagccagcttacttccatgtaaatcctagtgaggaagaagtttcatcacgaagcattaatatgactatgagtatcacgctggaaaggtagaagcacattgtcattgttttttgagaaaaatgcttgtaactatctgcatcaagagggaaaaaaaattgcaccgatatagtcatgtgagtaagtttgattgttatgcatattcattaatacaacatatgttttttacatttttgcttggatacgcagattgattcttgggctcaacctgaatcttcgaaattttaacctcatgtctttaacaacaaaataggtcattctgatcctaaaactcattcattttaaaaaccacagtaccagcagttgcaacagtttcagataaaaacagcagcaacaccactctgatcttgagttgctttattccaagagtaaacttcacaacgggtagtatatccacttgaatgaatcagacaaaattcatgagcacgaactgcaattgggatttggggagcacataaagagggtacagtaaccgctaccgtagtgcgttatcaactcatagcatcagcagacggcactccccacgtggttatttcttctgaatgcctggctcgaatcgaaagcaaaaagcgaaaagaggggattcgtaaggccgaacctcggttcaattggcgcaatgtctgtgccagcacctgcgcgaagctgtacccggagaatgtcgcggtggtagtccgcg

SEQ ID NO: 66823 - DNA, 1897 bp, Zea Mays
ctttaaaaaccatgcgccaaacaacacctacaaatctaacctgatctccctcgctaaaacacagtttgcccatgcagtaaagacaacacaattgataacgtcgtgggaattggagttttcctagtggtaatatccattgcttgcttggttatccatatctggatcaaaacacaacaacaaagagaacaagcaatattaaagttacaacgagtgtctttggcaataaaaggtgtgataaacctatggagcatggaaggtggcaacttgggattttcacagtacgattactctcatataaaagaagctacaaataacttttcggttgataataaactgggagaaggtggcttcggccctgtatacaagggccaattgagaagtggaattaaaatagcagccaagaaacttgaagcatgttctttacaaggactattggaattccaaaacgaaatccagcttatagcaaagcttcaacacaaaaatctcgttaagctgctgggttgctgcactaaaggagatcaagaaaagatgcttatatatgaatacatggaaaataaaagtctagattacttcatatttgataatgtgaagggagcagatctaaactggtcaaaacgcctgcacataattaatgggatagctcaagggcttctttaccttcacaattattcacggttatgcgttgtccatagggatttgaaagcaagtaacattctcttggatagtgaaatgaatccaaaaatatcagattttgggatggccagaatattctgttcaaacgcgaaagaatcaaatactacaagaatagtgggcacacatggctacatacctcctgaatatgcttttcatggggtttgctccatcaaatcagatgtttttagctacggggtattgacattggaaattctaagctcaaagaggacggtccaattctatgagtacaaccaaaagctatataatctcatctcatatgcttggcaactttggacggacggaaaatcagatgagctgatttattctcctccaggcaatgtacgtgaagagatagaaaggcacattcaggtggcactcttatgtgttcaagaaaatgcggagcatcgacctgatatggagcgagttgtcacaatgctaaacagtaaggatgtggacttacccaagcctatgcagccagcttacttccatgtaaatcctagtgaggaagaagtttcatcacgaagcattaatatgactatgagtatcacgctggaaaggtagaagcacattgtcattgttttttgagaaaaatgcttgtaactatctgcatcaagagggaaaaaaaattgcaccgatatagtcatgtgagtaagtttgattgttatgcatattcattaatacaacatatgttttttacatttttgcttggatacgcagattgattcttgggctcaacctgaatcttcgaaattttaacctcatgtctttaacaacaaaataggtcattctgatcctaaaactcattcattttaaaaaccacagtaccagcagttgcaacagtttcagataaaaacagcagcaacaccactctgatcttgagttgctttattccaagagtaaacttcacaacgggtagtatatccacttgaatgaatcagacaaaattcatgagcacgaactgcaattgggatttggggagcacataaagagggtacagtaaccgctaccgtagtgcgttatcaactcatagcatcagcagacggcactccccacgtggttatttcttctgaatgcctggctcgaatcgaaagcaaaaagcgaaaagaggggattcgtaaggccgaacctcggttcaattggcgcaatgtctgtgccagcacctgcgcgaagctgtacccggagaatgtcgcggtggtagtccgcg

SEQ ID NO: 66824 - DNA, 836 bp, Zea Mays
cgcagccgccgacgccaaaagcccgctcttctgccccaagccgcgacgccccgcgacgccgctgcggtgccaccagagcggtggcttctccgacgccgggcgacgagagcggcctgtcgtcggcgtccccgcagccgccgctgttctacggctcgccgccgcggcgagcgtcaaatccggtggtccacgacagcaggttcggcgcggactgcccgcccgtgcccgtgccggggctgtccgtgcaccggcctagcccgcggccgtcgtcggcggcgccgtccatgtcgccgcgcgggtgcgcccgcgcgcggttcgcgttccagcccgcgaatagttaggtgaaatttcatggagaatctgtacaaaagagtggctagctactacacgagagtccgttctgagagaagcaacacgaggtcagtcagtggatgagcttagagagagacattcacacgctgagagggttgataatttgtgatattttcctcctttttttcttcttcctgattttgtatattgtatatcctgctggattaacaaatactagcaaccacttatagtcagtcaacataggccatctactgctagtacctcttttcttctcatgagttgtagcagtttctgtttaattcatatgattgtaattacaatcatattttaagttactactataatttctgtttaattacaatcatagtttctatttaattaaaattcatatgattgtaattacaatcatagtttctgtttttgttatccatattttaagttgctactatagttcatatgattgtaattcaaatgattgtaattagttcaattcaatgagaaaaaat

SEQ ID NO: 66825 - DNA, 868 bp, Zea Mays
cgcagccgccgacgccaaaagcccgctcttctgccccaagccgcgacgccccgcgacgccgctgcggtgccaccagagcggtggcttctccgacgccggtacggaactgctcgacctcctcctcttgaagggcgacgagagcggcctgtcgtcggcgtccccgcagccgccgctgttctacggctcgccgccgcggcgagcgtcaaatccggtggtccacgacagcaggttcggcgcggactgcccgcccgtgcccgtgccggggctgtccgtgcaccggcctagcccgcggccgtcgtcggcggcgccgtccatgtcgccgcgcgggtgcgcccgcgcgcggttcgcgttccagcccgcgaatagttaggtgaaatttcatggagaatctgtacaaaagagtggctagctactacacgagagtccgttctgagagaagcaacacgaggtcagtcagtggatgagcttagagagagacattcacacgctgagagggttgataatttgtgatattttcctcctttttttcttcttcctgattttgtatattgtatatcctgctggattaacaaatactagcaaccacttatagtcagtcaacataggccatctactgctagtacctcttttcttctcatgagttgtagcagtttctgtttaattcatatgattgtaattacaatcatattttaagttactactataatttctgtttaattacaatcatagtttctatttaattaaaattcatatgattgtaattacaatcatagtttctgtttttgttatccatattttaagttgctactatagttcatatgattgtaattcaaatgattgtaattagttcaattcaatgagaaaaaat

SEQ ID NO: 66826 - DNA, 2594 bp, Zea Mays
cgcgctttctcattgcaaaaggggctcgccgccggctcgctcggcatggccgtcctcctcctccccccttgcctcgtctttctcctcctccagctattttccgcgccgtcagacggcgccaccgccgagtacgcggagtacacgtgcaatgggaccacgggcaacttcacctccggcagcgcgttcgccgccaacctggaccgcctcgtcgccgagctgccgggcaacgcctccgcctccccgttgctcttcgcgtcggcatccgcccccggctccgccgacgccgacaccgcgtacggcctcgcgctgtgccgcggggacgtgacggacgcgcgggcctgctcggcctgcctggcggacgccttctcccgcctgcgccgcctgtgcggcggggaccgggacgccacgttctacgccgacctgtgcacggcgcggtactcgggcgccgacttcatggcgcgccccgacgacaactcccccgtcgtgaacggcatggacgcgaacgcgtccacgtaccccgggtgggacgcggccaacgccaccagccggagcttcttcctctccctcgtggggacgctgttcggcgagatgtccatgtacggcgcgtacaactcgtcgcgccgcctcgccaccgccgtcatgttcatcaacgcgggcctgcccaccgtgtacggcctcgcgcagtgcaccccggacctcgcgcccgcgcagtgctggcactgcttccagggcctcggcgacctcaaccgccagtggtacgacggacgcgagggcgggcgcgtctccggcgtccgctgcagcttccgctacgagggctaccagttctaccagggcacgccggacgtcaggatcggcctgcaaggtggcccgtcctcctcgccggacgatgatggaaccagtgcaagcaaccacaaaaaggtcttaatcatcgctcttgtcgtaccaatcgctcttgtctgtggcgtgctggtcgccggccttctcctcaccagagcacaaaggaaacgagccggaaagacgaggctgccgacgcagatgcattctagaaacagctccaagacggaggaggcgctgaagctgtggcggatcgaggagaggagctcggagttcacgctctacgacttcgccgagctggcggccgcgacggctgacttctccgacgacaacctgctcggcaaaggcggcttcggccccgtctacaaggggaagctggcggacggcgcggaggtcgcggtgaagcggctggcggcgcactccgggcagggcctggaggagttcaagaacgagatccagctgatcgccaagctgcagcacaccaacctggtgcgcctgctgggctgctgcgtgcaggaggaagagaagatgctggtgtacgagtacatgcccaaccgcagcctggactgcttcatcttcgaccagcagcgggggccattgctggactgggagaagcggcgccgtatcatcgaggggatcgcgcaggggctgctctacctgcacaggcactcgcgggtgcgcatcatccaccgggacatgaaggctagcaacatcctgctggacaaggacatcaaccccaagatctccgacttcggcatggccaggatcttcgggtccaacatgacggaagccaacaccaacagggtcgtcggaacatatggctacatggctcccgagtacgcttccgagggcatcttctcggtcaagtcggacgtgtacagcttcggcgtgttgctgctggagattgtcagtggcaagaggaacagcggccaccaccagcaccagtacggcgacttcatcaacctcctcggatacgcctggcagctatggagggaagggagggcgttcgagctgatcgacccgacgctgggagagtgcaccgaggtggccgacatcgttcggtgcgtcaaggtggcgctgctgtgcgtgcaggacagcgccacggaccggcccaccatgaccgacgtgacggcgatgctggcaagcagggatggtggtgcggcggcgtcgctgccggacccgagacgcccgccgcacttctcgctcagggtcagcagcagcgacgacgggtcgtcggaggtgcggacgcggtcgcacggcaccgcgtcgttcagcaccaacgacctcaccatcaccaccgtccaagatggcagatgatgcatgcatgaccggcgtattaggtagtgttaagtttgctcctagagcttagttcagaatggaatgactccgtatttgtttgtttttttacggtaaacggggtagagggtcccacctgattttcattgtataagtcgtaagaacaaccacttacattgagagctagtttaggagtccaaaaatcggagtaatttgagaggctaaaatcaccttcgtatctatctaaaattgaataaggtggagattttagcccctctaattcactctgattttatggctctcaaactagccctcaagggtgttacttcttaagacacatagaaggagggtacatgaggctagggagggttcatgatattcctcaggtctcagtggaggaaaattcttaccttacttctgagttcagtgaagatgaaattaggaaagcgattttccaaatgcag

SEQ ID NO: 66827 - DNA, 2590 bp, Zea Mays
cactcatcgattagcccttgtcttgcgttcgttgcagccagtgcagtgcaggacgaactcgacatgggcactctcccctacctcttacttgtcgtgctgtcctctctgtcgctcgtcccccgcgccgccgcgtactcggagtactcgtgcaacggtaccacgggcaacttcacggcggccagcgcgttcggcgccaacctggcccgcctcgtcgcggcgctgcccgccaacgcctcctcctctccgtcgctcttcgcctcggcggccgtcggcgcggctccggacacggcctacggcctcgcgctgtgccgcggcgacgtcacggacgccggggtctgctcggcgtgcctagccgacgcgttcggcaggctgcggcggctctgcggcgcggacagggacgccacgttctacgccgacctgtgcacggcgcggtactccggcggggacttcctggcgcggcccgacgacaactcccccgtgatcaacgcgctggacgtgaacgggtcgacgtactacgggtgggacgcccggaacgcgacgagccggaccctgttcctgtcgctggtgggcacgctgttcggggagatggccatgtacgccgcctacaactcctcggccgcgcgcatgttcgcgagcgccgccatgtacgtcaacccgcagctgcccacggtgtacgggttcgtgcagtgcacgccggacctgtcgcgggcgcagtgctgggactgcttccaggtgctccaggaccagaaccggcggtggtacgacggccgcgagggcggccgcatcctcggcgtccgctgcagcttccggtacgaggcgtaccatttcttcggcggcatgccggaggtcagaatcggcctcaagggcgacccatcttcaccagctgcggaaacggaaatccatggtagcaatcacagggtggtcttaattgtcgctgtcatcgtatcaatcacggcgttctccgctatgatggctgccggccttgtgataatcagagcacgacgacgaaaaggagccgagaagaagagaaagctgcagctggaggcgcaatcccggaacagctctaccacagaggatgcgctgaagctgtggcggatcgaggagagcagctcggagttcacgctgtacgacttcgccgagctggcggccgccacgggcggtttctccgacgagaatctgctcggcagaggcggcttcggccccgtctacaaggggaagctgccggacggcgccgagatcgcggtgaagcggctggcggcgcattctggacagggcctggaggagttcaagaacgagatccagctgatcgccaagctgcagcacaccaacctggtgcggctcgtcggctgctgcgtccaggaggaggagaagctgctggtgtacgagtacatgcccaaccgcagcctcaactgcttcatcttcgaccagcagcgggggccgttgctggactgggagaaacggcgccgtatcatcgagggcgtcgcgcaggggctgctctacctgcacaagcactcgcgggtgcgcatcatccaccgcgacctcaaggctagcaacatcctgctggacaaggacctcaaccccaagatctccgacttcggcatggccaggatctttggatccaacatgacggaggccaacaccaacagggtcgtcgggacatatggctacatggctcctgagtatgcttcggagggcatcttctcggtgaagtcggacgtgtacagcttcggcgtgctgctgctagagatcgtcagcggcaagaggaacactggccaccacaactacggcgacttcgtcaacctgctcggatatgcatggcagctgtggagagacgggagggtgttcgagctgattgacccgacgctgggcgagcgcggcgacgtggcgaccatcgtgcggtgcgtcaaggtggcgctgctgtgcgtgcaggaaagcgccaccgaccggccgaccatggcggacgtcacggcgatgctggccaccgccggcgacgccgcgtccgccgggccgctcccggacccgaagcggccgccgcacttctccctcagggtggcgacgaccagcggcagcgacgacgactgtgggtcgcggacgcggttcaccacgtcgtgcagcaccaacgacctcaccatcacctccatccacgagggcaggtgatttaagcagcggaggcgtcttttgatggtcggtcgatcgagctttcgtgtgaatgagttgacaatccgttggccgttgtcggctgaagacgagacgagtagtgttatcttgcttgcatctgttgcttacttttgagaccgtgacaggtcacatgacgatcgtttacgtttggatggtgctccgctgtgcagattaatgctagcagtgtggaattattattattgattagggacaagtcgccgtgctgctttgatggcgaaaggttggtgatatgcatgggcggcagggttcattcaaaaggacgcctcctggtttcctgtagagggctctttcagttcagctggcctgcactgcactaaaccacgacatctctcattccctatttttagggcgagtttggttgatgattaaaagagaatagagtggttccatt

SEQ ID NO: 66828 - DNA, 1694 bp, Zea Mays
cggaaatccatgcaatcacagggtggtcttaattgtcgctgtcatcgtatcaatcacggcgttctccgctatgatggctgccggccttgtgataatcagagcacgacgacgaaaaggagccgagaagaagagaaagctgcagctggaggcgcaatcccggaacagctctaccacagaggatgcgctgaagctgtggcggatcgaggagagcagctcggagttcacgctgtacgacttcgccgagctggcggccgccacgggcggtttctccgacgagaatctgctcggcagaggcggcttcggccccgtctacaaggggaagctgccggacggcgccgagatcgcggtgaagcggctggcggcgcattctggacagggcctggaggagttcaagaacgagatccagctgatcgccaagctgcagcacaccaacctggtgcggctcgtcggctgctgcgtccaggaggaggagaagctgctggtgtacgagtacatgcccaaccgcagcctcaactgcttcatcttcgaccagcagcgggggccgttgctggactgggagaaacggcgccgtatcatcgagggcgtcgcgcaggggctgctctacctgcacaagcactcgcgggtgcgcatcatccaccgcgacctcaaggctagcaacatcctgctggacaaggacctcaaccccaagatctccgacttcggcatggccaggatctttggatccaacatgacggaggccaacaccaacagggtcgtcgggacatatggctacatggctcctgagtatgcttcggagggcatcttctcggtgaagtcggacgtgtacagcttcggcgtgctgctgctagagatcgtcagcggcaagaggaacactggccaccacaactacggcgacttcgtcaacctgctcggatatgcatggcagctgtggagagacgggagggtgttcgagctgattgacccgacgctgggcgagcgcggcgacgtggcgaccatcgtgcggtgcgtcaaggtggcgctgctgtgcgtgcaggaaagcgccaccgaccggccgaccatggcggacgtcacggcgatgctggccaccgccggcgacgccgcgtccgccgggccgctcccggacccgaagcggccgccgcacttctccctcagggtggcgacgaccagcggcagcgacgacgactgtgggtcgcggacgcggttcaccacgtcgtgcagcaccaacgacctcaccatcacctccatccacgagggcaggtgatttaagcagcggaggcgtcttttgatggtcggtcgatcgagctttcgtgtgaatgagttgacaatccgttggccgttgtcggctgaagacgagacgagtagtgttatcttgcttgcatctgttgcttacttttgagaccgtgacaggtcacatgacgatcgtttacgtttggatggtgctccgctgtgcagattaatgctagcagtgtggaattattattattgattagggacaagtcgccgtgctgctttgatggcgaaaggttggtgatatgcatgggcggcagggttcattcaaaaggacgcctcctggtttcctgtagagggctctttcagttcagctggcctgcactgcactaaaccacgacatctctcattccctatttttagggcgagtttggttgatgattaaaagagaatagagtggttccatt

SEQ ID NO: 66829 - DNA, 2762 bp, Zea Mays
atggcatcactatttttatttcacttgacaacagccttgaaaaatggtggtcttcgccatgatatccattactggattggtaaagacactagtcaggacgaagttggaactgctgcgattttaacagtagagcttgatgctgctcttggtgggcgtgctgttcagtaccgagaaatacatggcaatgaaacagaaagattcctgtcctattttagaccatgcatcatgccacagccaggaggagtggcatctggattcaaccatgttgaggtcaatgagcaggactacaagacccgcttatatgtctgccatggaaagcatgttgttcatgttaaagaggcaagttatctgcgtgactgtctttttattcaaatatgggttccctttgctcgatcatcccttaatcatgatgacatatttattctggatacgaagtccaaaattttccagttcagtggctcaaactcatccatccaagagcgagcaaaagctcttgaagttgtgcagtacatcaaagacacatttcatgagggcaagtgtgaaattgcatctgttgaggacggtagaatgatgtctgatgcggaagctggtgaattctggggtttttttggcggctttgccccactccctaggagggcacctgcagaaggcaatgagaaacaagaggaaactgctttcaaattgctatgttttgaccaaggaaagctggagcctgtcaactgcaaatctttagcacatgaattacttgagacaaacaagtgttacttcttagactatggtgctgaattgtatgtttggatgggcagaattacatccttgcaggagagaaagggtgctagtgaagctgctgagaaattgctctctgattcaagccgaacaagaacacctatgatcaaagtgattgaagggtttgagactgttgcattcaagtcaaagtttaaagagtggccacaaacgcctgggttgaagatgtcatcggaggatggaagaggccaagttgcagctcttctcaaacgccagggcttaaatgttaagggtttgatgaaagctgctcctgcaaaagaagaacctcaatcctatattgattgtactggcaacttgcaggtttggcgtgtaaatgataaagacaaggttccactctcatcctctgaccaatccaaattttacactggcgattgctacatatttcagtatacttatcctggagatgataaggaggaatgtcttgttggaacctggtttgggaaaaagagcattgaggatgataaggtaatagcagtctcacttgcaagcaagatggttgaatctgctaagtttcaggctgtccaggcacgcttttatgaggggaaagaaccgattcagttctttgtgatatttcaaagcttgcaagtgtttaagggtggcattagttctggatacaagagatttatcgctgaaattggtattgatgatgaaagttattctgaagatgggcttgcactctttcgtattcaaggttcaggaccagaaaacatgcaaacgattcaagttgaacctgtggcctcatcattgaattcatcatattgttacattctacatgatggaaacactgtgttcacttgggctggaaatctgaccactgcattggatcaagagttaatggaaaggctgcttgatgttattaagccaaacacacagtctaggtcacaaaaggaagggtcagaaacggaccagttttggagcttactgggaggcaaatctgagtactcaggccaaaaaatggtgcaagaacttgaaagtgatccccatcttttctcatgcatcctgtcgaaaggcaatttgaaggtcaaagaaatgcaccactttactcaagatgatttaatgacagaagatgtttttgttctggactgtcacacgagcatattcgtttgggttggtcagcaggtggatgttaaactcagaaatttattgtgcttgatttccttatggaaaaccttgcccgtgaaacaccaattttcaccattatggagggaagcgagcctctcttcttcactagattcttcacctgggacttggcaaaatcactgatgcatggaaattcataccagaggaaactcgcaattgtaaaaggtggaggtgctccagcgttggataaaccgaaacgacgaacatccatctattcaggaaggagtactgcacaagataaatcccaacgccccagaagcatgtccttcagccctgagcgtgtccgtgttaggggaagatctccagcattcactgcattggcagctacttttgaaagttcaagcaacagaaatctttcgactccacctgtagttaagaaactttacccgagatctgttacacctgattcatcgaatacttccaagtcatctgtaattgccgctctggctggttctttggatcgcccttctcaaactcctgctccagcattcatgaaagatggttctgagtcagagaagccaaaacaggagggagatggtaaaggtgttcatactgtggccactagtgttgaatctctgactataaatgaagatgtaaaagaaaacgagccagaagatgaagacggccttcctatttacctgtatgaacgtctgaagaccacagctgttgatcctgtcactgaaattgatgtcacgaggcgagagacctacttatcttcgactgaattcagagagaagtttgggatgacaaaggaagcatttagcaagcttccgaagtggaagcggaacaagctaaaaattgctcttcaacttttttag

SEQ ID NO: 66830 - DNA, 2786 bp, Zea Mays
atggcatcactatttttatttcacttgacaacagccttgaaaaatggtggtcttcgccatgatatccattactggattggtaaagacactagtcaggacgaagttggaactgctgcgattttaacagtagagcttgatgctgctcttggtgggcgtgctgttcagtaccgagaaatacatggcaatgaaacagaaagattcctgtcctattttagaccatgcatcatgccacagccaggaggagtggcatctggattcaaccatgttgaggtcaatgagcaggactacaagacccgcttatatgtctgccatggaaagcatgttgttcatgttaaagaggcaagttatctgcgtgactgtctttttattcaaatatgggttccctttgctcgatcatcccttaatcatgatgacatatttattctggatacgaagtccaaaattttccagttcagtggctcaaactcatccatccaagagcgagcaaaagctcttgaagttgtgcagtacatcaaagacacatttcatgagggcaagtgtgaaattgcatctgttgaggacggtagaatgatgtctgatgcggaagctggtgaattctggggtttttttggcggctttgccccactccctaggagggcacctgcagaaggcaatgagaaacaagaggaaactgctttcaaattgctatgttttgaccaaggaaagctggagcctgtcaactgcaaatctttagcacatgaattacttgagacaaacaagtgttacttcttagactatggtgctgaattgtatgtttggatgggcagaattacatccttgcaggagagaaagggtgctagtgaagctgctgagaattgctctctgattcaagccgaacaagaacacctatgatcaaagtgattgaagggtttgagactgttgcattcaagtcaaagtttaaagagtggccacaaacgcctgggttgaagatgtcatcggaggatggaagaggccaagttgcagctcttctcaaacgccagggcttaaatgttaagggtttgatgaaagctgctcctgcaaaagaagaacctcaatcctatattgattgtactggcaacttgcaggtttggcgtgtaaatgataaagacaaggttccactctcatcctctgaccaatccaaattttacactggcgattgctacatatttcagtatacttatcctggagatgataaggaggaatgtcttgttggaacctggtttgggaaaaagagcattgaggatgataaggtaatagcagtctcacttgcaagcaagatggttgaatctgctaagtttcaggctgtccaggcacgcttttatgaggggaaagaaccgattcagttctttgtgatatttcaaagcttgcaagtgtttaagggtggcattagttctggatacaagagatttatcgctgaaattggtattgatgatgaaagttattctgaagatgggcttgcactctttcgtattcaaggttcaggaccagaaaacatgcaaacgattcaagttgaacctgtggcctcatcattgaattcatcatattgttacattctacatgatggaaacactgtgttcacttgggctggaaatctgaccactgcattggatcaagagttaatggaaaggctgcttgatgttattaagccaaacacacagtctaggtcacaaaaggaagggtcagaaacggaccagttttggagcttactgggaggcaaatctgagtactcaggccaaaaaatggtgcaagaacttgaaagtgatccccatcttttctcatgcatcctgtcgaaaggcaatttgaaggtcaaagaaatgcaccactttactcaagatgatttaatgacagaagatgtttttgttctggactgtcacacgagcatattcgtttgggttggtcagcaggtggatgttaaactcaggttacaagctctggatgttggggagaaatttattgtgcttgatttccttatggaaaaccttgcccgtgaaacaccaattttcaccattatggagggaagcgagcctctcttcttcactagattcttcacctgggacttggcaaaatcactgatgcatggaaattcataccagaggaaactcgcaattgtaaaaggtggaggtgctccagcgttggataaaccgaaacgacgaacatccatctattcaggaaggagtactgcacaagataaatcccaacgccccagaagcatgtccttcagccctgagcgtgtccgtgttaggggaagatctccagcattcactgcattggcagctacttttgaaagttcaagcaacagaaatctttcgactccacctgtagttaagaaactttacccgagatctgttacacctgattcatcgaatacttccaagtcatctgtaattgccgctctggctggttctttggatcgcccttctcaaactcctgctccagcattcatgaaagatggttctgagtcagagaagccaaaacaggagggagatggtaaaggtgttcatactgtggccactagtgttgaatctctgactataaatgaagatgtaaaagaaaacgagccagaagatgaagacggccttcctatttacctgtatgaacgtctgaagaccacagctgttgatcctgtcactgaaattgatgtcacgaggcgagagacctacttatcttcgactgaattcagagagaagtttgggatgacaaaggaagcatttagcaagcttccgaagtggaagcggaacaagctaaaaattgctcttcaacttttttag

SEQ ID NO: 66831 - DNA, 1325 bp, Zea Mays
ctcgcagccccatccagcgaacagaactcgcatcctaggaaccacataacatcagccccaaacgctgacctctcatcattttgggagcctggaagagttggaacctccgcaatatatgtgtgtttgatggagagacccccagcctttctcgaatcctgatgtagactgatgatgatagaagcctctgggaactggcaggagccaagggcctctcctatttggctgctcccttccaaacacacagtctaggtcacaaaaggaagggtcagaaacggaccagttttggagcttactgggaggcaaatctgagtactcaggccaaaaaatggtgcaagaacttgaaagtgatccccatcttttctcatgcatcctgtcgaaaggcaatttgaaggtcaaagaaatgcaccactttactcaagatgatttaatgacagaagatgtttttgttctggactgtcacacgagcatattcgtttgggttggtcagcaggtggatgttaaactcaggttacaagctctggatgttggggagaaatttattgtgcttgatttccttatggaaaaccttgcccgtgaaacaccaattttcaccattatggagggaagcgagcctctcttcttcactagattcttcacctgggacttggcaaaatcactgatgcatggaaattcataccagaggaaactcgcaattgtaaaaggtggaggtgctccagcgttggataaaccgaaacgacgaacatccatctattcaggaaggagtactgcacaagataaatcccaacgccccagaagcatgtccttcagccctgagcgtgtccgtgttaggggaagatctccagcattcactgcattggcagctacttttgaaagttcaagcaacagaaatctttcgactccacctgtagttaagaaactttacccgagatctgttacacctgattcatcgaatacttccaagtcatctgtaattgccgctctggctggttctttggatcgcccttctcaaactcctgctccagcattcatgaaaggagggagatggtaaaggtgttcatactgtggccactagtgttgaatctctgactataaatgaagatgtaaaagaaaacgagccagaagatgaagacggccttcctatttacctgtatgaacgtctgaagaccacagctgttgatcctgtcactgaaattgatgtcacgaggcgagagacctacttatcttcgactgaattcagagagaagtttgggatgacaaaggaagcatttagcaagcttccgaagtggaagcggaacaagctaaaaattgctcttcaacttttttag

SEQ ID NO: 66832 - DNA, 1333 bp, Zea Mays
cagaactcgcatcctaggaaccacataacatcagccccaaacgctgacctctcatcattttgggagcctggaagagttggaacctccgcaatatatgtgtgtttgatggagagacccccagcctttctcgaatcctgatgtagactgatgatgatagaagcctctgggaactggcaggagccaagggcctctcctatttggctgctcccttccaaacacacagtctaggtcacaaaaggaagggtcagaaacggaccagttttggagcttactgggaggcaaatctgagtactcaggccaaaaaatggtgcaagaacttgaaagtgatccccatcttttctcatgcatcctgtcgaaaggcaatttgaaggtcaaagaaatgcaccactttactcaagatgatttaatgacagaagatgtttttgttctggactgtcacacgagcatattcgtttgggttggtcagcaggtggatgttaaactcaggttacaagctctggatgttggggagaaatttattgtgcttgatttccttatggaaaaccttgcccgtgaaacaccaattttcaccattatggagggaagcgagcctctcttcttcactagattcttcacctgggacttggcaaaatcactgatgcatggaaattcataccagaggaaactcgcaattgtaaaaggtggaggtgctccagcgttggataaaccgaaacgacgaacatccatctattcaggaaggagtactgcacaagataaatcccaacgccccagaagcatgtccttcagccctgagcgtgtccgtgttaggggaagatctccagcattcactgcattggcagctacttttgaaagttcaagcaacagaaatctttcgactccacctgtagttaagaaactttacccgagatctgttacacctgattcatcgaatacttccaagtcatctgtaattgccgctctggctggttctttggatcgcccttctcaaactcctgctccagcattcatgaaagatggttctgagtcagagaagccaaaacaggagggagatggtaaaggtgttcatactgtggccactagtgttgaatctctgactataaatgaagatgtaaaagaaaacgagccagaagatgaagacggccttcctatttacctgtatgaacgtctgaagaccacagctgttgatcctgtcactgaaattgatgtcacgaggcgagagacctacttatcttcgactgaattcagagagaagtttgggatgacaaaggaagcatttagcaagcttccgaagtggaagcggaacaagctaaaaattgctcttcaacttttttag

SEQ ID NO: 66833 - DNA, 1174 bp, Zea Mays
ctgatgtagactgatgatgatagaagcctctgggaactggcaggagccaagggcctctcctatttggctgctcccttccaaacacacagtctaggtcacaaaaggaagggtcagaaacggaccagttttggagcttactgggaggcaaatctgagtactcaggccaaaaaatggtgcaagaacttgaaagtgatccccatcttttctcatgcatcctgtcgaaaggcaatttgaaggtcaaagaaatgcaccactttactcaagatgatttaatgacagaagatgtttttgttctggactgtcacacgagcatattcgtttgggttggtcagcaggtggatgttaaactcagaaatttattgtgcttgatttccttatggaaaaccttgcccgtgaaacaccaattttcaccattatggagggaagcgagcctctcttcttcactagattcttcacctgggacttggcaaaatcactgatgcatggaaattcataccagaggaaactcgcaattgtaaaaggtggaggtgctccagcgttggataaaccgaaacgacgaacatccatctattcaggaaggagtactgcacaagataaatcccaacgccccagaagcatgtccttcagccctgagcgtgtccgtgttaggggaagatctccagcattcactgcattggcagctacttttgaaagttcaagcaacagaaatctttcgactccacctgtagttaagaaactttacccgagatctgttacacctgattcatcgaatacttccaagtcatctgtaattgccgctctggctggttctttggatcgcccttctcaaactcctgctccagcattcatgaaagatggttctgagtcagagaagccaaaacaggagggagatggtaaaggtgttcatactgtggccactagtgttgaatctctgactataaatgaagatgtaaaagaaaacgagccagaagatgaagacggccttcctatttacctgtatgaacgtctgaagaccacagctgttgatcctgtcactgaaattgatgtcacgaggcgagagacctacttatcttcgactgaattcagagagaagtttgggatgacaaaggaagcatttagcaagcttccgaagtggaagcggaacaagctaaaaattgctcttcaacttttttag

SEQ ID NO: 66834 - DNA, 2247 bp, Zea Mays
gtggcgccgcggtgggagtagtactgactgtcactcagtccccgggcgggcctagataagctggctcccaattctttccgccatgcgttactgtaccaatggctccccacctcctggccgtggccgtggccgtggcggccatcatcgccaccgtctcgttgctggcgcccggcgccgctgcctacccgtggccagtttgtgggacgagcaacgacttcgagcccaacagcacataccaggccaacctcaacctcctcgccgccatgctgcccaacaacgtgtccgcatccccggtcctctacgccaccgccgtcgtcggcgccgtcccggagcaggtctggggcatgggactctgccgcggcgacgccaacgccagcagctgcctcgcctgcctcacccaggcgttccaggacctgcccaacgactgctcctacaacaaggacgccgccatctactacgacccctgcaccctccactactccgacgtccacaccctcgccgacgacgacaccggcccgacgaccatgtcgtacaacatcaacaacaacgccaacgtcacctcggacccggcccggttcgagcgcctcctcgccgccctcgtcaacgccaccgccgagcacgccgcgtccaactccacccggcgattcgccacgggggaggccgacgccgacttcgaccggcagttccccaaggtgtacgcgctggcgcagtgcacgccggaccagacgccggcgcagtgccgcaagtgcctcgccggcctcatatcgcagtcgctggacgggttccagaacaacatcggaggcagggtgctctgggtcaactgcacctggcggtacgagacctcgcccttcttcaatggaccggccatggtgcgcctggcatcgtcgtcgagccctccggcagcggcagcggcaggtggaggggagaggaagtacagcgtgttcatcgtggttcttgcagttgtgctgcccactctagctgccctgaatcttgtgttttgcttctgtttctggcggcggccagcaccacaggcaaagcagtcacagcccatgtattccaccgaagcagaggacgtggaaacggtggactccatgatgatcgacgtctccgccctgcgagccgcaacagggaatttcgacgagagcaacaagctcggcgaaggcgggtttggcgcggtgtacaagggcgtcctcccggacggcgacgagatagcggtgaagcgtctgtcgaagagctcgacgcagggagtggaggagctgaagaacgagctcgcgctggtcgccaggctgaggcacaggaacctcgtcaggctcgtcggcgtgtgcctggagcagcaagaacggctgctcgtctacgagtttgtccccaaccggagcctcgacctggtactcttcggtaccgacacgcgtgagccgctcagctgggagcagaggtacaggatcataaacggcatcgctcgaggcctgcagtacctccacgaggactcccagctcaaggtagtccaccgtgatctcaaggccagcaacatcctgctagacgtggagatgaaccccaagatctcagatttcggcctcgcgaggatcttcggccgggaccagacgcaggccgtcaccagccgcgttgtcggaacctatgggtacctagcaccagaatacctgatgcgcgggaactactccgtgaaatcggacgccttcagcttcggcgtcatggtgctggagatcgtcaccgggaggaagaacaacggcagctcccacaagtatgggagcactgggaggccgggacggtggcggagctggtggacccgtccctgggcggaagcttcccggagggcgacgtgctgaggtgcatccacatcggtctgctctgcgtccagggggaccccgctgcccgcccggtgatgtcgtccgtcgtgacgatgcttggaaccgacacggtcaccctccaggctccatccaagccgggattcttcgccagaaagagtggcactagcacgaccgtgtccgctgatgatgggtcgatttagagattgccactagagtacagagttgccagaaagagtagctcctttttttaacgatagccatctctatcgctaataagatcctgcgttttattagtatgggaggcatgggattattgaaggtctccttgactctaaagaaaatgtcttaggacagacttgagcctaaacgtctttgttcaaccaaaactttctaaacccttcccattttgattgcactgttttct

SEQ ID NO: 66835 - DNA, 2248 bp, Zea Mays
atggcgcaccatcttatgaccctggccgccattgtcgcagcggtcgtgctgctcctgccctgcgccacgggttatccatgggccttctgcggcgagaacaataacttcaaggccaacagctcctatcagtcccatctcagcctcgtcgccgccaccttgcccaagaacgcctccacgtccccggacctcttcgctaccgctgtcgtcggcaccatcccgcggcagctctgggctatggggctctgccgcggcgacgtcgacggcacggcctgcttcaactgcctcacccaggccttccgagacctaccgaaccactgctcgtacaacaaggacgccaccatgtactacgacccctgcatgctacactactccaacaaccagttaatccccgacgacgactcgggagatttttacaccatcaactccacagcagctgtcaactcggatccagtggggttcaaccgtctcgtggccgcgctcgtgaacgccaccgccgactacgccgcgcacaagtccacgcggcggttcgccacgggcgagacaacggccggctccgtctcggaggagttccccaagctgtacagcctagcgcagtgcacgcccgacatgaaggcggcgcggtgccgagagtgccttgcggcgctcatatcgcagtcgctggacgcgttccagaaccttaccctaggccgggtgctttggatcaactgcacctaccgctacgaggccgcgcccttcttcaatggaccggccatggtgcagatagcagtgccgagctcatctgtacccgtgccggcgccggcgccgacgttagcgccagctatccagccatcttatgggacgccggcggcggtggccggagtagcaggggggaggaagtacaatttgccgggcgtggttgttgcagtcgtgctgactacagtaacagccttgaacctcgtagtttgcctctgtttctggaggcggcggcggcggcggcgtggaccaacagcacaggcgaagcagccatcgttaaacctcgaagaattgaccgcacagatcccacgtactccgtcgaagcagaggacacagaaatggtggactccatgatgatcgacgtcgctaccctacgagctgcaacgggtgattttgacgagagcaacaagctcggcgaaggcggtttcggtgctgtgtacaagggcgtcctcccggacggcgacgagatagctgtgaaacggttgtggcagtgctcgactcagggactggatgagctgaagaacgagctcgcgctggtagccaagctgaagcacaaaaacctcgtcaggctcgtcggcatctgcttggagcagcaggagcggctgcttgtctacgagttcctccccaaccgtagcctagacctgatccttttcgatgccgagaaacgtgagcagcttagctgggagcagaggtacaggatcataaacggcatcgcccgaggcctgcagtacctccacgaggactcccagcttcgagtagtccaccgtgatctcaaggccagcaacgtcctgctagacgcaaacatgaaccccaagatctcggacttcggcctcgcgaggatcttcgggcgggaccagacgcaggccgtcacggaccgcgtcgttggcacccatggatacatggcgccggagtacatgatgcgcgggaactactccaccaaatcggatgcttttagcttcggcgtcatggtgatggagatcatcacggggaggaagaacggctgctgcaactccgggatgtctgatgatctcctcactaccgtaagggctgatttggtgatcaagattaatatcatcgccattactgttgcgctgcaatggagtttggctcaccgtatcaaccccaccgagcaggtatgggagcactgggatgccgggacggcgatggagacggtggacccgttcatggcggcggccggcatcttttctgaagtcgacgtgctgagatgcattcacgtagggctcctctgcgtgcagccagacccggcggcccggccggttatgtcgtcggttctcgtgatgctcgggtgcgataccatcactctccaggccccgtctaagcccatgttgtttcttcccaggaataccgcaggcaacaccaccttgtcgacggtgtcgttgcagggttagccatggatctactcatctaccactacaggaaacgcctaaattttcgtgggccaaaaacccacgaaaataagcctaaaccgacgaaaatagagaattttcgtcggcaa

SEQ ID NO: 66836 - DNA, 3241 bp, Zea Mays
ccaaagttcttcaggacgcagtccccgcgaatcacaatggcaacaacctgctgtgctacatatgccagctcgggatggtatcgatatccaaaatcatcagctcaccctgcacatgcgcattcctgggcgactatacggaaagataggtttttgcatcgctggagaagcgctgcaaagtcgcattccagatctcccctgcctccgctgtataaatagaccctcaagctccctgcaagcagacttcaaagcagcagcagaagaggctgggcatcctgagtgggatttgcctgatgatgctgggacgtacaatgacactcctgagaagacccagttcttcgcggataacggaacataccagaccgacaaggggaagttcttcctcacatggtactcaaacaaactgatcaagcacggtgataagatcttggacgaagcaaacaaggtcttcctgggatgcaaggtgcagctggcaatcaaagtctctggcatacactggtggtacaacgttccaaaccatgcagctgagctcactgccggatactacaacttagatgacagagatggctacagaaccatagcacacatgctcacaaggcatcgtgctagcatgaacttcacttgtgctgagatgagggacagtgaacagagttcagaggcgaaaagtgcacctgaggaactggttcaacaggtgctgagtgctggatggagagagggcctaaatttggcatgtgaaaatgcactcaaccgatatgatgcaacagcttacaacaccatcctcaggaatgcaagacctcaaggcatcaacaagaatggccctccagaacacaagttgcacggattcacctacctccgagtatctgatgaactgttccaggaacagaactacaccactttcaaaacttttgtcaggagaatgcatgctaacctggattataatccaaatgtcgatccagttgcaccattggaaagatcaaaggcagagataccaattgaagaaatcctagaagtagcacagccaaaattggagccatttcccttcgacaaggacaccgacctaccagtttaaacactccaatgatgcaaactacaggaagaatcacgagacacttaaaaaatcaagacaaatagtaagcctattgtcgagcagtagtctattaactaaataaaatgctgtgtggagcatattataatcgcatattgccctaataatattgtgttgttaaacctgaggcttgatggttatctgatgagttgtaataatagccttggtcttcctgttgtatgtatgtatttgagctaaggaataaaaattgtggctttgtgggttatttattgtgccctttagagagtatgtgtggtttacaagtgcttgaaataatagttctacctgcacattctggtgatgataaaaacaaatcattacacaacatcaagagaaaaataataatcaaatcaaaatggtgtgatgataaaagaataaaatgtgttgtgaagctaagagagcaccatggttgtatatgatttggatcacctattttctgtgtcagttttatgcatactgttatggctctggaccggatttatgtccgacgccgtctaggttcagggttagcaaatcaataaccttatctttctatctttagagtttctacattttcctttggaaggttgagtcagcctctgtctaggttcaggttagcagattaataaccttatctttctatatttaagtctttctacctttagagtttctatattttcctttggaaggttgagtcatttatggactataaataaagggttcaaggaagagcaaggcatgcttgattgccaacgattctattagcaggcactgccaatgacaactggtcggtgacgccgtacagccattatcgtgacgataggttgtcatcgatttcctgcggctgcctctaccaattctataattcaaaagaatacaaacctttcatgtaactaaaaaaatgtttgcttcacctcaacccaaagccaaagatgtcacaaattggcataaacatgtactatgtagtgtggatcatcatgcaacccgtgctcgaacttgaactaaaaaaggatcaaacctgaggatcgacagatcggccacttggttagtggaggtgggatttaacatcctgccaatctagtggtccaactcaggcaaaagtccttgaataaaagccagatgacctaacattctctgttttaaaaaataccaggacaaatctcctagaaaatgctacaagatttttttttcgtgaccgtgtcattgcacgtttttcattaagagggagtagagtgaacaaagtacaaaccccctgtcggtaattagagttaccgaataggagggttcccaaaggaccactaaagcgatactacagaacgcattttgcaacacaacataagccggtaatagaaggtaatcgtagaagaataggaagcgactgcaagtgtctgaaacccgctgaagaccattcacttgtttcgtccaagatcaagcacagcagctcccgtggctggcccaacgaaggtcttcgtgttcctcttttttcaatttctaaaatgctacaagatttgtctgtggattcgtcaacagaagcacaggaattgtctttagagtaaggagaaaatcaaagtaacagagcaaaagtaacaatatgtttttcttccagctcagggagctcactagggccatacatgctaattgattactgatagagcaaccgaattaagggtacatatgcatgaatccttgtaggtttttaacgaaacggaaggaagagtgccagagaggaacaccactatttcagtttcagtcagttaattagcggactggtgtagctagagcagaaaatgaatctatcagaacatgttatagggctgatcccaccaagtttagcaaatcacaaaagtactacatggagaaaataaaaacccctacatattatggctcacacatatccgtgacagatatcctattgcttttgatcctgaaaatatcatatagcaacttgggcgttacaaacaatacggaatacggtgtgtggtatgctgtgaatgaaggttaacgctactgcttcagttaagcgctagcaggcgcgcgggccttgacttcgattgaattgattgattgatggaactactcgcaaatcatgattcggggtcgactgcgtgatctcaacgagggtgtggtactgtggtcttgagcctggaacaggcacagagc

SEQ ID NO: 66837 - DNA, 4437 bp, Zea Mays
ccaaagttcttcaggacgcagtccccgcgaatcacaatggcaacaacctgctgtgctacatatgccagctcgggatggtatcgatatccaaaatcatcagctcaccctgcacatgcgcattcctgggcgactatacggaaagataggtttttgcatcgctggagaagcgctgcaaagtcgcattccagatctcccctgcctccgctgtataaatagaccctcaagctccctgcaacatccatcaaggcccaagctcagcgaccaccaagcagagcaagccagtgaggtctctcagagcgtagccagccagctacaatggcggggaacgcgctagccaactatgtccaggtctacgtcatgctcccgctggatgtcatcactgtcgacaacacgttcgagaaggaggacgagacgagggcgcagctgaagaagctgacggaggcgggcgccgacggggtcatgatcgacgtctggtgggggctggtggaagggaaggagccgggagtctacgactggagcgcctacaggcaggtgttcaagctggtgcaggaggccgggctgaagctgcaggccatcatgtcgtgccaccagtgcggcggcaacgtcggcgacgtcgtcaacatcccgatcccgcagtgggtgcgggacgtcggcaaaagcaaccccgacatcttctacaccaaccggagtgggctgacgaacatcgagtatctcacgcttggagtggacgaccagcctctcttccatgggagaactgccattcagctgtatgctgattacatgaagagcttcagggagaacatggcagacttcttggatgctggtgtcgttgtggacattgaggtgggacttggccctgctggcgagatgaggtacccatcgtatccccagagtcagggatgggtgttcccaggcgttggagaattcatagtgagttctctttccaaaaacaaatatttttctgtatttttttttggttattacaaaacaaaaggggattcatctccatgtgttgggcagagacagactagtcttggtccgtgcgttggtttctgctggaagcagtcacaaaagaaatgagagaaaaaaagtataaaagtggctaaatcaaaagttctcttggatgaagtaacaatttgactgatcaggccagcaatgccttaaaattcgtgctgtgcttttcagaagaatgtcagaaacaaagcctagaccacatcaattgagaaaaataccagatgaatcaaatgcttgataaactaatgacaaggaataaataaagcaagcttccttcaaatcaaagaaaatggaacaaaacaagtaccaactaatattaatgtgtcattaccagcaaacagaggactagaccttaaatgctacaattgttactaaagcgataaaataaaactgcagtgctatgataagtacctgcaagcagacttcaaagcagcagcagaagaggctgggcatcctgagtgggatttgcctgatgatgctgggacgtacaatgacactcctgagaagacccagttcttcgcggataacggaacataccagaccgacaaggggaagttcttcctcacatggtactcaaacaaactgatcaagcacggtgataagatcttggacgaagcaaacaaggtcttcctgggatgcaaggtgcagctggcaatcaaagtctctggcatacactggtggtacaacgttccaaaccatgcagctgagctcactgccggatactacaacttagatgacagagatggctacagaaccatagcacacatgctcacaaggcatcgtgctagcatgaacttcacttgtgctgagatgagggacagtgaacagagttcagaggcgaaaagtgcacctgaggaactggttcaacaggtgctgagtgctggatggagagagggcctaaatttggcatgtgaaaatgcactcaaccgatatgatgcaacagcttacaacaccatcctcaggaatgcaagacctcaaggcatcaacaagaatggccctccagaacacaagttgcacggattcacctacctccgagtatctgatgaactgttccaggaacagaactacaccactttcaaaacttttgtcaggagaatgcatgctaacctggattataatccaaatgtcgatccagttgcaccattggaaagatcaaaggcagagataccaattgaagaaatcctagaagtagcacagccaaaattggagccatttcccttcgacaaggacaccgacctaccagtttaaacactccaatgatgcaaactacaggaagaatcacgagacacttaaaaaatcaagacaaatagtaagcctattgtcgagcagtagtctattaactaaataaaatgctgtgtggagcatattataatcgcatattgccctaataatattgtgttgttaaacctgaggcttgatggttatctgatgagttgtaataatagccttggtcttcctgttgtatgtatgtatttgagctaaggaataaaaattgtggctttgtgggttatttattgtgccctttagagagtatgtgtggtttacaagtgcttgaaataatagttctacctgcacattctggtgatgataaaaacaaatcattacacaacatcaagagaaaaataataatcaaatcaaaatggtgtgatgataaaagaataaaatgtgttgtgaagctaagagagcaccatggttgtatatgatttggatcacctattttctgtgtcagttttatgcatactgttatggctctggaccggatttatgtccgacgccgtctaggttcagggttagcaaatcaataaccttatctttctatctttagagtttctacattttcctttggaaggttgagtcagcctctgtctaggttcaggttagcagattaataaccttatctttctatatttaagtctttctacctttagagtttctatattttcctttggaaggttgagtcatttatggactataaataaagggttcaaggaagagcaaggcatgcttgattgccaacgattctattagcaggcactgccaatgacaactggtcggtgacgccgtacagccattatcgtgacgataggttgtcatcgatttcctgcggctgcctctaccaattctataattcaaaagaatacaaacctttcatgtaactaaaaaaatgtttgcttcacctcaacccaaagccaaagatgtcacaaattggcataaacatgtactatgtagtgtggatcatcatgcaacccgtgctcgaacttgaactaaaaaaggatcaaacctgaggatcgacagatcggccacttggttagtggaggtgggatttaacatcctgccaatctagtggtccaactcaggcaaaagtccttgaataaaagccagatgacctaacattctctgttttaaaaaataccaggacaaatctcctagaaaatgctacaagatttttttttcgtgaccgtgtcattgcacgtttttcattaagagggagtagagtgaacaaagtacaaaccccctgtcggtaattagagttaccgaataggagggttcccaaaggaccactaaagcgatactacagaacgcattttgcaacacaacataagccggtaatagaaggtaatcgtagaagaataggaagcgactgcaagtgtctgaaacccgctgaagaccattcacttgtttcgtccaagatcaagcacagcagctcccgtggctggcccaacgaaggtcttcgtgttcctcttttttcaatttctaaaatgctacaagatttgtctgtggattcgtcaacagaagcacaggaattgtctttagagtaaggagaaaatcaaagtaacagagcaaaagtaacaatatgtttttcttccagctcagggagctcactagggccatacatgctaattgattactgatagagcaaccgaattaagggtacatatgcatgaatccttgtaggtttttaacgaaacggaaggaagagtgccagagaggaacaccactatttcagtttcagtcagttaattagcggactggtgtagctagagcagaaaatgaatctatcagaacatgttatagggctgatcccaccaagtttagcaaatcacaaaagtactacatggagaaaataaaaacccctacatattatggctcacacatatccgtgacagatatcctattgcttttgatcctgaaaatatcatatagcaacttgggcgttacaaacaatacggaatacggtgtgtggtatgctgtgaatgaaggttaacgctactgcttcagttaagcgctagcaggcgcgcgggccttgacttcgattgaattgattgattgatggaactactcgcaaatcatgattcggggtcgactgcgtgatctcaacgagggtgtggtactgtggtcttgagcctggaacaggcacagagc

SEQ ID NO: 66838 - DNA, 237 bp, Zea Mays
ccaaagttcttcaggacgcagtccccgcgaatcacaatggcaacaacctgctgtgctacatatgccagctcgggatggtatcgatatccaaaatcatcagctcaccctgcacatgcgcattcctgggcgactatacggaaagataggtttttgcatcgctggagaagcgctgcaaagtcgcattccagatctcccctgcctccgctgtataaatagaccctcaagctccctgcgtga

SEQ ID NO: 66839 - DNA, 3659 bp, Zea Mays
gtaaccttgactctaatgtgccggtcatgaatatagctgaaaagacgcttctcctgaacatttggcttccatgatcgccttgatctaaataaacaaaagataatccaataatatgattacaaaaacaatatccttctgactggcacggtggtacaaatagatatttccatcactaccaagacattcttatggagtgtttggtttgaggaatgatatagtccatcatcttctcagtcatcacttttttgtttggtgtgtagaatggagtgagttaatccatcatcacctcattcctcatagttagttgtttagtactaatatgtggaatggagtcatcccaccaaatttgaggaatggacccatgatgcaccacttcattttggatggagtgattcatcaaaccaaacacctcattagtgaatgttgtgtcatggaatttaactaaaaggaatcattttaatgtcagactgcaggaggtcacattccgcctaagatttaagaacctgccactttaaatatataaggcaacaatgcaggtctttgcattatctctattgagaaaccgaagtgtaaagccagtgtaatccacagatatatctagttgagaatggacccacagaccaaatctatagagctttttggatccatagtattcccaacactgggctttgtaaatatattatcgcgaacgttgcaattggatctatagtattataacagacatttctttgtaattttgctattgtagctactattaaccgttttcgactgccatcaacccaaatcgtgtgcctatgctgttgttcaagaacctgtcaaggacttcgttcaagaacaccaccaggggtagtcgctgagctcggagcctcggacacgaggacgccgagggccatgcacacatccatgggcaggccggacacatcgcacacggcgacgcagttgctcagcttatcgagcgcgcgcatgtcgtcgaccatgcgctgtcactgcaggttggccgcgccgccgtcgtctttgagggaggcgatgatcccgtgcaggagcagcgtgcccacgacaatccccagtccccacgcgcgcacctcgcgctgtaaggagaaacaattaatctctcttttttagattccagacgactagcttcttccttctcttcccttgctttgatttcttccctgacacctgaggtgtctgcaaagaaccagcagcgagctaagctaagctaaactcggttcttcatatacaagagctagcaaaagcaccaacagtatcaaagcagatgtcttctcccaaaaggtgtagctcctgattagccctcacaggcgcaacggccttcgcttgcaaccatacatctccaccgccctcgcaggtgcaacgggctttgctctcgacgcgtcaccgcagccatggggactcatgttccaggctagccgcaacacgctcctctgttgaaccgacgcacatgctcctccaaggaatgggcgccgctaaagaagacgcggatgaatgggaggaacgaaagactccgatctgttctaaataatggaaagttatcggttaataccggcgacaataacaaaactacaaagaagcggctattataatactataaatccaattacaacgtttgggatactatttttaagaagcctagtgttcgggataccgtagttcaaaaaaactcaaatctatatgctttaatgatgagtcaatcaaccagttgagtgtggatattgatttaatgtatcctatcgagacattcctctgaaaaaatattgaattataagtggagacaaaaggcaagagataaaaatgcgacatattatttatttatatgtgatgaaaagcaggtgaacatgttgcaccagatgtgttaagactgacggtgagatcatgagataatgagttgcaaggttatgggattattattctcaagatggctgatgggctgatggctttaacttaattggaggaatctatgaaataatcaagtcatgtgggtgtggcattaagagcatgtttagttcctgggcaagccccttgtcatgcctcgctaagcaaggatcactgtttgggtaccaagcgagagactcactttgcctggcaatctcacccagctggacatggaaatccttgctcgtgcagaagagccaaatccgctctactgcgcgatcaaggtcacacatgaaacatgatatgcttcctcagcgtgatgtcgcagcgatggagctctgcctgagctcgaaatagcgaagcaacaaaattgagctgttacacaaaaaaagggaaaaaaaacaaagccatgtagctcagattgaagcaaaaatcaatgatcaggatcaggtacaaaaatcacagagatcagagaagatctctgccctgctaccaatattggtgtcataatcagtcttcagagagatgcacgagaaccagtaaagcacaagggaaagttgaggccgcacagacattggaggttgccagagtcatgctgctgggctgctggccatgcttgccgtaattcccatggtcagttttttggaccatttcatttgggatttgatttggtgggaggttgaagaaaaggaaaaggggaaaaagggaggcgaacaaggttaggaaccaaacatgagaacatatcttgccaccctttgctcagctagtttgggcaaagcttgcctaaagcctgcttaacctaaactagcaaaagatccaagcaatggcagggaaacatgctaccacagtggtacctcgttcaccctgtcaagaatttacactaacagaagagagaacaaagcaagcccattttctcttgtgagacagcttggaaattgtaactcctgatgttaacatcaatgtcatagactagcaagttttgttgtgttgggcagaccagaaatgttggttcggacattccaatcatcaagaatatgttattcaaactatcaatgacaaatgttcccaaaagtgtttgaagcactatcaattcttacatcggggtaataatgcattgtttggatcccacgagctaaaccaaaagtgactaaagtttagttacttaggagttaaatatctaaacaggaagagctaaaagtgactaccattttagtcatgtagtcacttttagctcttcatgtttggatctttagctcctaagtggaggtgtttggtttctagggactaatttttagtccccgtttggtttgagagactaaagattagtccctccattttagtctcatttagtccctaaattatcaaacggtgggactaaaaatttttagtctctagtccctcaagggatgactaaaaaggactaaaccatataaattgtccctcctttatttcagttgcactaatagtaggagaataaggagtattttagtccttttatgatttttttaatgtgttttgaatagtttagtctctataactaaacagggtagggactaaattttagtctcctaactaaactttagtctctggactaaagtaaccaaacgggccattagtccctccattttatttcattttagtccctaaattgacaaatacacatatttggcaatttagggactaaaataaaataaaatggagggactaaaaattagtccctagaaaccaaacaccccctaaactttagtcaattttgttttagctatggg

SEQ ID NO: 66840 - DNA, 1160 bp, Zea Mays
atattgtctaatgtctattaaagaaaagaagttaagcgcacctggtagcttccttcctgcaccgctcgtggcagggaatgtgtaaagaaaaccaaagccggaacagagcggagctagggataaagaacatcaaaagcagtgcggagactggacaccggaggcatgaggcatctttctcatatcacaggtcacaacagtccatttcagtctcagcgctgtcgctcaactgctcaaggaggcacggggctggaaagggcaagaggaggagaagctgaaccatggcgagagtagaagcggtggtcatctgcctcctggtcctcgccatggacgtcgccgccggcgtgctcggtgtctacgcggagaaggctcagaaccagggcaggcacctgcggatcctgttcgtggagtgccggcagccggtccggcgggcctacgagctcggcatggcggcggccgcggtgctggcggcggcgcacgccatcgccaacgcggccggcggatgcgcgtgcgcctgctccggcgacaagctccgccgggcgtcgcccaaccggcagatggcgtccttcgccttggtcctcacatggatggtccttgtcgtcgcgctctcgctgctggtgctcggcgcgctgcccaacgcgaagcgcaagctggcggagtgcggggtggcgcggcaccggttcctctccatcggcggcgtcctctgcttcgtgcacgcgcccttctgcgccgtctactacgcctccgctagcgccgcggcgcgggaggctcgccgcgacgcgacgcacgtgtagtctgttcggttctattagccacccctccatgagaccatgactgtatcgtgctcttgacgaaggtgctggcacagaagatggcgtcggacgggctgggcatgggatgtaattttgctcgtttctcgaacgatcatgcatggctgtgcatgggatggaatttatctcgtcttgcaggtatgcggtgtgcatgtgtagtatgtataacatctcgccatggcgttcgcgaactggtacgctcgccggtgaaatctttcaggaactcgatagcacgatgtttgcactgttccacaatgatcgagagcgggtcgagttgacagttgacacaacattatattcaggttgatgcaaattaggatggcaaccgagaat

SEQ ID NO: 66841 - DNA, 1081 bp, Zea Mays
aaagaacatcaaaagcagtgcggagactggacaccggaggcatgaggcatctttctcatatcacaggtcacaacagtccatttcagtctcagcgctgtcgctcaactgctcaaggaggcacggggctggaaagggcaagaggaggagaagctgaaccatggcgagagtagaagcggtggtcatctgcctcctggtcctcgccatggacgtcgccgccggcgtgctcggtgtctacgcggagaaggctcagaaccagggcaggcacctgcggatcctgttcgtggagtgccggcagccggtccggcgggcctacgagctcggcatggcggcggccgcggtgctggcggcggcgcacgccatcgccaacgcggccggcggatgcgcgtgcgcctgctccggcgacaagctccgccgggcgtcgcccaaccggcagatggcgtccttcgccttggtcctcacatgtgacaagcgattcttgtcgtctggtgactgtggatggagcaggatggtccttgtcgtcgcgctctcgctgctggtgctcggcgcgctgcccaacgcgaagcgcaagctggcggagtgcggggtggcgcggcaccggttcctctccatcggcggcgtcctctgcttcgtgcacgcgcccttctgcgccgtctactacgcctccgctagcgccgcggcgcgggaggctcgccgcgacgcgacgcacgtgtagtctgttcggttctattagccacccctccatgagaccatgactgtatcgtgctcttgacgaaggtgctggcacagaagatggcgtcggacgggctgggcatgggatgtaattttgctcgtttctcgaacgatcatgcatggctgtgcatgggatggaatttatctcgtcttgcaggtatgcggtgtgcatgtgtagtatgtataacatctcgccatggcgttcgcgaactggtacgctcgccggtgaaatctttcaggaactcgatagcacgatgtttgcactgttccacaatgatcgagagcgggtcgagttgacagttgacacaacattatattcaggttgatgcaaattaggatggcaaccgagaat

SEQ ID NO: 66842 - DNA, 1502 bp, Zea Mays
tttctcccgctcattttggcccagccgctcagcccactgggtaaaccaacggctgatgccccacacgtaaaaagacacggctggctgcacactgcccactcgtccacacgcgaaggcacccagcagcagccgctcccgaactgaggaaccctaccacgcgggcgacggcggtgcgcgaccggtgacgggacagcggcagcgccccctcctccatctgctggtcccaccgcctcctgacgttatccgatactgccaatccccctcttcgccgttgacggagcttaccgaggaaagaagggcagggccatggcgggagccttcgctttccgcctcgtgcctcgcctcgccgcagagccggcggcgagggggaagggtggcggaggaggagccaaccgcgacgccggcagcagggcgctggtgtcaaagaaaccaaacaagcagcagcatttgtggatcaggaaggagacagctgggtcagggaagaaggctctccgtcttattgatgctgtaaccaagtggttgatgagcaaaggacaggtgctgacatggacaacatatgatacacttctgctcgcacttcttatggataaacgggtagacgaagctgagtcagtttggaacactgtaatacagactcatacccgctcagtgcccaagaggttgttctctcggatgatcttgatctacgacattcaccagcgcccagataaagttttggagatattcgcggatatggaggagttaggtgtgcgtccggacgaggatacagcgagacggatcggaaaggcattcgtggcttctggccaagaagaaaaggagaagcatgtcctcgagaaatacttgaagaagtggaagtacatccatttcaacggcgagcgcgttcgcgtgcggagggacggaccattggcgtagtgcccgttttctgaaaaatgctcgaacctatcagagtatcgtgccggtaggcggtagggcaggggagatgctgttactgccgctgtgacagtcaggcacatggatatcggcactagtccctatcctatgtatgtggaatggaacggaaactggagattggttccatggctctagcctgtggaggagacgagcggatggggggtggctggctactaccggcgagatagtgatttaataggcactacataggcgtccagtgattgcgatggctttaacttgcgtatgtgtctgcggaatggtcccgtgctatttcggtgacttgtgcttgtggaattgtgaacacccactggaaagtgtatatcatgagagggacgatacctgacgtctgggcccatggcttgctgatttcacgcaacgaaccattttctgtttgttgcggtgccccggggttcacgtacttgttctgttcttgtgatctggcacagagctgttggcttatccatttctatgcccatccttcttcagcaaatgatcatgtgagttgcgttccgtttgttctgtctggcactcaacccacatggtgcgtgtca

SEQ ID NO: 66843 - DNA, 1377 bp, Zea Mays
actcgtccacacgcgaaggcacccagcagcagccgctcccgaactgaggaaccctaccacgcgggcgacggcggtgcgcgaccggtgacgggacagcggcagcgccccctcctccatctgctggtcccaccgcctcctgacgttatccgatactgccaatccccctcttcgccgttgacggagcttaccgaggaaagaagggcagggccatggcgggagccttcgctttccgcctcgtgcctcgcctcgccgcagagccggcggcgagggggaagggtggcggaggaggagccaaccgcgacgccggcagcagggcgctggtgtcaaagaaaccaaacaagcagcagcatttgtggatcaggaaggagacagctgggtcagggaagaaggctctccgtcttattgatgctgtaagatatacacttgccattgatactgtaagatacacacatttgctctccctattgataaagccagaattctggatgttttgaaaaaaaagctagtggacgtgcacgtgcgacacacacgttatttatggttatggtagatgacaccttatatgttattgaaaaagtggtgcctttgtatacttaaagtaagatgtgatttctaaattgtttcaacacatggagtcttggaaactgagacatgaacaaccttccattgagactgtcttaaactcttaatggcacctgatggttaataattgaaattaatgtacatattgtcgcacgtcaaaacagtcctatttaattcaacaatagtacctcccatatgtatggtctaattaatctgataatctttcaagcactcgagcaacaataaatttcatgagatgtttggtattgtctggggactattgccaatccaaaatcaataatgcccacgtgttgccaaatgttttggtgagttatttttcaagaaaacttcattttcttcttagttgatgatgttgctgctgttgatggtggttttattggtgactgaatttagattggaggataaagacctgtctagaagtctttgtttttgtcttggctgtatgggtcctagacgagcgtattttatttcccggcaacatcataggctctggcttgaatttatatccagaaaggctgaagaatatgagtcttttaattcttgaagtacctaaaaactgaacaatccgagtcttttgcttcttcccatttgtagataaataaaggaaaaaggaaaaaacgaggtgtatgtttcccatgtcagcccacgagacccaaaacatacgcacatccttttttgccttatctgtgcatccgttcagctccgctatcacatggcagagcgagcgccgccgggtgatgcctgacacggtgatggttccacctccattcctct

SEQ ID NO: 66844 - DNA, 1114 bp, Zea Mays
actcgtccacacgcgaaggcacccagcagcagccgctcccgaactgaggaaccctaccacgcgggcgacggcggtgcgcgaccggtgacgggacagcggcagcgccccctcctccatctgctggggtgtcaaagaaaccaaacaagcagcagcatttgtggatcaggaaggagacagctgggtcagggaagaaggctctccgtcttattgatgctgtaaccaagtggttgatgagcaaaggacagactcatacccgctcagtgcccaagaggttgttctctcggatgatcttgatctacgacattcaccagcgcccagataaagttttggagatattcgcggatatggaggagttaggtgtgcgtccggacgaggatacagcgagacggatcggaaaggcattcgtggcttctggccaagaagaaaaggagaagcatgtcctcgagaaatacttgaagaagtggaagtacatccatttcaacggcgagcgcgttcgcgtgcggagggacggaccattggcgtagtgcccgttttctgaaaaatgctcgaacctatcagagtatcgtgccggtaggcggtagggcaggggagatgctgttactgccgctgtgacagtcaggcacatggatatcggcactagtccctatcctatgtatgtggaatggaacggaaactggagattggttccatggctctagcctgtggaggagacgagcggatggggggtggctggctactaccggcgagatagtgatttaataggcactacataggcgtccagtgattgcgatggctttaacttgcgtatgtgtctgcggaatggtcccgtgctatttcggtgacttgtgcttgtggaattgtgaacacccactggaaagtgtatatcatgagagggacgatacctgacgtctgggcccatggcttgctgatttcacgcaacgaaccattttctgtttgttgcggtgccccggggttcacgtacttgttctgttcttgtgatctggcacagagctgttggcttatccatttctatgcccatccttcttcagcaaatgatcatgtgagttgcgttccgtttgttctgtctggcactcaacccacatggtgcgtgtca

SEQ ID NO: 66845 - DNA, 1192 bp, Zea Mays
actcgtccacacgcgaaggcacccagcagcagccgctcccgaactgaggaaccctaccacgcgggcgacggcggtgcgcgaccggtgacgggacagcggcagcgccccctcctccatctgctggtcccaccgcctcctgacgttatccgatactgccaatccccctcttcgccgttgacggagcttaccgaggaaagaagggcagggccatggcgggagccttcgctttccgcctcgtgcctcgcctcgccgcagagccggcggcgagggggaagggtggcggaggaggagccaaccgcgacgccggcagcagggcgctggtgtcaaagaaaccaaacaagcagcagcatttgtggatcaggaaggagacagctgggtcagggaagaaggctctccgtcttattgatgctatattcgcggatatggaggagttaggtgtgcgtccggacgaggatacagcgagacggatcggaaaggcattcgtggcttctggccaagaagaaaaggagaagcatgtcctcgagaaatacttgaagaagtggaagtacatccatttcaacggcgagcgcgttcgcgtgcggagggacggaccattggcgtagtgcccgttttctgaaaaatgctcgaacctatcagagtatcgtgccggtaggcggtagggcaggggagatgctgttactgccgctgtgacagtcaggcacatggatatcggcactagtccctatcctatgtatgtggaatggaacggaaactggagattggttccatggctctagcctgtggaggagacgagcggatggggggtggctggctactaccggcgagatagtgatttaataggcactacataggcgtccagtgattgcgatggctttaacttgcgtatgtgtctgcggaatggtcccgtgctatttcggtgacttgtgcttgtggaattgtgaacacccactggaaagtgtatatcatgagagggacgatacctgacgtctgggcccatggcttgctgatttcacgcaacgaaccattttctgtttgttgcggtgccccggggttcacgtacttgttctgttcttgtgatctggcacagagctgttggcttatccatttctatgcccatccttcttcagcaaatgatcatgtgagttgcgttccgtttgttctgtctggcactcaacccacatggtgcgtgtca

SEQ ID NO: 66846 - DNA, 1124 bp, Zea Mays
cacggatggttcagggggattagtttggcatatacgagggtgtcaaagaaaccaaacaagcagcagcatttgtggatcaggaaggagacagctgggtcagggaagaaggctctccgtcttattgatgctgtaaccaagtggttgatgagcaaaggacaggtgctgacatggacaacatatgatacacttctgctcgcacttcttatggataaacgggtagacgaagctgagtcagtttggaacactgtaatacagactcatacccgctcagtgcccaagaggttgttctctcggatgatcttgatctacgacattcaccagcgcccagataaagttttggagatattcgcggatatggaggagttaggtgtgcgtccggacgaggatacagcgagacggatcggaaaggcattcgtggcttctggccaagaagaaaaggagaagcatgtcctcgagaaatacttgaagaagtggaagtacatccatttcaacggcgagcgcgttcgcgtgcggagggacggaccattggcgtagtgcccgttttctgaaaaatgctcgaacctatcagagtatcgtgccggtaggcggtagggcaggggagatgctgttactgccgctgtgacagtcaggcacatggatatcggcactagtccctatcctatgtatgtggaatggaacggaaactggagattggttccatggctctagcctgtggaggagacgagcggatggggggtggctggctactaccggcgagatagtgatttaataggcactacataggcgtccagtgattgcgatggctttaacttgcgtatgtgtctgcggaatggtcccgtgctatttcggtgacttgtgcttgtggaattgtgaacacccactggaaagtgtatatcatgagagggacgatacctgacgtctgggcccatggcttgctgatttcacgcaacgaaccattttctgtttgttgcggtgccccggggttcacgtacttgttctgttcttgtgatctggcacagagctgttggcttatccatttctatgcccatccttcttcagcaaatgatcatgtgagttgcgttccgtttgttctgtctggcactcaacccacatggtgcgtgtca

SEQ ID NO: 66847 - DNA, 1067 bp, Zea Mays
aacagccctgcgttgcagccagccgaacagcagaaagacattgtagtagttgctagcaagtcaagagtttaggtaaccaagtggttgatgagcaaaggacaggtgctgacatggacaacatatgatacacttctgctcgcacttcttatggataaacgggtagacgaagctgagtcagtttggaacactgtaatacagactcatacccgctcagtgcccaagaggttgttctctcggatgatcttgatctacgacattcaccagcgcccagataaagttttggagatattcgcggatatggaggagttaggtgtgcgtccggacgaggatacagcgagacggatcggaaaggcattcgtggcttctggccaagaagaaaaggagaagcatgtcctcgagaaatacttgaagaagtggaagtacatccatttcaacggcgagcgcgttcgcgtgcggagggacggaccattggcgtagtgcccgttttctgaaaaatgctcgaacctatcagagtatcgtgccggtaggcggtagggcaggggagatgctgttactgccgctgtgacagtcaggcacatggatatcggcactagtccctatcctatgtatgtggaatggaacggaaactggagattggttccatggctctagcctgtggaggagacgagcggatggggggtggctggctactaccggcgagatagtgatttaataggcactacataggcgtccagtgattgcgatggctttaacttgcgtatgtgtctgcggaatggtcccgtgctatttcggtgacttgtgcttgtggaattgtgaacacccactggaaagtgtatatcatgagagggacgatacctgacgtctgggcccatggcttgctgatttcacgcaacgaaccattttctgtttgttgcggtgccccggggttcacgtacttgttctgttcttgtgatctggcacagagctgttggcttatccatttctatgcccatccttcttcagcaaatgatcatgtgagttgcgttccgtttgttctgtctggcactcaacccacatggtgcgtgtca

SEQ ID NO: 66848 - DNA, 2281 bp, Zea Mays
cacggacgcaccaggcacacaaacccttcccctcttcctcgggtccttcagaagcaggacgcgggcgacacacatcgatcaggcgcgccgaagcagcagcagcagcagcagctgacgcgcatcttccggcgccggccagctcctcggccaccccgccggccgcggccatgtcgaagaagaaggcggtcacgacgatgacgctcaaggacttccacggtggctccatcccctccgagctcccgctcccctccgcccccggcgtcaccccgcgccccgcggaccgcaccgtcgcctctgcgtcccccggcgcggccgcggtcgcacggccacgagtacctgtcgcttcgtcctaccgccgctgcggcggcgttggcgatgccttcctttctcttaattttcccgtgttggccgtctcttcgataggacgagcgttcccctttcgatcccgccgcgccacgccgtccggcgccgtccccgacatcgtacgcacccgctcccgtggttgcgcccaccagatccgggtccgggaacgcgtggggcccgagaaaggaggcctctccggcgtcttcccctgtgggtcctgctcccgcctccgccggcggccagatctggtccgcgacacgcatcgcccaggccagcgcagtggagaaggtcatctctgggagatggcacacgtcgaagccctcgtctccgccggcgccagtgacagtgccagctccggtgttgattaccgtggccccgccggaggttgagaggcctaggtctgttggggtgagagagctggacagtggggtggagaggggcgcggcacccgtgagacccgcgtcgcatgaaggaagagttggtggggaagggagagacggggataccccagagagacccaggttgaagctacttcctcggtccaagccaattgaggctcctgaaccatctcctacatatgttgcagagaagcaggtgcaccaggtccaggtaactgctaacctcatgaaggctgaggttgatcatgatgtgcatcagaatgcaatgactgctaaaacaggagttttaggagcagatgctgagagcaaggtagctgagcgaccacgtttgaatctgaagcctcgttcctatgccacaggacaatctgatgaaatggctgttaaggaaaggccatccctctttggtggtgctcgcccccgtgaacaagttctcaaagaacgtggagtggatgttttggccagtgatcttgagcggatttcaccagttggcaggtctaaaggtgaatttgcaaaggtcgagcagaaggttgaagctttgtccattaacccttctcttgaaagagctgatggtttttcagctggtcatagaggcccaaggagtgttgataagaaggattacaggcgggatactgagaaggctgatgcatataggccttctcgtcgggaggataacaggagggtcgctagagatatggagaagccacaggagcaaccacgcccagagcctgagacatggcgtaagccagtggagcctccaaagccagaggttgcaacacctcgttttgggaaagcagcaaccgcgttggagcttgcgcaggccttctcaacgtccatgtctgatactgcaccacagaaccggttgaccagcgttcccagcccaagagttcctcttagcccaggggctagggatcagtctggcttctcaaggctcactgacagcaggacgttacgctccagcccttcccagcgaaagataaatggctactgatcgcttggcacacatattacacgtgtcacgatgacagttggcctcgatgaagcgccccgctgtatcttcatactcaactgcccctgcgtggagaagtccaattgttgctctgtcagatggtggcacgtgagtggtgataatctcattggtagcaaacaaaaggctcctcttccataagtttctgccctgatttgttgctggggaataattgccacctgcgcatcttttagttggatgtgctctgccgtgcttggttttatgatgttgccagatcggtggtatgtagcctgcgtcataatgcaaaattgggattttactgcgagaacaaattattggtcttgtacggttaaatcaggattaaaggatgtaactttcaatcttggttgtctagtttatataagccgcgtttggatcactggattccaatttgaattttgaaccaagttacgttgaaaatcctgtgtaaattggtgtcacccaattggggttccgatgcttcgtttatttttcttccttaacttgatctcccgtt

SEQ ID NO: 66849 - DNA, 1998 bp, Zea Mays
taccttcgatgttcagcttgattcgtccgcatcggccgtcacttcgacgaggacgagcgtacccataacgagcccgccgcgccacgccgtccggcgccgtccccgacatcgtacgcacccgctcccgtggttgcgcccaccagatccgggtccgggaacgcgtggggcccgagaaaggaggcctctccggcgtcttcccctgtgggtcctgctcccgcctccgccggcggccagatctggtccgcgacacgcatcgcccaggccagcgcagtggagaaggtcatctctgggagatggcacacgtcgaagccctcgtctccgccggcgccagtgacagtgccagctccggtgttgattaccgtggccccgccggaggttgagaggcctaggtctgttggggtgagagagctggacagtggggtggagaggggcgcggcacccgtgagacccgcgtcgcatgaaggaagagttggtggggaagggagagacggggataccccagagagacccaggttgaagctacttcctcggtccaagccaattgaggctcctgaaccatctcctacatatgttgcagagaagcaggtgcaccaggtccaggtaactgctaacctcatgaaggctgaggttgatcatgatgtgcatcagaatgcaatgactgctaaaacaggagttttaggagcagatgctgagagcaaggtagctgagcgaccacgtttgaatctgaagcctcgttcctatgccacaggacaatctgatgaaatggctgttaaggaaaggtaccagcaccttcttttcttgaatctgtgagaacttggatctttgttttcacaatttattagtgatgcttatgtatgacaagaattaggccatccctctttggtggtgctcgcccccgtgaacaagttctcaaagaacgtggagtggatgttttggccagtgatcttgagcggatttcaccagttggcaggtctaaaggtgaatttgcaaaggtcgagcagaaggttgaagctttgtccattaacccttctcttgaaagagctgatggtttttcagctggtcatagaggcccaaggagtgttgataagaaggattacaggcgggatactgagaaggctgatgcatataggccttctcgtcgggaggataacaggagggtcgctagagatatggagaagccacaggagcaaccacgcccagagcctgagacatggcgtaagccagtggagcctccaaagccagaggttgcaacacctcgttttgggaaagcagcaaccgcgttggagcttgcgcaggccttctcaacgtccatgtctgatactgcaccacagaaccggttgaccagcgttcccagcccaagagttcctcttagcccaggggctagggatcagtctggcttctcaaggctcactgacagcaggacgttacgctccagcccttcccagcgaaagataaatggctactgatcgcttggcacacatattacacgtgtcacgatgacagttggcctcgatgaagcgccccgctgtatcttcatactcaactgcccctgcgtggagaagtccaattgttgctctgtcagatggtggcacgtgagtggtgataatctcattggtagcaaacaaaaggctcctcttccataagtttctgccctgatttgttgctggggaataattgccacctgcgcatcttttagttggatgtgctctgccgtgcttggttttatgatgttgccagatcggtggtatgtagcctgcgtcataatgcaaaattgggattttactgcgagaacaaattattggtcttgtacggttaaatcaggattaaaggatgtaactttcaatcttggttgtctagtttatataagccgcgtttggatcactggattccaatttgaattttgaaccaagttacgttgaaaatcctgtgtaaattggtgtcacccaattggggttccgatgcttcgtttatttttcttccttaacttgatctcccgtt

SEQ ID NO: 66850 - DNA, 1987 bp, Zea Mays
taccttcgatgttcagcttgattcgtccgcatcggccgtcacttcgacgaggacgagcgtacccataacgagcccgccgcgccacgccgtccggcgccgtccccgacatcgtacgcacccgctcccgtggttgcgcccaccagatccgggtccgggaacgcgtggggcccgagaaaggaggcctctccggcgtcttcccctgtgggtcctgctcccgcctccgccggcggccagatctggtccgcgacacgcatcgcccaggccagcgcagtggagaaggtcatctctgggagatggcacacgtcgaagccctcgtctccgccggcgccagtgacagtgccagctccggtgttgattaccgtggccccgccggaggttgagaggcctaggtctgttggggtgagagagctggacagtggggtggagaggggcgcggcacccgtgagacccgcgtcgcatgaaggaagagttggtggggaagggagagacggggataccccagagagacccaggttgaagctacttcctcggtccaagccaattgaggctcctgaaccatctcctacatatgttgcagagaagcaggtccaggtaactgctaacctcatgaaggctgaggttgatcatgatgtgcatcagaatgcaatgactgctaaaacaggagttttaggagcagatgctgagagcaaggtagctgagcgaccacgtttgaatctgaagcctcgttcctatgccacaggacaatctgatgaaatggctgttaaggaaaggccatccctctttggtggtgctcgcccccgtgaacaagttctcaaagaacgtggagtggatgttttggccagtgatcttgagcggatttcaccagttggcaggtctaaaggtgaatttgcaaaggtcgagcagaaggttgaagctttgtccattaacccttctcttgaaagagctgatggtttttcagctggtcatagaggcccaaggagtgttgataagaaggattacaggcgggatactgagaaggctgatgcatataggccttctcgtcgggaggataacaggagggtcgctagagatatggagaagccacaggagcaaccacgcccagagcctgagacatggcgtaagccagtggagcctccaaagccagaggttgcaacacctcgttttgggaaagcagcaaccgcgttggagcttgcgcaggccttctcaacgtccatgtctgatactgcaccacagaaccggttgaccagcgttcccagcccaagagttcctcttagcccaggggctagggatcagtctggcttctcaaggctcactgacagcaggacgttacgctccagcccttcccagcgaaagataaatggctactgatcgcttggcacacatattacacgtgtcacgatgacagttggcctcgatgaagcgccccgctgtatcttcatactcaactgcccctgcgtggagaagtccaattgttgctctgtcagatggtggcacgtgagtggtgataatctcattggtagcaaacaaaaggctcctcttccataagtttctggtcagtgatttatgactcagggttcatttttcctctcttgataacaaagatgtgaatttgtggactattttttcttatgttcgccagccctgatttgttgctggggaataattgccacctgcgcatcttttagttggatgtgctctgccgtgcttggttttatgatgttgccagatcggtggtatgtagcctgcgtcataatgcaaaattgggattttactgcgagaacaaattattggtcttgtacggttaaatcaggattaaaggatgtaactttcaatcttggttgtctagtttatataagccgcgtttggatcactggattccaatttgaattttgaaccaagttacgttgaaaatcctgtgtaaattggtgtcacccaattggggttccgatgcttcgtttatttttcttccttaacttgatctcccgtt

SEQ ID NO: 66851 - DNA, 1726 bp, Zea Mays
gtttaatgtccctgtatgcattagtcatgcaatttagggcctgtttggatcactagagctagttactagctgggactaaaaattagaccaaattagctagagttgactaaccagttgaagacttggctaaaaaattaatctacctattagccctcctgtttggatgcactaagaccaatttttagctagctaacaattagaacttgtatccaaacatgcccctagtatagcttgctgcattgttttggagtctggaatcatattgggttcaaagattaaaacaacaccaacaaagattaaaacatgccccaaggtggtgctgttcaccgtcaacttcatcaaataattcgtgagtgaagtctatgaagcaaacattttaatatttcattctatcaattaaaaaattataattctgctttggatgagatctccaagaacaatggatataatggtaaatgagaatattgatggttgcaattagttttggtagcagaatgatgacaacaccaacaaagattaaaacatgccccaaggtggtgctgttcaccgtcaacttcatcaaataattcgtaccagcaccttcttttcttgaatctgccatccctctttggtggtgctcgcccccgtgaacaagttctcaaagaacgtggagtggatgttttggccagtgatcttgagcggatttcaccagttggcaggtctaaaggtgaatttgcaaaggtcgagcagaaggttgaagctttgtccattaacccttctcttgaaagagctgatggtttttcagctggtcatagaggcccaaggagtgttgataagaaggattacaggcgggatactgagaaggctgatgcatataggccttctcgtcgggaggataacaggagggtcgctagagatatggagaagccacaggagcaaccacgcccagagcctgagacatggcgtaagccagtggagcctccaaagccagaggttgcaacacctcgttttgggaaagcagcaaccgcgttggagcttgcgcaggccttctcaacgtccatgtctgatactgcaccacagaaccggttgaccagcgttcccagcccaagagttcctcttagcccaggggctagggatcagtctggcttctcaaggctcactgacagcaggacgttacgctccagcccttcccagcgaaagataaatggctactgatcgcttggcacacatattacacgtgtcacgatgacagttggcctcgatgaagcgccccgctgtatcttcatactcaactgcccctgcgtggagaagtccaattgttgctctgtcagatggtggcacgtgagtggtgataatctcattggtagcaaacaaaaggctcctcttccataagtttctgccctgatttgttgctggggaataattgccacctgcgcatcttttagttggatgtgctctgccgtgcttggttttatgatgttgccagatcggtggtatgtagcctgcgtcataatgcaaaattgggattttactgcgagaacaaattattggtcttgtacggttaaatcaggattaaaggatgtaactttcaatcttggttgtctagtttatataagccgcgtttggatcactggattccaatttgaattttgaaccaagttacgttgaaaatcctgtgtaaattggtgtcacccaattggggttccgatgcttcgtttatttttcttccttaacttgatctcccgtt

SEQ ID NO: 66852 - DNA, 1657 bp, Zea Mays
aaaaattaatctacctattagccctcctgtttggatgcactaagaccaatttttagctagctaacaattagaacttgtatccaaacatgcccctagtatagcttgctgcattgttttggagtctggaatcatattgggttcaaagattaaaacaacaccaacaaagattaaaacatgccccaaggtggtgctgttcaccgtcaacttcatcaaataattcgtgagtgaagtctatgaagcaaacattttaatatttcattctatcaattaaaaaattataattctgctttggatgagatctccaagaacaatggatataatggtaaatgagaatattgatggttgcaattagttttggtagcagaatgatgacaacaccaacaaagattaaaacatgccccaaggtggtgctgttcaccgtcaacttcatcaaataattcgccatccctctttggtggtgctcgcccccgtgaacaagttctcaaagaacgtggagtggatgttttggccagtgatcttgagcggatttcaccagttggcaggtctaaaggtgaatttgcaaaggtcgagcagaaggttgaagctttgtccattaacccttctcttgaaagagctgatggtttttcagctggtcatagaggcccaaggagtgttgataagaaggattacaggcgggatactgagaaggctgatgcatataggccttctcgtcgggaggataacaggagggtcgctagagatatggagaagccacaggagcaaccacgcccagagcctgagacatggcgtaagccagtggagcctccaaagccagaggttgcaacacctcgttttgggaaagcagcaaccgcgttggagcttgcgcaggccttctcaacgtccatgtctgatactgcaccacagaaccggttgaccagcgttcccagcccaagagttcctcttagcccaggggctagggatcagtctggcttctcaaggctcactgacagcaggacgttacgctccagcccttcccagcgaaagataaatggctactgatcgcttggcacacatattacacgtgtcacgatgacagttggcctcgatgaagcgccccgctgtatcttcatactcaactgcccctgcgtggagaagtccaattgttgctctgtcagatggtggcacgtgagtggtgataatctcattggtagcaaacaaaaggctcctcttccataagtttctggtcagtgatttatgactcagggttcatttttcctctcttgataacaaagatgtgaatttgtggactattttttcttatgttcgccagccctgatttgttgctggggaataattgccacctgcgcatcttttagttggatgtgctctgccgtgcttggttttatgatgttgccagatcggtggtatgtagcctgcgtcataatgcaaaattgggattttactgcgagaacaaattattggtcttgtacggttaaatcaggattaaaggatgtaactttcaatcttggttgtctagtttatataagccgcgtttggatcactggattccaatttgaattttgaaccaagttacgttgaaaatcctgtgtaaattggtgtcacccaattggggttccgatgcttcgtttatttttcttccttaacttgatctcccgtt

SEQ ID NO: 66853 - DNA, 1061 bp, Zea Mays
gttattttccggtagatgaaagcatcacatcaggtctaaaggtgaatttgcaaaggtcgagcagaaggttgaagctttgtccattaacccttctcttgaaagagctgatggtttttcagctggtcatagaggcccaaggagtgttgataagaaggattacaggcgggatactgagaaggctgatgcatataggccttctcgtcgggaggataacaggagggtcgctagagatatggagaagccacaggagcaaccacgcccagagcctgagacatggcgtaagccagtggagcctccaaagccagaggttgcaacacctcgttttgggaaagcagcaaccgcgttggagcttgcgcaggccttctcaacgtccatgtctgatactgcaccacagaaccggttgaccagcgttcccagcccaagagttcctcttagcccaggggctagggatcagtctggcttctcaaggctcactgacagcaggacgttacgctccagcccttcccagcgaaagataaatggctactgatcgcttggcacacatattacacgtgtcacgatgacagttggcctcgatgaagcgccccgctgtatcttcatactcaactgcccctgcgtggagaagtccaattgttgctctgtcagatggtggcacgtgagtggtgataatctcattggtagcaaacaaaaggctcctcttccataagtttctgccctgatttgttgctggggaataattgccacctgcgcatcttttagttggatgtgctctgccgtgcttggttttatgatgttgccagatcggtggtatgtagcctgcgtcataatgcaaaattgggattttactgcgagaacaaattattggtcttgtacggttaaatcaggattaaaggatgtaactttcaatcttggttgtctagtttatataagccgcgtttggatcactggattccaatttgaattttgaaccaagttacgttgaaaatcctgtgtaaattggtgtcacccaattggggttccgatgcttcgtttatttttcttccttaacttgatctcccgtt

SEQ ID NO: 66854 - DNA, 1171 bp, Zea Mays
caaatgtgccctagaatgcttgctgtgcagccttatcagatttttcttgttttatggtctaaaggtgaatttgcaaaggtcgagcagaaggttgaagctttgtccattaacccttctcttgaaagagctgatggtttttcagctggtcatagaggcccaaggagtgttgataagaaggattacaggcgggatactgagaaggctgatgcatataggccttctcgtcgggaggataacaggagggtcgctagagatatggagaagccacaggagcaaccacgcccagagcctgagacatggcgtaagccagtggagcctccaaagccagaggttgcaacacctcgttttgggaaagcagcaaccgcgttggagcttgcgcaggccttctcaacgtccatgtctgatactgcaccacagaaccggttgaccagcgttcccagcccaagagttcctcttagcccaggggctagggatcagtctggcttctcaaggctcactgacagcaggacgttacgctccagcccttcccagcgaaagataaatggctactgatcgcttggcacacatattacacgtgtcacgatgacagttggcctcgatgaagcgccccgctgtatcttcatactcaactgcccctgcgtggagaagtccaattgttgctctgtcagatggtggcacgtgagtggtgataatctcattggtagcaaacaaaaggctcctcttccataagtttctggtcagtgatttatgactcagggttcatttttcctctcttgataacaaagatgtgaatttgtggactattttttcttatgttcgccagccctgatttgttgctggggaataattgccacctgcgcatcttttagttggatgtgctctgccgtgcttggttttatgatgttgccagatcggtggtatgtagcctgcgtcataatgcaaaattgggattttactgcgagaacaaattattggtcttgtacggttaaatcaggattaaaggatgtaactttcaatcttggttgtctagtttatataagccgcgtttggatcactggattccaatttgaattttgaaccaagttacgttgaaaatcctgtgtaaattggtgtcacccaattggggttccgatgcttcgtttatttttcttccttaacttgatctcccgtt

SEQ ID NO: 66855 - DNA, 2692 bp, Zea Mays
ttcatgttctttgcttgctcctccgccatggattaggctaggctaggccatcaagaggaagagcacgtcgcaaccttccattttttacgctcagttgcagagtgctccgctgcagagcacacagtgaagctgtgtccgtttccccatcactgtcatcaatgaggtcgcctcgccatgcctggtcctcctcttcttattaatggcgtaactgtaccgcgcatatcccgcacctgctaatgttcttcttcgtccctcccgctccattcctccactgctgggcgttaacggagtaacagctacacctcatcttcttcgcccttttctatgcgagctttaatgcccgtttggtggctacgactactgtacgtactcgtttattgccactagcttcttcccccattgaaaaagctttattactacattctgctccgcaaagagagagagtgacctgatcttcccttcaatttggcgtcggtgttaatttggattcctacaagtgggtggcgtctcgcattcttggcggctgcgtgcttctttaatgcgctgacgcttcttgttctgaattgctgttgcgtttttttggatataaaatcgcaggacgttctagcgcgcttctgcggcaggatcaggaggctggtggtcgccggcgcagcgtctgcggggcggcgtccgagggtgactctgcaaggactccccggtggccccgaggcgttcgagctcgtcgcgaggttctgctacaccgacgacggcggacggggcggggcggtgacggcgggcaacgcgtgcgtgctgcggtgcgcggcggagttcctggacatggcggcggcggacgtggccgcggccgaggccgaggccgaggccgcgccgagcctggtgcggatgacggagaaggcgctggaggagatgccgcactggccgtggcacacggtcgtggacgccgtgaagcagtgccagcgcctggtcccgctcgcggactccaccggcgcgttcgacgcggccgtggcggcgctggtgtcccagatggccgtgcccccgccggccggggacgccacgcccacgggctcctcgccggagagcaccgcgttccggttctcgtgcgacaccaagagcagcagcctcagcctgcgcggcgggtcctgcgtcagccgcacctggtggttcgaggacctcgtcgcgctcggccctgccacggtggagcgcgtcgcctcggcgctcgtggccaggggcgccgaccacggcgtcgtcgcccggttcctcttctactacctaaagtgccgcgtcgccggtgcgagcgccgaggagaagaaggcgatgctgcaggcctcggtcgccgtcatggcgaagctggaccgaagcgccgtctcctgcaagggcctcttcggcatcctgaggatcgccgcgccgctgaggctggccgacgcgtgccaggagcggctcgtggccatgatcggccgcaagctggaccacgcgacgctcgataacctgctcgtcccggcgccgcccgggacgggcagcctgtacgacgtgagcctggtgctgaggttcttggccgcgttcctccgcggcggcgccagtgacgagccggcgaggctgaagaaggtgggcaagctcgtggacctgtacctggccgaggtcgctccggacccgtcccttcgcccggccaagttcctggagctcgccaccgcgctgccggctcacgcgagggactgccacgacgcgctgtatcgcgccatcgacgtctatttccaggttcacggccgcctgacggacgaggagaagatgaagatctgcagggggctgagctacgagaagctgtcgcccgagagctgcaagcacctggcgcggaacggcgagttcccgacgagggcggcggtgcaggcgctggcgtcgcagcacacggtgctgaagagcatcgtgctgcgcgagcccgcgggccagctgaagcccgtgtcgctgtcccctcccccgtccacgggtaagcaccgcgacgtcggcggcggcgagaacgacgagggtcaggtggtcctgtacgcggggcggctggacctgtcgctggagaaccagaacctgcggtcgctcctggacgggatgcactggcgggtgatggagctggagaaggtgtgtagccggatgaagacgcagatgagcaagatgaagcagcccaggcgcggaggcggtggcggccgcgccggcaggtcgtcgctccccaggatgtgctcctgatccaccacctcgcctcctcgcgctgccgttattagcgcgcgctttagcggtgaccccgcaacactgtaccatagcgacgatgtacataccgactgccgtgctaggaggaatcagtgaagcgcggcgcggcgcggtgcaggcggcagagcatcgtcctcctccctgcatcttgtcccttttttttttttgcctagcttcctcccgtgtatgatgatgcgtgtatcggttctcggtggtggcaatttgaaaagaagggctggctagcagcgtcagcctgagctgagtggtcctgctggttgaatggatgtggtctatctgaaataataaaaaaaggggtactgtgtggcatgcttcgtgcctgaagaatctcgcaatgctgctacagcagcttgccaggtcgagcatacagtaactgctcgcattcgcaccagtagcgttttgcctcaaaaaaaaaaagctagccaagtac

SEQ ID NO: 66856 - DNA, 2815 bp, Zea Mays
agccgcttgtttcttgtggacgtctaggccttgtggacgagtgaagtgaagcctgccatatcctgttggaatcgaacctgcttcgattcttccctcttgtagttacctccagatagcccccaattttttttttggcaccacctaccttggcatcgtcttccccaattcggtcgcgtccaacccttcctttcaggcctttccgaatgttttgcccttgatttgtactccgtcgcaggtttaggagccgtgtccggcttgtcacatcccggtggtttcacgcccgtctctgaccgagtgactgctagctagttcctgatccttcgatagcttgtttgtcacacgccaatggagtcgccctgtttccactcattatgctcacctgcaactctgcttccgcatcattagtgtctacaggaagagcacgtcgcaaccttccattttttacgctcagttgcagagtgctccgctgcagagcacacagtgaagctgtgtccgtttccccatcactgtcatcaatgagctacacctcatcttcttcgcccttttctatgcgagctttaatgcccgtttggtggctacgactactgtacgtactcgtttattgccactagcttcttcccccattgaaaaagctttattactacattctgctccgcaaagagagagagtgacctgatcttcccttcaatttggcgtcggtgttaatttggattcctacaagacgttctagcgcgcttctgcggcaggatcaggaggctggtggtcgccggcgcagcgtctgcggggcggcgtccgagggtgactctgcaaggactccccggtggccccgaggcgttcgagctcgtcgcgaggttctgctacaccgacgacggcggacggggcggggcggtgacggcgggcaacgcgtgcgtgctgcggtgcgcggcggagttcctggacatggcggcggcggacgtggccgcggccgaggccgaggccgaggccgcgccgagcctggtgcggatgacggagaaggcgctggaggagatgccgcactggccgtggcacacggtcgtggacgccgtgaagcagtgccagcgcctggtcccgctcgcggactccaccggcgcgttcgacgcggccgtggcggcgctggtgtcccagatggccgtgcccccgccggccggggacgccacgcccacgggctcctcgccggagagcaccgcgttccggttctcgtgcgacaccaagagcagcagcctcagcctgcgcggcgggtcctgcgtcagccgcacctggtggttcgaggacctcgtcgcgctcggccctgccacggtggagcgcgtcgcctcggcgctcgtggccaggggcgccgaccacggcgtcgtcgcccggttcctcttctactacctaaagtgccgcgtcgccggtgcgagcgccgaggagaagaaggcgatgctgcaggcctcggtcgccgtcatggcgaagctggaccgaagcgccgtctcctgcaagggcctcttcggcatcctgaggatcgccgcgccgctgaggctggccgacgcgtgccaggagcggctcgtggccatgatcggccgcaagctggaccacgcgacgctcgataacctgctcgtcccggcgccgcccgggacgggcagcctgtacgacgtgagcctggtgctgaggttcttggccgcgttcctccgcggcggcgccagtgacgagccggcgaggctgaagaaggtgggcaagctcgtggacctgtacctggccgaggtcgctccggacccgtcccttcgcccggccaagttcctggagctcgccaccgcgctgccggctcacgcgagggactgccacgacgcgctgtatcgcgccatcgacgtctatttccaggttcacggccgcctgacggacgaggagaagatgaagatctgcagggggctgagctacgagaagctgtcgcccgagagctgcaagcacctggcgcggaacggcgagttcccgacgagggcggcggtgcaggcgctggcgtcgcagcacacggtgctgaagagcatcgtgctgcgcgagcccgcgggccagctgaagcccgtgtcgctgtcccctcccccgtccacgggtaagcaccgcgacgtcggcggcggcgagaacgacgagggtcaggtggtcctgtacgcggggcggctggacctgtcgctggagaaccagaacctgcggtcgctcctggacgggatgcactggcgggtgatggagctggagaaggtgtgtagccggatgaagacgcagatgagcaagatgaagcagcccaggcgcggaggcggtggcggccgcgccggcaggtcgtcgctccccaggatgtgctcctgatccaccacctcgcctcctcgcgctgccgttattagcgcgcgctttagcggtgaccccgcaacactgtaccatagcgacgatgtacataccgactgccgtgctaggaggaatcagtgaagcgcggcgcggcgcggtgcaggcggcagagcatcgtcctcctccctgcatcttgtcccttttttttttttgcctagcttcctcccgtgtatgatgatgcgtgtatcggttctcggtggtggcaatttgaaaagaagggctggctagcagcgtcagcctgagctgagtggtcctgctggttgaatggatgtggtctatctgaaataataaaaaaaggggtactgtgtggcatgcttcgtgcctgaagaatctcgcaatgctgctacagcagcttgccaggtcgagcatacagtaactgctcgcattcgcaccagtagcgttttgcctcaaaaaaaaaaagctagccaagtac

SEQ ID NO: 66857 - DNA, 450 bp, Zea Mays
caagattccatccactcgtgtgaaggtgttactggactacggttgaggcgagagatggcagcagcaggcagcgaccagagtcaggagcagaggtgaggaggaggaggaggagctctgagacgacaacacccgagacaatggcgagccagttttccgctttataaaatcctgcggtgagtgagtgagtgagtgagtgagagagagagagagagagagagtgccgccgccgccgcaacaagaaatacaacagctgcagcttcctgcagaggttggaatgtatctactaagatgtgggtacctttttgcagttcttttttctcgcttcttttcttctcttttagcccaagctcctctcttgtccatgcactgtgtgaattaagtttgtcaggcaaaaaagaaaaaagaatatctccctgttcgtacggacgtggaggagaaaattaatgagag

SEQ ID NO: 66858 - DNA, 481 bp, Zea Mays
cctctgcctgcgaaatgaagtcatggcttcggcagtggaattccgagccccttcaggtgttactggactacggttgaggcgagagatggcagcagcaggcagcgaccagagtcaggagcagaggtgaggaggaggaggaggagctctgagacgacaacacccgagacaatggcgagccagttttccgctttataaaatcctgcggtgagtgagtgagtgagtgagtgagagagagagagagagagagagtgccgccgccgccgcaacaagaaatacaacagctgcagcttcctgcagaggttggaatgtatctactaagatgtgggtacctttttgcagttcttttttctcgcttcttttcttctcttttagcccaagctcctctcttgtccatgcactgtgtgaattaagtttgtcaggcaaaaaagaaaaaagaatatctccctgttcgtacggacgtggaggagaaaattaatgagag

SEQ ID NO: 66859 - DNA, 464 bp, Zea Mays
gatggcggcacaatgagcccgctttgttttcccccaatggtgttactggactacggttgaggcgagagatggcagcagcaggcagcgaccagagtcaggagcagaggtgaggaggaggaggaggagctctgagacgacaacacccgagacaatggcgagccagttttccgctttataaaatcctgcggtgagtgagtgagtgagtgagtgagagagagagagagagagagagtgccgccgccgccgcaacaagaaatacaacagctgcagcttcctgcagaggttggaatgtatctactaagatgtgggtacctttttgcagttcttttttctcgcttcttttcttctcttttagcccaagctcctctcttgtccatgcactgtgtgaattaagtttgtcaggcaaaaaagaaaaaagaatatctccctgttcgtacggacgtggaggagaaaattaatgagag

SEQ ID NO: 66860 - DNA, 1767 bp, Zea Mays
gtggagggactcggccacggaccacccgtctcgccctcatctaattacgccccgctcgctgtccctctcagatctcttccttgttctcgcctcgtcgtccccaatcgtcgccgggagtctcccgatccttcttccaccacctcaccggtggtgtcagggccggctcgcggacggtgcttggactgcccccgtcccgtcatggatcgcgccgagctcaccaccgaacagcttttacggcgatatgaccacaaaccggagagccagcgagctcctttgcttgaggaggatgggccagcatatatccgagttttcctgaatatcctgcggagcatctccaaggaagagactgtggaatacgtgcttgcactcattgatgaaatgcttgcaacaaatcctaagcgtgcagcactgttttatgatcaatctttgtcgggtgaagatatttatgaaccgttcttaagttgttatggaaaggcaactggtttgtacaagaaaaaagttgtaagatattgactgttataattagtgcacgaccaaagcttcagaatggcacacttccaaatggagatgcttcgaattcgaagagcaagcttacttcaacacacgatgtattgagaggtttggttgattggctctgttcacagctgaggaatcctacacacccgagctgctctattcctacttctatccattgcctctccactttgctaagagaaccatatgttaggacattatttgttcaagctgatggcatcaagctgctcattcccttaatttccccagcttccacacaacagtcaattcagctcctttatgaaacttgcctctgcatctggcttttatccttttatgatgctgcagttgattatttgtccaccacaagggttatgccaagacttgtagaggttgtcaagggctctactaaagagaaggtggtcagagttgttgtgttgtccttccgcaatttgctggcaaagggtgcatttgctgcccagatgatcgatcttggattgccacaaatggtacaaaacttgaaagctcaagcatggactgatgaggatctgttagatgctctgaatcaactagaggtgggactcaaagaaaacctcaagaagttgagttcctttgataagtacaaacagcaagttcttcttggtcatctggactggtctccaatgcacaaagatccaagtttctggcgtgagaacattaacaattttgaagaaaatgatttccagattctgcgagttctcatgacaatcattgacacatcaagtgacaccaccgctcttgccgtggcctgctacgacctctcacaattccttcagtaccatccatctggccgaatcgtggtggcagacctcaaggctaaggaccgagtcatgaaactcatgaatcatgagaacactgaagtgaggaaaaatgcattgatctgtgtgcagaggctcttccttggcgcaaagtatgccagtttcctgcaggcttgagaaaagctgagtcttgtatttagatccagagaacccctggtcatttttcagaatggctgttgagaaagaaaaaccttgaaaattcttgttcagtgtatcctattgttatttgatttctgaagccgatgtataataaataatcagagtcatagaatgctcgatgtaataaagtgtccatgggcttgttgattcatttatgtaaattttgacttgtaacattagcaaacctcttttttgttattcttctgcctgacaacattgcctgattcgtgtgcattac

SEQ ID NO: 66861 - DNA, 1836 bp, Zea Mays
gtggagggactcggccacggaccacccgtctcgccctcatctaattacgccccgctcgctgtccctctcagatctcttccttgttctcgcctcgtcgtccccaatcgtcgccgggagtctcccgatccttcttccaccacctcaccggtggtgtcagggccggctcgcggacggtgcttggactgcccccgtcccgtcatggatcgcgccgagctcaccaccgaacaggttctgaagcgagatattccatgggagcattacatgtcaactaagcttatctccggaacgtgccttcagcttttacggcgatatgaccacaaaccggagagccagcgagctcctttgcttgaggaggatgggccagcatatatccgagttttcctgaatatcctgcggagcatctccaaggaagagactgtggaatacgtgcttgcactcattgatgaaatgcttgcaacaaatcctaagcgtgcagcactgttttatgatcaatctttgtcgggtgaagatatttatgaaccgttcttaagttgttatggaaaggcaactggtttgtacaagaaaaaagttgtaagatattgactgttataattagtgcacgaccaaagcttcagaatggcacacttccaaatggagatgcttcgaattcgaagagcaagcttacttcaacacacgatgtattgagaggtttggttgattggctctgttcacagctgaggaatcctacacacccgagctgctctattcctacttctatccattgcctctccactttgctaagagaaccatatgttaggacattatttgttcaagctgatggcatcaagctgctcattcccttaatttccccagcttccacacaacagtcaattcagctcctttatgaaacttgcctctgcatctggcttttatccttttatgatgctgcagttgattatttgtccaccacaagggttatgccaagacttgtagaggttgtcaagggctctactaaagagaaggtggtcagagttgttgtgttgtccttccgcaatttgctggcaaagggtgcatttgctgcccagatgatcgatcttggattgccacaaatggtacaaaacttgaaagctcaagcatggactgatgaggatctgttagatgctctgaatcaactagaggtgggactcaaagaaaacctcaagaagttgagttcctttgataagtacaaacagcaagttcttcttggtcatctggactggtctccaatgcacaaagatccaagtttctggcgtgagaacattaacaattttgaagaaaatgatttccagattctgcgagttctcatgacaatcattgacacatcaagtgacaccaccgctcttgccgtggcctgctacgacctctcacaattccttcagtaccatccatctggccgaatcgtggtggcagacctcaaggctaaggaccgagtcatgaaactcatgaatcatgagaacactgaagtgaggaaaaatgcattgatctgtgtgcagaggctcttccttggcgcaaagtatgccagtttcctgcaggcttgagaaaagctgagtcttgtatttagatccagagaacccctggtcatttttcagaatggctgttgagaaagaaaaaccttgaaaattcttgttcagtgtatcctattgttatttgatttctgaagccgatgtataataaataatcagagtcatagaatgctcgatgtaataaagtgtccatgggcttgttgattcatttatgtaaattttgacttgtaacattagcaaacctcttttttgttattcttctgcctgacaacattgcctgattcgtgtgcattac

SEQ ID NO: 66862 - DNA, 2010 bp, Zea Mays
gtggagggactcggccacggaccacccgtctcgccctcatctaattacgccccgctcgctgtccctctcagatctcttccttgttctcgcctcgtcgtccccaatcgtcgccgggagtctcccgatccttcttccaccacctcaccggtggtgtcagggccggctcgcggacggtgcttggactgcccccgtcccgtcatggatcgcgccgagctcaccaccgaacaggttctgaagcgagatattccatgggagcattacatgtcaactaagcttatctccggaacgtgccttcagcttttacggcgatatgaccacaaaccggagagccagcgagctcctttgcttgaggaggatgggccagcatatatccgagttttcctgaatatcctgcggagcatctccaaggaagagactgtggaatacgtgcttgcactcattgatgaaatgcttgcaacaaatcctaagcgtgcagcactgttttatgatcaatctttgtcgggtgaagatatttatgaaccgttcttaagttaagtgtactatgcttgtttaattctttttatttttattttattaatttaagtaatcaactcatttcgctcttcagcaattagattgacatatattgcccttacacatcctgatggcaagattatatatttagaatagtcaccttctgtacctgatagcctgttttgttttggttgttatggaaaggcaactggtttgtacaagaaaaaagttgtaagatattgactgttataattagtgcacgaccaaagcttcagaatggcacacttccaaatggagatgcttcgaattcgaagagcaagcttacttcaacacacgatgtattgagaggtttggttgattggctctgttcacagctgaggaatcctacacacccgagctgctctattcctacttctatccattgcctctccactttgctaagagaaccatatgttaggacattatttgttcaagctgatggcatcaagctgctcattcccttaatttccccagcttccacacaacagtcaattcagctcctttatgaaacttgcctctgcatctggcttttatccttttatgatgctgcagttgattatttgtccaccacaagggttatgccaagacttgtagaggttgtcaagggctctactaaagagaaggtggtcagagttgttgtgttgtccttccgcaatttgctggcaaagggtgcatttgctgcccagatgatcgatcttggattgccacaaatggtacaaaacttgaaagctcaagcatggactgatgaggatctgttagatgctctgaatcaactagaggtgggactcaaagaaaacctcaagaagttgagttcctttgataagtacaaacagcaagttcttcttggtcatctggactggtctccaatgcacaaagatccaagtttctggcgtgagaacattaacaattttgaagaaaatgatttccagattctgcgagttctcatgacaatcattgacacatcaagtgacaccaccgctcttgccgtggcctgctacgacctctcacaattccttcagtaccatccatctggccgaatcgtggtggcagacctcaaggctaaggaccgagtcatgaaactcatgaatcatgagaacactgaagtgaggaaaaatgcattgatctgtgtgcagaggctcttccttggcgcaaagtatgccagtttcctgcaggcttgagaaaagctgagtcttgtatttagatccagagaacccctggtcatttttcagaatggctgttgagaaagaaaaaccttgaaaattcttgttcagtgtatcctattgttatttgatttctgaagccgatgtataataaataatcagagtcatagaatgctcgatgtaataaagtgtccatgggcttgttgattcatttatgtaaattttgacttgtaacattagcaaacctcttttttgttattcttctgcctgacaacattgcctgattcgtgtgcattac

SEQ ID NO: 66863 - DNA, 2107 bp, Zea Mays
gtggagggactcggccacggaccacccgtctcgccctcatctaattacgccccgctcgctgtccctctcagatctcttccttgttctcgcctcgtcgtccccaatcgtcgccgggagtctcccgatccttcttccaccacctcaccggtggtgtcagggccggctcgcggacggtgcttggactgcccccgtcccgtcatggatcgcgccgagctcaccaccgaacaggttctgaagcgagatattccatgggagcattacatgtcaactaagcttatctccggaacgtgccttcagcttttacggcgatatgaccacaaaccggagagccagcgagctcctttgcttgaggaggatgggccagcatatatccgagttttcctgaatatcctgcggagcatctccaaggaagagactgtggaatacgtgcttgcactcattgatgaaatgcttgcaacaaatcctaagcgtgcagcactgttttatgatcaatctttgtcgggtgaagatatttatgaaccgttcttaagttaagtgtactatgcttgtttaattctttttatttttattttattaatttaagtaatcaactcatttcgctcttcagcaattagattgacatatattgcccttacacatcctgatggcaagattatatatttagaatagtcaccttctgtacctgatagcctgttttgttttggtaataccctcacaggctcacactagaaagagttcatccgcaccatgctaggccttatttatcttgttctctgaccaccatatagctaacaaaattatagttttcaggttgttatggaaaggcaactggtttgtacaagaaaaaagttgtaagatattgactgttataattagtgcacgaccaaagcttcagaatggcacacttccaaatggagatgcttcgaattcgaagagcaagcttacttcaacacacgatgtattgagaggtttggttgattggctctgttcacagctgaggaatcctacacacccgagctgctctattcctacttctatccattgcctctccactttgctaagagaaccatatgttaggacattatttgttcaagctgatggcatcaagctgctcattcccttaatttccccagcttccacacaacagtcaattcagctcctttatgaaacttgcctctgcatctggcttttatccttttatgatgctgcagttgattatttgtccaccacaagggttatgccaagacttgtagaggttgtcaagggctctactaaagagaaggtggtcagagttgttgtgttgtccttccgcaatttgctggcaaagggtgcatttgctgcccagatgatcgatcttggattgccacaaatggtacaaaacttgaaagctcaagcatggactgatgagatgctctgaatcaactagaggtgggactcaaagaaaacctcaagaagttgagttcctttgataagtacaaacagcaagttcttcttggtcatctggactggtctccaatgcacaaagatccaagtttctggcgtgagaacattaacaattttgaagaaaatgatttccagattctgcgagttctcatgacaatcattgacacatcaagtgacaccaccgctcttgccgtggcctgctacgacctctcacaattccttcagtaccatccatctggccgaatcgtggtggcagacctcaaggctaaggaccgagtcatgaaactcatgaatcatgagaacactgaagtgaggaaaaatgcattgatctgtgtgcagaggctcttccttggcgcaaagtatgccagtttcctgcaggcttgagaaaagctgagtcttgtatttagatccagagaacccctggtcatttttcagaatggctgttgagaaagaaaaaccttgaaaattcttgttcagtgtatcctattgttatttgatttctgaagccgatgtataataaataatcagagtcatagaatgctcgatgtaataaagtgtccatgggcttgttgattcatttatgtaaattttgacttgtaacattagcaaacctcttttttgttattcttctgcctgacaacattgcctgattcgtgtgcattac

SEQ ID NO: 66864 - DNA, 1906 bp, Zea Mays
gttaattgtgctactaggttctgaagcgagatattccatgggagcattacatgtcaactaagcttatctccggaacgtgccttcagcttttacggcgatatgaccacaaaccggagagccagcgagctcctttgcttgaggaggatgggccagcatatatccgagttttcctgaatatcctgcggagcatctccaaggaagagactgtggaatacgtgcttgcactcattgatgaaatgcttgcaacaaatcctaagcgtgcagcactgttttatgatcaatctttgtcgggtgaagatatttatgaaccgttcttaagttaagtgtactatgcttgtttaattctttttatttttattttattaatttaagtaatcaactcatttcgctcttcagcaattagattgacatatattgcccttacacatcctgatggcaagattatatatttagaatagtcaccttctgtacctgatagcctgttttgttttggtaataccctcacaggctcacactagaaagagttcatccgcaccatgctaggccttatttatcttgttctctgaccaccatatagctaacaaaattatagttttcaggttgttatggaaaggcaactggtttgtacaagaaaaaagttgtaagatattgactgttataattagtgcacgaccaaagcttcagaatggcacacttccaaatggagatgcttcgaattcgaagagcaagcttacttcaacacacgatgtattgagaggtttggttgattggctctgttcacagctgaggaatcctacacacccgagctgctctattcctacttctatccattgcctctccactttgctaagagaaccatatgttaggacattatttgttcaagctgatggcatcaagctgctcattcccttaatttccccagcttccacacaacagtcaattcagctcctttatgaaacttgcctctgcatctggcttttatccttttatgatgctgcagttgattatttgtccaccacaagggttatgccaagacttgtagaggttgtcaagggctctactaaagagaaggtggtcagagttgttgtgttgtccttccgcaatttgctggcaaagggtgcatttgctgcccagatgatcgatcttggattgccacaaatggtacaaaacttgaaagctcaagcatggactgatgaggatctgttagatgctctgaatcaactagaggtgggactcaaagaaaacctcaagaagttgagttcctttgataagtacaaacagcaagttcttcttggtcatctggactggtctccaatgcacaaagatccaagtttctggcgtgagaacattaacaattttgaagaaaatgatttccagattctgcgagttctcatgacaatcattgacacatcaagtgacaccaccgctcttgccgtggcctgctacgacctctcacaattccttcagtaccatccatctggccgaatcgtggtggcagacctcaaggctaaggaccgagtcatgaaactcatgaatcatgagaacactgaagtgaggaaaaatgcattgatctgtgtgcagaggctcttccttggcgcaaagtatgccagtttcctgcaggcttgagaaaagctgagtcttgtatttagatccagagaacccctggtcatttttcagaatggctgttgagaaagaaaaaccttgaaaattcttgttcagtgtatcctattgttatttgatttctgaagccgatgtataataaataatcagagtcatagaatgctcgatgtaataaagtgtccatgggcttgttgattcatttatgtaaattttgacttgtaacattagcaaacctcttttttgttattcttctgcctgacaacattgcctgattcgtgtgcattac

SEQ ID NO: 66865 - DNA, 1202 bp, Zea Mays
caactggtttgtacaagaaaaaagttgtaagatattgactgttataattagtgcacgaccaaagcttcagaatggcacacttccaaatggagatgcttcgaattcgaagagcaagcttacttcaacacacgatgtattgagaggtttggttgattggctctgttcacagctgaggaatcctacacacccgagctgctctattcctacttctatccattgcctctccactttgctaagagaaccatatgttaggacattatttgttcaagctgatggcatcaagctgctcattcccttaatttccccagcttccacacaacagtcaattcagctcctttatgaaacttgcctctgcatctggcttttatccttttatgatgctgcagttgattatttgtccaccacaagggttatgccaagacttgtagaggttgtcaagggctctactaaagagaaggtggtcagagttgttgtgttgtccttccgcaatttgctggcaaagggtgcatttgctgcccagatgatcgatcttggattgccacaaatggtacaaaacttgaaagctcaagcatggactgatgaggatctgttagatgctctgaatcaactagaggtgggactcaaagaaaacctcaagaagttgagttcctttgataagtacaaacagcaagttcttcttggtcatctggactggtctccaatgcacaaagatccaagtttctggcgtgagaacattaacaattttgaagaaaatgatttccagtaccatccatctggccgaatcgtggtggcagacctcaaggctaaggaccgagtcatgaaactcatgaatcatgagaacactgaagtgaggaaaaatgcattgatctgtgtgcagaggctcttccttggcgcaaagtatgccagtttcctgcaggcttgagaaaagctgagtcttgtatttagatccagagaacccctggtcatttttcagaatggctgttgagaaagaaaaaccttgaaaattcttgttcagtgtatcctattgttatttgatttctgaagccgatgtataataaataatcagagtcatagaatgctcgatgtaataaagtgtccatgggcttgttgattcatttatgtaaattttgacttgtaacattagcaaacctcttttttgttattcttctgcctgacaacattgcctgattcgtgtgcattac

SEQ ID NO: 66866 - DNA, 1276 bp, Zea Mays
ctggtttgtacaagaaaaaagttgtaagatattgactgttataattagcttcagaatggcacacttccaaatggagatgcttcgaattcgaagagcaagcttacttcaacacacgatgtattgagaggtttggttgattggctctgttcacagctgaggaatcctacacacccgagctgctctattcctacttctatccattgcctctccactttgctaagagaaccatatgttaggacattatttgttcaagctgatggcatcaagctgctcattcccttaatttccccagcttccacacaacagtcaattcagctcctttatgaaacttgcctctgcatctggcttttatccttttatgatgctgcagttgattatttgtccaccacaagggttatgccaagacttgtagaggttgtcaagggctctactaaagagaaggtggtcagagttgttgtgttgtccttccgcaatttgctggcaaagggtgcatttgctgcccagatgatcgatcttggattgccacaaatggtacaaaacttgaaagctcaagcatggactgatgaggatctgttagatgctctgaatcaactagaggtgggactcaaagaaaacctcaagaagttgagttcctttgataagtacaaacagcaagttcttcttggtcatctggactggtctccaatgcacaaagatccaagtttctggcgtgagaacattaacaattttgaagaaaatgatttccagattctgcgagttctcatgacaatcattgacacatcaagtgacaccaccgctcttgccgtggcctgctacgacctctcacaattccttcagtaccatccatctggccgaatcgtggtggcagacctcaaggctaaggaccgagtcatgaaactcatgaatcatgagaacactgaagtgaggaaaaatgcattgatctgtgtgcagaggctcttccttggcgcaaagtatgccagtttcctgcaggcttgagaaaagctgagtcttgtatttagatccagagaacccctggtcatttttcagaatggctgttgagaaagaaaaaccttgaaaattcttgttcagtgtatcctattgttatttgatttctgaagccgatgtataataaataatcagagtcatagaatgctcgatgtaataaagtgtccatgggcttgttgattcatttatgtaaattttgacttgtaacattagcaaacctcttttttgttattcttctgcctgacaacattgcctgattcgtgtgcattac

SEQ ID NO: 66867 - DNA, 1260 bp, Zea Mays
gtttgtacaagaaaaaagttgtaagatattgactgttataattagtgcacgaccaaagcttcagaatggcacacttccaaatggagatgcttcgaattcgaagagcaagcttacttcaacacacgatgtattgagagctgaggaatcctacacacccgagctgctctattcctacttctatccattgcctctccactttgctaagagaaccatatgttaggacattatttgttcaagctgatggcatcaagctgctcattcccttaatttccccagcttccacacaacagtcaattcagctcctttatgaaacttgcctctgcatctggcttttatccttttatgatgctgcagttgattatttgtccaccacaagggttatgccaagacttgtagaggttgtcaagggctctactaaagagaaggtggtcagagttgttgtgttgtccttccgcaatttgctggcaaagggtgcatttgctgcccagatgatcgatcttggattgccacaaatggtacaaaacttgaaagctcaagcatggactgatgaggatctgttagatgctctgaatcaactagaggtgggactcaaagaaaacctcaagaagttgagttcctttgataagtacaaacagcaagttcttcttggtcatctggactggtctccaatgcacaaagatccaagtttctggcgtgagaacattaacaattttgaagaaaatgatttccagattctgcgagttctcatgacaatcattgacacatcaagtgacaccaccgctcttgccgtggcctgctacgacctctcacaattccttcagtaccatccatctggccgaatcgtggtggcagacctcaaggctaaggaccgagtcatgaaactcatgaatcatgagaacactgaagtgaggaaaaatgcattgatctgtgtgcagaggctcttccttggcgcaaagtatgccagtttcctgcaggcttgagaaaagctgagtcttgtatttagatccagagaacccctggtcatttttcagaatggctgttgagaaagaaaaaccttgaaaattcttgttcagtgtatcctattgttatttgatttctgaagccgatgtataataaataatcagagtcatagaatgctcgatgtaataaagtgtccatgggcttgttgattcatttatgtaaattttgacttgtaacattagcaaacctcttttttgttattcttctgcctgacaacattgcctgattcgtgtgcattac

SEQ ID NO: 66868 - DNA, 1214 bp, Zea Mays
gttgtaagatattgactgttataattagtgcacgaccaaagcttcagaatggcacacttccaaatggagatgcttcgaattcgaagagcaagcttacttcaacacacgatgtattgagaggtttggttgattggctctgttcacagctgaggaatcctacacacccgagctgctctattcctacttctatccattgcctctccactttgctaagagaaccatatgttaggacattatttgttcaagctgatggcatcaagctgctcattcccttaatttccccagcttccacacaacagtcaattcagttgattatttgtccaccacaagggttatgccaagacttgtagaggttgtcaagggctctactaaagagaaggtggtcagagttgttgtgttgtccttccgcaatttgctggcaaagggtgcatttgctgcccagatgatcgatcttggattgccacaaatggtacaaaacttgaaagctcaagcatggactgatgaggatctgttagatgctctgaatcaactagaggtgggactcaaagaaaacctcaagaagttgagttcctttgataagtacaaacagcaagttcttcttggtcatctggactggtctccaatgcacaaagatccaagtttctggcgtgagaacattaacaattttgaagaaaatgatttccagattctgcgagttctcatgacaatcattgacacatcaagtgacaccaccgctcttgccgtggcctgctacgacctctcacaattccttcagtaccatccatctggccgaatcgtggtggcagacctcaaggctaaggaccgagtcatgaaactcatgaatcatgagaacactgaagtgaggaaaaatgcattgatctgtgtgcagaggctcttccttggcgcaaagtatgccagtttcctgcaggcttgagaaaagctgagtcttgtatttagatccagagaacccctggtcatttttcagaatggctgttgagaaagaaaaaccttgaaaattcttgttcagtgtatcctattgttatttgatttctgaagccgatgtataataaataatcagagtcatagaatgctcgatgtaataaagtgtccatgggcttgttgattcatttatgtaaattttgacttgtaacattagcaaacctcttttttgttattcttctgcctgacaacattgcctgattcgtgtgcattac

SEQ ID NO: 66869 - DNA, 1615 bp, Zea Mays
gttcataaacatcacatgcactcaagtacaaatcccagcttagcacccagccaacagtcgaatgctagaacctctacatgctgtggaaggaaaggacatgaattagagaaatataaacgaaattgaagaaaaatagtagtataacagattaacaggtgcaggtaaatgagaactttcggtcgttgtcaagccagatgatgcagttttcttaaaactgaagccgtgcacgtccaaaagttccagcaaaactgtccatggaatacacggtaacaggttcggacacagaagcacatgacactggacctctgatcatatgggaggaaatgatcaaatcaaaggaagctaaggttttctaggagtattaattattaaaggatccactgtaatgtcattctaaaaacttgtccggatataataacatttgctctaaaaaagaaaacatgttcctgctttgtaggcctgaatgataaattcatgttgcgcagaggcagagagctatccttggtttcagacagtcaagggcaaaagttctcctatgtttcatgtcaaaactattaaaaaaaccctcaaacttcacaacttaaagtaaaaacataattcagcatgcataactttccatacatctctacccacagcactgcatgcaacaaagatgccatatcacagtgagaatgaaattctaaaaaactaccacatatgatgtgcaacacatacagcagaaatgtgcagcactgatgccttagccaaagaccgaacaggtacaggacgtactattgagaaaaaaaaagttcgatagatgatgcccatcgtataacaataatacaacccaagtggaagattttaattccatgctaacctgaatccaagaggacttcacaatgcatcaacgaggtcaagcatccttgtgctcctccgcagcgtcatggtactcgccttcttcctccggcacggggtgcagcacatcctcagcaccaaccgcggcggacaaaccagcggcctccccaccctcggcagagccgtcatcagggaagcgcaccaccacaacggggcagacacagtggtgcacgcagtagtcgctgacgctgccgagcctgcccttgctggtcctccgcgcggcgccgaagcccttgctccccatgatgacggcgctgagcgagaggcgctcgacctcgaggcagaggcgctccttcatgtcgtggtccctgacgatgtggatcttgtaggggatgccggcgtccttgagcgggctggcgaagtcgtcggccttggtggccgtgaaggcgtcgtagtcgtcctccatcctgcgcgcggcagcggcggtctcgcagtcgccgtcgccgtcctcggaggcggcggtggcgctagggttggggagggagacgtcgacggcgccccagtcggcgccgtagagcacggaggtggggcgcacgtggagcaggatgacggcgtccccggggcggaggtagttggcgacggcccagcgcacggcgtaggcggactcgtcggagaggtcgacggaggagggcgccggcggggcctgcatcgcgggatcttctgcggcgatcgctcttggagcttgcttagcggggtcgaggtcctgtggactggcgagtag

SEQ ID NO: 66870 - DNA, 654 bp, Zea Mays
ctgaatccaagaggacttcacaatgcatcaacgaggtcaagcatccttgtgctcctccgcagcgtcatggtactcgccttcttcctccggcacggggtgcagcacatcctcagcaccaaccgcggcggacaaaccagcggcctccccaccctcggcagagccgtcatcagggaagcgcaccaccacaacggggcagacacagtggtgcacgcagtagtcgctgacgctgccgagcctgcccttgctggtcctccgcgcggcgccgaagcccttgctccccatgatgacggcgctgagcgagaggcgctcgacctcgaggcagaggcgctccttcatgtcgtggtccctgacgatgtggatcttgtaggggatgccggcgtccttgagcgggctggcgaagtcgtcggccttggtggccgtgaaggcgtcgtagtcgtcctccatcctgcgcgcggcagcggcggtctcgcagtcgccgtcgccgtcctcggaggcggcggtggcgctagggttggggagggagacgtcgacggcgccccagtcggcgccgtcgacggaggagggcgccggcggggcctgcatcgcgggatcttctgcggcgatcgctcttggagcttgcttagcggggtcgaggtcctgtggactggcgagtag

SEQ ID NO: 66871 - DNA, 1045 bp, Zea Mays
caagaacacagtaaaggcttccaggcatctgtttctgaacagaaaaaagtctgtggaaccatatcttttaggtttcgaagttaccaaatgaaagagaagctatttatggtgcattggacaagtggagtgcttttgaacctgaatttcctattatagcagcagcaaaagctttggggatgttgaaaaggcgacgacaatggttaagaataatccaggtaaccaagtggttgatgagcaaaggacaggtgctgacatggacaacatatgatacacttctgctcgcacttcttatggataaacgggtagatgaagctgagtcagtttggaacactgtaatacagactcatacccgctcagtgcccaagaggttgttctctcggatgatcttgatctacgacattcaccagcgtccagataaagttttggagatattcgcggatatggaggaattaggtgtgcgtccggacaaggatacagtgagacggatcggaaaggcattcgtggcttccggccaagaagaaaaagagaagcatgtcttggagaaatacttgaagaagtggaagtacatccatttcaacggtgagcgcgttcgcgtgcggagggacggaccattggcgtagtgcccgttttctgaaaaatgctcgaacctatcagagtatcgtgccggtaggcggtagggcaggggcgaagctgttactgccgatgtgacagtcaggcacatggatatcggcactagtccctatcctatgtggaatggaacggaaactggagattggttccatggctctagcctgtggaggagacgagcggatggggggtggctggctactaccggcgagatagtgatttaataggcactacataggcgtccagtgattgtgatggctttaacttgcgtatgtgcctgcggaatggtcccgtgctattttggtgatttgtgcttgtgaaattgtgaacacccactggaaagtgtatatcatgagagggacgatacctgacggctgggcccatgtcttgctgatttcacgcaacgaaccattttctg

SEQ ID NO: 66872 - DNA, 1112 bp, Zea Mays
gtaaaggcttccaggcatctgtttctgaacagaaaaaaggtttcgaagttaccaaatgaaagagaagctatttatggtgcattggacaagtggagtgcttttgaacctgaatttcctattatagcagcagcaaaagctttggggatgttgaaaaggcgacgacaatggttaagaataatccaggtaaccaagtggttgatgagcaaaggacaggtgctgacatggacaacatatgatacacttctgctcgcacttcttatggataaacgggtagatgaagctgagtcagtttggaacactgtaatacagactcatacccgctcagtgcccaagaggttgttctctcggatgatcttgatctacgacattcaccagcgtccagataaagttttggagtcatgtgctgttcaatgttcaaggctaagcagcattcatgtggtcaccgtcaccgtcacccatctagtactgttcatggagcctaaccataagcgacagatattcgcggatatggaggaattaggtgtgcgtccggacaaggatacagtgagacggatcggaaaggcattcgtggcttccggccaagaagaaaaagagaagcatgtcttggagaaatacttgaagaagtggaagtacatccatttcaacggtgagcgcgttcgcgtgcggagggacggaccattggcgtagtgcccgttttctgaaaaatgctcgaacctatcagagtatcgtgccggtaggcggtagggcaggggcgaagctgttactgccgatgtgacagtcaggcacatggatatcggcactagtccctatcctatgtggaatggaacggaaactggagattggttccatggctctagcctgtggaggagacgagcggatggggggtggctggctactaccggcgagatagtgatttaataggcactacataggcgtccagtgattgtgatggctttaacttgcgtatgtgcctgcggaatggtcccgtgctattttggtgatttgtgcttgtgaaattgtgaacacccactggaaagtgtatatcatgagagggacgatacctgacggctgggcccatgtcttgctgatttcacgcaacgaaccattttctg

SEQ ID NO: 66873 - DNA, 997 bp, Zea Mays
atctgtttctgaacagaaaaaaggtttcgaagttaccaaatgaaagagaagctatttatggtgcattggacaagtggagtgcttttgaacctgaatttcctattatagcagcagcaaaagctttggggatgttgaaaaggcgacgacaatggttaagaataatccaggtaaccaagtggttgatgagcaaaggacaggtgctgacatggacaacatatgatacacttctgctcgcacttcttatggataaacgggtagatgaagctgagtcagtttggaacactgtaatacagactcatacccgctcagtgcccaagaggttgttctctcggatgatcttgatctacgacattcaccagcgtccagataaagttttggagatattcgcggatatggaggaattaggtgtgcgtccggacaaggatacagtgagacggatcggaaaggcattcgtggcttccggccaagaagaaaaagagaagcatgtcttggagaaatacttgaagaagtggaagtacatccatttcaacggtgagcgcgttcgcgtgcggagggacggaccattggcgtagtgcccgttttctgaaaaatgctcgaacctatcagagtatcgtgccggtaggcggtagggcaggggcgaagctgttactgccgatgtgacagtcaggcacatggatatcggcactagtccctatcctatgtggaatggaacggaaactggagattggttccatggctctagcctgtggaggagacgagcggatggggggtggctggctactaccggcgagatagtgatttaataggcactacataggcgtccagtgattgtgatggctttaacttgcgtatgtgcctgcggaatggtcccgtgctattttggtgatttgtgcttgtgaaattgtgaacacccactggaaagtgtatatcatgagagggacgatacctgacggctgggcccatgtcttgctgatttcacgcaacgaaccattttctg

SEQ ID NO: 66874 - DNA, 954 bp, Zea Mays
ccgatctgaaccagacgcagccggccggacactcgacacgccgcggtcctgctatatatcagttgatccagacatccacacccgctgcacacaaacgtaacccccgcagcgagttactccaattcgcgccgactgatcgagacctgccgatccgttcgtctcctctcccgtgaccgcgcgcggctatgaagttgttcatgtgcttcggcggtgcggcggcggcggtcgtgatcggcgacgacgaagcggccgcgcccagacaccggggcctgcgccgtggccgccggagcctgtcgttccgggggaagctgaagttcttgcccggtactcacaacaagggcggatgcagcgagaagaaaccgtcggcggcgccaccgctgggccagccaacgaagcggggggcggacgcagacaacgacgacggcgtctacggcgtgtccagggcgtcgtcggtggcgtcctcggcgctgctgagctccgcgtcgtcgtggccgctggactcatcggacacttcgtcgtcgtcgtcgtcgttgtcgcgctcctcgtccgcctcgtcctcgccgtcggtctcggggatgctttctccgccgtcggtaaagctgcggccgaataacaagaggcccgcgtcgtccccgtccccggcggcgggcgccgcggccgtggtgctgtgcctcctcatggtggttatggagcggtgtgacgcggtccctggcctggagtggaaccgcaacaagtgaagccatgatcccgccgtttcgtttttgccccctgctatttttttttaggaatcagtgatccttttttgtttagatggaaaggattagtttttgcagtactcggcagttttgttttgtccaagggttttttgcaattgtattcaatgcccaatgtgaccaaacttattatacgacacaaaaatgctaagatggtatcatctagtatgatactttgttc

SEQ ID NO: 66875 - DNA, 6464 bp, Zea Mays
ctaggatcaaggcgcacatcgcggcctcgcgagcggacgccagccacccagccccgtccgtccgatctggccccttgaccgcttaagctcacctcagatacgattagttacactttttgttccttccgtaatcgtcgccttcgatttgttgctgctgcagctgctggccaggccatactactagagagggacgccctcccttcctctcgcttggcttacacttctccccatcccccaacacaaacccaacacaactccgccgtgtcgcctacacgcactggccacgaccaaaccctaggcgccgccgcccccggggcccccagggctgtcgtagggaggagaaggaggaggagatcggtgaggagagaaggggatttatgtcccagcgaggggacaggggcgaggggcacgccaggagacccggccggtccagcagcttcggcggccaccgcggaggcggagtcggtggcgcgggcaagggcggcgcgggctcctcaggccagcctcctctctcatccaaccgcagctttagaaagcctggcaatggccacggcgggcaccagagggtggtgaaccagcccgacaccactggcttccagcctgcaccagcgcctggcacccaccaaactcctgcgcgcccgccacctgcgcctcagaatgcagccgtgcatgttcctgtctccgcatcacggccacaacaccaggatccacatgtgtcatcttcattgtctgccagcgagaaaccggctaatccgccgttaccactaccgaaagctacacatgctgctccaagggctctaccaaaaaactctaacacagcgcttcctcagggaggatcgcaaggagaaccatcaaaggggtttaactttcagtttggtagtataaatatgaatgggctaccgcaatttcctgccaggacaagctcagctcctccaaatttggatgaacaaaaacgtaatcaggcacttgtggaggaacttaaggttacacctgcccctgtgcaaccagctctgaaacagcagcagttgcagcagcagccacagctgccgccacagctgccgccgcagcaggttccccagcagccacagcagcagtcagcaagaaaggaagctgttggttccagccaacataactccatcaatccccatattacatcgcaattgaaaagagatgtgcacccatctccatctgtccctaatgttacatctcttagacctaccgttcaaattcctggtgttcagatgccgatccccttccatcaccagccggcacaagtttccttgcagtttggtggtcatggggcacaactgcagcctcaagtcgtgcctagctcatatcaaatgtcaatgggattgacaggcagtagtacacaagtcccacagcagctgtatgcccctactctgcagcatcatcaattgcaacagcaagcaatgatgcatcctggccagggtatgggttatgttccttccgttgctcaccaattcccacagttgggaaacattcctatgaacatcgcatcacaatatgctcagcaacagccaaacacgcatgctgctgcacgtaagactactgtaaaaattactcatccagacactcatgaagagttgaagctcgataagaggatggactcttctgggcagagagctgcaccgagcttgacacaacaatcccagcccgttggtaattatgctcctcatattggcttctttcatcagccacagagttcctacaatcagtcaggaatgtattaccctactacagctggtgtgaaccaggttgctactggatcttcaggtcctagatataattatcctgtcactcagtctgggcaagcgatgacatatatcagtccatctgcagtgcctccggtatctgctcagtcccaatatacagttaaaccgcaccctattgggttggtgactgaaaaatctagtactcatgtcacaataagtgctccaccagctaaatctgagcctcctaagttacgtgctgctgaggattctgcgtcaagtcggcaaaaggataatgaaattgtttctgggatcgctgtttctagtaaatcaatccttgagaaggaggagagtaacgatcctttagtcacagtgaagcattcgactgtaataagcccgtccttgccaattcatggtgcaaaatcacaaacttcagtgacatcatctcctgttgtgaattcagtctcacctgtggcaggagttgatggaaaaagcatagaatctattcaaaggactggatcatttaatgataacaagaaaattgtcactaaaaaggatgtcaggatttcatctgaaccaccgaattcagcttcatctgttgaagataaggtgcaaactgtaaaggctggaggcagtgatcaccaggaaactaacaacctgaacaatgagttggatttggccagctcatcttcatgctcaacggttccactggcagtaagtaggatctttccagggaccgtttcagtgaatgctaacagcacagcagtaactgctgctgatgttcctgggacagatagaagctcaagaagaccatctcccgagggtactggtgagcctgcagtagaaagcttcactgttttggctgttgaatgtgacaaaaggaagcggactgatgaagttgcgacagatcctagcaaggataatatttcttctgatgctaccaaacatgaattgcctgatgcatgtgcagtggaccctactgaacaggcatcagcagtgacttctaatactgatgattcatatgcatcccctatagtaaataatcaggagcagttgctgaaagagtctgctccatctgcttctgaggaacaagctatgatgaataacttttccaagaattctgagacttcacattttcttgatagcaatgctgtggaagtgagaactggaacttcagagcctactgttcaaagttccaatgacgaaggtgactcggatattagtccagaaacagacctagctgtttgcaatgttcctctagtttcatctgagggacaactgaaatctgagagtagggctgatgatcaacaggctgctgaaccaacagtttcagttcgatcagtatccagggaaaagcctagtgttgagatcgccaggtcaaagtccgcagctgggaagaggaagaagaaaaaggaaatgcttgctaaggctgatgctgctgggtcttcagatctttataatgcatacaagggaccagaagagaagtctgaaatggttggtactgcagatggtgctgatagttcttcaatagttgacacaacacatgtgctgcttgatgaagcagaaagggatgttagtacgtttgcagatgattgtaagaaaaaagttgagcttgatgattgggaagatgctgcagacatgtctactccaaagctggcaccagattctggaaatcaggctggcaccacccaagtgctagattcagatacaagtgaagcaaacagcaggaagaaatattcacgggattttctgttgaccttgcaacaccactgtactggtcttcctgttggatttcagatgaatgaagctgtcaatgcaataatgaataatttggttggaaagtcttatgttgttgaccgggaaccttaccctagtcctggaaggggtttggaccgcccaacttctcgtggtgaccgccgtggtgctgccatgactgacgacaggtggactaagacgggtgttcctctcagtcctggtcgtgatgttcacatggacctgccaaatggaacatcagttgtcaactaccgtagctcaggaggtaatcatggtgttttaaggaatccacgtggccaaccatcaaatcaatatggtggtggtcttcttgcaggacctgtgcattctgttgggcctcaagtacctcgcagcggctctgattctgatagatggcagcaaaagggtctcatgccttcccctgtcacacccatgcaaacaatgcacaaagcagagaggaagtatgttgttgggaaagtttctgatgaggaggaggcgaaacagaggcagttgaaaggcattcttaacaagctgactccacaaaactttgaaaaactgtttgaacaagttaaggaagtcaacattgacagtgtagcaactcttactggggtcatttcacagatatttgacaaagctttgatggaaccaactttttgtgaaatgtatgctaatttttgcttccatctggctggtgccttgcctgacttcagtgaagacaatgaaaagatcacattcaaaagattgcttttgaataaatgccaagaggagtttgagagaggtgaaagggaagaagctgaagctgataaaacagaagaggaaggtgagatcaaacagaccaaagaagaaagagaggaaaagagaatccgtgctcgaaggcgcatgctgggaaacattaggttaatcggagagttgttcaaaaagaaaatgttgacagaaaggattatgcatgagtgcattaaaaaattgtttggaaattgtgatgatcccgatgaggagaacattgaagcactatgcaaattgatgagtacaattggtgagatgattgatcgtgcaaaggcaaaggagcacatggatgcatattttggtatgatgcataagatgtcaacaagtcagaagttgtcttctcgtgtaaggtttatgttgagagattcaattgacctcaggagaaataaatggcaacagaggcgtaaagttgaaggccccaagaagattgaggaggtgcacagagatgcagctcaagaaagacatgctcagtcaagtaggctaggacgtggtccagctgttagttctgtttcaagaagaggagcaccttctatggattatggctctcgtggctcatctgcgttagcatcctcaagttcccaacaagggagcattcgtggaatgcctccacactcgcgtggttcacaagacatccgatatgaggagaggaaccagtttgacaatagaactgttcttccccagcgtgtagtcaaggatgaagctatcactcttgggccacaaggtggccttgctaggggtatgtctataagagggctgtcaccagcatcaaatactgaacttccttctgttattgaccaccggagaatattatctggttctaatggttataactctgtgactgattggacatcatcatctggaagagaagattctagctcaataattccagatcgaacctctggccgaacttctgcttctagtcaatctgctggaccttcacagaggcctgccagccaggaaggccgtccaggaagtaaatcatattctgaggatgaattgagagaaaaatctgttttggccattcgggaatattacagtgcaaaagatgaaaaggaggttgctttgtgtattgaggagctgaatgctccgagtttctatccttctgttgtatcactttgggtaaatgattccttcgagagaaaagacatggaaagagagttgttggctaaacttctcgtcagcctttgcagtggtcgacataatttgttgagcaagcaacaactcagtgatggcctttcatctgttcttaccttattggaagatactctaagtgatgctccaagggccaccgagtaccttggacgactttttgcaaggtttgtggaggaaagcatattgctcttggaagagacaaaggggattcattcttgaatgaggttaagtcaacttcgagtttaaaattggttgatttcagaccacatcatcttaagcgatcaaagttggatgccttcatgtagctacatgagttattattacctgattcaccaatgggtgcggccgccaagcagtttactttgttcgcacgcaaatacccatcggcctttttgatgtactgtgaaaaattcctctgatgctactcctacttgctgtacctgatcgtgcactatttataagatggaaggcgatgggtcacccattttttcagagttgatgctggttgtaaactactgtcaatgaagggtcatgggtgggaagcagctagctaggcccccataagaggatcagggaatatttttgcgatcacagggagaagtctgctaaccaatattagttggtagttgggggaactgtaggttgaacttaatgcctcctgcgggcttctgaccaaatactcctttgtgatcagaattggtagtcggttaacttagcggcattttcgtgatagccaatgtttctcgtgatggtctgaatatgttgatgttgcttaaattttgctgtaatttgctatttttcctcgttctttgtttttgtacttattgagaattgatgcctcggattctctgatgtatgtatgattgggctcaggctcagggcactttgccatccctattttgtcatttcggttcttccttagcgtggaacgtaatgagtgtgagaaagtaaaattggtgaaagtgaaaatgggaactgagagcactttttttattgcattctcatacaagtgaaaagtcacatgcgaag

SEQ ID NO: 66876 - DNA, 6510 bp, Zea Mays
cacatcgcggcctcgcgagcggacgccagccacccagccccgtccgtccgatctggccccttgaccgcttaagctcacctcagatacgattagttacactttttgttccttccgtaatcgtcgccttcgatttgttgctgctgcagctgctggccaggccatactactagagagggacgccctcccttcctctcgcttggcttacacttctccccatcccccaacacaaacccaacacaactccgccgtgtcgcctacacgcactggccacgaccaaaccctaggcgccgccgcccccggggcccccagggaggagaaggaggaggagatcggtgaggagagaaggggatttatgtcccagcgaggggacaggggcgaggggcacgccaggagacccggccggtccagcagcttcggcggccaccgcggaggcggagtcggtggcgcgggcaagggcggcgcgggctcctcaggccagcctcctctctcatccaaccgcagctttagaaagcctggcaatggccacggcgggcaccagagggtggtgaaccagcccgacaccactggcttccagcctgcaccagcgcctggcacccaccaaactcctgcgcgcccgccacctgcgcctcagaatgcagccgtgcatgttcctgtctccgcatcacggccacaacaccaggatccacatgtgtcatcttcattgtctgccagcgagaaaccggctaatccgccgttaccactaccgaaagctacacatgctgctccaagggctctaccaaaaaactctaacacagcgcttcctcagggaggatcgcaaggagaaccatcaaaggggtttaactttcagtttggtagtataaatatgaatgggctaccgcaatttcctgccaggacaagctcagctcctccaaatttggatgaacaaaaacgtaatcaggcacttgtggaggaacttaaggttacacctgcccctgtgcaaccagctctgaaacagcagcagttgcagcagcagccacagctgccgccacagctgccgccgcagcaggttccccagcagccacagcagcagtcagcaagaaaggaagctgttggttccagccaacataactccatcaatccccatattacatcgcaattgaaaagagatgtgcacccatctccatctgtccctaatgttacatctcttagacctaccgttcaaattcctggtgttcagatgccgatccccttccatcaccagccggcacaagtttccttgcagtttggtggtcatggggcacaactgcagcctcaagtcgtgcctagctcatatcaaatgtcaatgggattgacaggcagtagtacacaagtcccacagcagctgtatgcccctactctgcagcatcatcaattgcaacagcaagcaatgatgcatcctggccagggtatgggttatgttccttccgttgctcaccaattcccacagttgggaaacattcctatgaacatcgcatcacaatatgctcagcaacagccaaacacgcatgctgctgcacgtaagactactgtaaaaattactcatccagacactcatgaagagttgaagctcgataagaggatggactcttctgggcagagagctgcaccgagcttgacacaacaatcccagcccgttggtaattatgctcctcatattggcttctttcatcagccacagagttcctacaatcagtcaggaatgtattaccctactacagctggtgtgaaccaggttgctactggatcttcaggtcctagatataattatcctgtcactcagtctgggcaagcgatgacatatatcagtccatctgcagtgcctccggtatctgctcagtcccaatatacagttaaaccgcaccctattgggttggtgactgaaaaatctagtactcatgtcacaataagtgctccaccagctaaatctgagcctcctaagttacgtgctgctgaggattctgcgtcaagtcggcaaaaggataatgaaattgtttctgggatcgctgtttctagtaaatcaatccttgagaaggaggagagtaacgatcctttagtcacagtgaagcattcgactgtaataagcccgtccttgccaattcatggtgcaaaatcacaaacttcagtgacatcatctcctgttgtgaattcagtctcacctgtggcaggagttgatggaaaaagcatagaatctattcaaaggactggatcatttaatgataacaagaaaattgtcactaaaaaggatgtcaggatttcatctgaaccaccgaattcagcttcatctgttgaagataaggtgcaaactgtaaaggctggaggcagtgatcaccaggaaactaacaacctgaacaatgagttggatttggccagctcatcttcatgctcaacggttccactggcagtaagtaggatctttccagggaccgtttcagtgaatgctaacagcacagcagtaactggtgagatcttgaaacttttagaattgtacagggatgcctcttatttttttctaactcatttacgttggcagctgctgatgttcctgggacagatagaagctcaagaagaccatctcccgagggtactggtgagcctgcagtagaaagcttcactgttttggctgttgaatgtgacaaaaggaagcggactgatgaagttgcgacagatcctagcaaggataatatttcttctgatgctaccaaacatgaattgcctgatgcatgtgcagtggaccctactgaacaggcatcagcagtgacttctaatactgatgattcatatgcatcccctatagtaaataatcaggagcagttgctgaaagagtctgctccatctgcttctgaggaacaagctatgatgaataacttttccaagaattctgagacttcacattttcttgatagcaatgctgtggaagtgagaactggaacttcagagcctactgttcaaagttccaatgacgaaggtgactcggatattagtccagaaacagacctagctgtttgcaatgttcctctagtttcatctgagggacaactgaaatctgagagtagggctgatgatcaacaggctgctgaaccaacagtttcagttcgatcagtatccagggaaaagcctagtgttgagatcgccaggtcaaagtccgcagctgggaagaggaagaagaaaaaggaaatgcttgctaaggctgatgctgctgggtcttcagatctttataatgcatacaagggaccagaagagaagtctgaaatggttggtactgcagatggtgctgatagttcttcaatagttgacacaacacatgtgctgcttgatgaagcagaaagggatgttagtacgtttgcagatgattgtaagaaaaaagttgagcttgatgattgggaagatgctgcagacatgtctactccaaagctggcaccagattctggaaatcaggctggcaccacccaagtgctagattcagatacaagtgaagcaaacagcaggaagaaatattcacgggattttctgttgaccttgcaacaccactgtactggtcttcctgttggatttcagatgaatgaagctgtcaatgcaataatgaataatttggttggaaagtcttatgttgttgaccgggaaccttaccctagtcctggaaggggtttggaccgcccaacttctcgtggtgaccgccgtggtgctgccatgactgacgacaggtggactaagacgggtgttcctctcagtcctggtcgtgatgttcacatggacctgccaaatggaacatcagttgtcaactaccgtagctcaggaggtaatcatggtgttttaaggaatccacgtggccaaccatcaaatcaatatggtggtggtcttcttgcaggacctgtgcattctgttgggcctcaagtacctcgcagcggctctgattctgatagatggcagcaaaagggtctcatgccttcccctgtcacacccatgcaaacaatgcacaaagcagagaggaagtatgttgttgggaaagtttctgatgaggaggaggcgaaacagaggcagttgaaaggcattcttaacaagctgactccacaaaactttgaaaaactgtttgaacaagttaaggaagtcaacattgacagtgtagcaactcttactggggtcatttcacagatatttgacaaagctttgatggaaccaactttttgtgaaatgtatgctaatttttgcttccatctggctggtgccttgcctgacttcagtgaagacaatgaaaagatcacattcaaaagattgcttttgaataaatgccaagaggagtttgagagaggtgaaagggaagaagctgaagctgataaaacagaagaggaaggtgagatcaaacagaccaaagaagaaagagaggaaaagagaatccgtgctcgaaggcgcatgctgggaaacattaggttaatcggagagttgttcaaaaagaaaatgttgacagaaaggattatgcatgagtgcattaaaaaattgtttggaaattgtgatgatcccgatgaggagaacattgaagcactatgcaaattgatgagtacaattggtgagatgattgatcgtgcaaaggcaaaggagcacatggatgcatattttggtatgatgcataagatgtcaacaagtcagaagttgtcttctcgtgtaaggtttatgttgagagattcaattgacctcaggagaaataaatggcaacagaggcgtaaagttgaaggccccaagaagattgaggaggtgcacagagatgcagctcaagaaagacatgctcagtcaagtaggctaggacgtggtccagctgttagttctgtttcaagaagaggagcaccttctatggattatggctctcgtggctcatctgcgttagcatcctcaagttcccaacaagggagcattcgtggaatgcctccacactcgcgtggttcacaagacatccgatatgaggagaggaaccagtttgacaatagaactgttcttccccagcgtgtagtcaaggatgaagctatcactcttgggccacaaggtggccttgctaggggtatgtctataagagggctgtcaccagcatcaaatactgaacttccttctgttattgaccaccggagaatattatctggttctaatggttataactctgtgactgattggacatcatcatctggaagagaagattctagctcaataattccagatcgaacctctggccgaacttctgcttctagtcaatctgctggaccttcacagaggcctgccagccaggaaggccgtccaggaagtaaatcatattctgaggatgaattgagagaaaaatctgttttggccattcgggaatattacagtgcaaaagatgaaaaggaggttgctttgtgtattgaggagctgaatgctccgagtttctatccttctgttgtatcactttgggtaaatgattccttcgagagaaaagacatggaaagagagttgttggctaaacttctcgtcagcctttgcagtggtcgacataatttgttgagcaagcaacaactcagtgatggcctttcatctgttcttaccttattggaagatactctaagtgatgctccaagggccaccgagtaccttggacgactttttgcaaggtttgtggaggaaagcatattgctcttggaagagacaaaggggattcattcttgaatgaggttaagtcaacttcgagtttaaaattggttgatttcagaccacatcatcttaagcgatcaaagttggatgccttcatgtagctacatgagttattattacctgattcaccaatgggtgcggccgccaagcagtttactttgttcgcacgcaaatacccatcggcctttttgatgtactgtgaaaaattcctctgatgctactcctacttgctgtacctgatcgtgcactatttataagatggaaggcgatgggtcacccattttttcagagttgatgctggttgtaaactactgtcaatgaagggtcatgggtgggaagcagctagctaggcccccataagaggatcagggaatatttttgcgatcacagggagaagtctgctaaccaatattagttggtagttgggggaactgtaggttgaacttaatgcctcctgcgggcttctgaccaaatactcctttgtgatcagaattggtagtcggttaacttagcggcattttcgtgatagccaatgtttctcgtgatggtctgaatatgttgatgttgcttaaattttgctgtaatttgctatttttcctcgttctttgtttttgtacttattgagaattgatgcctcggattctctgatgtatgtatgattgggctcaggctcagggcactttgccatccctattttgtcatttcggttcttccttagcgtggaacgtaatgagtgtgagaaagtaaaattggtgaaagtgaaaatgggaactgagagcactttttttattgcattctcatacaagtgaaaagtcacatgcgaag

SEQ ID NO: 66877 - DNA, 1966 bp, Zea Mays
cccatatatatggtgcggagcatcggcgcagcccctttctccgccccccaccgcgcaccgcccgaccagcgacgggaacccacgccgccccctctccgccccgtgcagtcgctccccagctcccgcgccgccgttccctgctaaccccatccccttcgcctcgcctcgtgctaagagagcgcggaccactgcggtgccacgccgacgccttctgccggccccaggtggattctgtccgcagactcctggaggtgctgctatctagccccttgatctgagctgaaattaggagctgaacctgccgggcgagccgatgtacggctcgccggtgtccaaggacctcaacctcccggtgcagccgcccatggcctcgtccgggctgctgagcagcagcagcagatgatgttccactcccagcagcagcaggagatggtgagcgccaagtccggcctttaccgcaccgtgaactcaggcgtagaaaccgcggccgctgctggtgccggcggggccagctccagtgacaacgctagcaacctgattcgacagagcagctcccccgccggattcctcgatcatttgaacatggagaacggatacggggccatgctgagggcgggcatggccacggcggactccctcgcaggcggcggcagcaggctaaaagggcaactgagcttctcgtcacggcaggggtcattgatgtcccagatctcagagatggacagcgaggaggtcggagggagcagcccagaggcttccggcggcggcggcagggggtacatccctgggtacccaatgggctctgggtgggaggactcgtcggctctcttgtcagacaatttgtctggcgtcaaacgcccccgggactcgtcggagcctggccagagcggccttacgcaccagttcagcgtgcccaagacgtcgtccgagatggcaactattgagaaattcctccagttccaggacgccgtgccttgtaagatccgtgccaagcgggggtgcgccactcatccacgcagcatcgctgagagggtgaggagaacaaagatcagtgagcgaatccgaaagctgcaagaactcgttccaaatatggacaagcaaaccaacacatctgacatgctggatttggctgtcgactacatcaaggatctccagaagcaggttaaggtactaaaggagagccaagataactgcacctgctcagcaagcaagaaccagcagcactcctgctgaaaccgtaatgctcactgtacatgaatgacctcgaaagcatgtccactcgggaaagaaaaagatgcagtgtagcttttgtatgagcgaagggggatgaagcaatggcatcatcaagcattcaagtgattgggagaagggtaaaaaaagtggggagagatatatatacaggagaaacaactgtatagtttggctgtagctttgctatatatacacacacgcactaccctttcggtagaaagtggttaatttacctctgtttactagtagcaccagctgtaaatgtgccgcagataaacagtggagaagcttggaggtgttcagtgcgagcgatagtgtttcaactctatgaacatatcatcgttgggttaatgggcatcatctactggggtctggggatagccctgcttcctctcggacctcaggcctgaagcttgtatgttgttcagctatctgacattctgactatatcgatgcttaacatagctctagtgcgacaccaagagaacattcaggctctggacatggcatttatattgttccatcgccttggtcttaggctatggccagcggattgtgatatgaccaaaacattatttatagagtggagtttgaaacgagagatgtggatgagtaaactacttgggtatcttcgccgctgctagatgtggtagagcctcacagaatccgttcgcacacatgcactatgttttgcccctgaagaagctatttgcac

SEQ ID NO: 66878 - DNA, 2218 bp, Zea Mays
ctccgccccccaccgcgcaccgcccgaccagcgacgggaacccacgccgccccctctccgccccgtgcagtcgctccccagctcccgcgccgccgttccctgctaaccccatccccttcgcctcgcctcgtgctaagagagcgcggaccactgcggtgccacgccgacgccttctgccggccccaggtggattctgtccgcagactcctggaggtgctgctatctagccccttgatctgagctgaaattaggagctgaacctgccgggcgagccgatgtacggctcgccggtgtccaaggacctcaacctcccggtgcagccgcccatggcctcgtccgggctgctgaggtacagatcggcgcccagcacggtgctcggcgacctgtgcgaggacttcctctcttccgcgccccgcgccgccagccctgacgccggcgccgacaacgtcttctccaggttccttgctgaccaccacatccgggacgacaagccgtcgccgcttgcctccgccgccgtccacttcccgactgaaaccgacacggcctcccagcagcagcagcagcagatgatgttccactcccagcagcagcaggagatggtgagcgccaagtccggcctttaccgcaccgtgaactcaggcgtagaaaccgcggccgctgctggtgccggcggggccagctccagtgacaacgctagcaacctgattcgacagagcagctcccccgccggattcctcgatcatttgaacatggagaacggatacggggccatgctgagggcgggcatggccacggcggactccctcgcaggcggcggcagcaggctaaaagggcaactgagcttctcgtcacggcaggggtcattgatgtcccagatctcagagatggacagcgaggaggtcggagggagcagcccagaggcttccggcggcggcggcagggggtacatccctgggtacccaatgggctctgggtgggaggactcgtcggctctcttgtcagacaatttgtctggcgtcaaacgcccccgggactcgtcggagcctggccagagcggccttacgcaccagttcagcgtgcccaagacgtcgtccgagatggcaactattgagaaattcctccagttccaggacgccgtgccttgtaagatccgtgccaagcgggggtgcgccactcatccacgcagcatcgctgagagggtgaggagaacaaagatcagtgagcgaatccgaaagctgcaagaactcgttccaaatatggacaaggtactccacattctcaaaccaacacatctgacatgctggatttggctgtcgactacatcaaggatctccagaagcaggttaaggtactaaaggagagccaagataactgcacctgctcagcaagcaagaaccagcagcactcctgctgaaaccgtaatgctcactgtacatgaatgacctcgaaagcatgtccactcgggaaagaaaaagatgtaagacagctctcatgcatgttgtttcatgaggttttgaactgcagcagttgagaggctttatctaccaggcagtgtagcttttgtatgagcgaagggggatgaagcaatggcatcatcaagcattcaagtgattgggagaagggtaaaaaaagtggggagagatatatatacaggagaaacaactgtatagtttggctgtagctttgctatatatacacacacgcactaccctttcggtagaaagtggttaatttacctctgtttactagtagcaccagctgtaaatgtgccgcagataaacagtggagaagcttggaggtgttcagtgcgagcgatagtgtttcaactctatgaacatatcatcgttgggttaatgggcatcatctactggggtctggggatagccctgcttcctctcggacctcaggcctgaagcttgtatgttgttcagctatctgacattctgactatatcgatgcttaacatagctctagtgcgacaccaagagaacattcaggctctggacatggcatttatattgttccatcgccttggtcttaggctatggccagcggattgtgatatgaccaaaacattatttatagagtggagtttgaaacgagagatgtggatgagtaaactacttgggtatcttcgccgctgctagatgtggtagagcctcacagaatccgttcgcacacatgcactatgttttgcccctgaagaagctatttgcac

SEQ ID NO: 66879 - DNA, 1852 bp, Zea Mays
ccaccgcgcaccgcccgaccagcgacgggaacccacgccgccccctctccgccccgtgcagtcgctccccagctcccgcgccgccgttccctgctaaccccatccccttcgcctcgcctcgtgctaagagagcgcggaccactgcggtgccacgccgacgccttctgccggccccaggtggattctgtccgcagactcctggaggtgctgctatctagccccttgatctgagctgaaattaggagctgaacctgccgggcgagccgatgtacggctcgccggtgtccaaggacctcaacctcccggtgcagccgcccatggcctcgtccgggctgctgaggttccttgctgaccaccacatccgggacgacaagccgtcgccgcttgcctccgccgccgtccacttcccgactgaaaccgacacggcctcccagcagcagcagcagcagatgatgttccactcccagcagcagcaggagatggatacggggccatgctgagggcgggcatggccacggcggactccctcgcaggcggcggcagcaggctaaaagggcaactgagcttctcgtcacggcaggggtcattgatgtcccagatctcagagatggacagcgaggaggtcggagggagcagcccagaggcttccggcggcggcggcagggggtacatccctgggtacccaatgggctctgggtgggaggactcgtcggctctcttgtcagacaatttgtctggcgtcaaacgcccccgggactcgtcggagcctggccagagcggccttacgcaccagttcagcgtgcccaagacgtcgtccgagatggcaactattgagaaattcctccagttccaggacgccgtgccttgtaagatccgtgccaagcgggggtgcgccactcatccacgcagcatcgctgagagggtgaggagaacaaagatcagtgagcgaatccgaaagctgcaagaactcgttccaaatatggacaagcaaaccaacacatctgacatgctggatttggctgtcgactacatcaaggatctccagaagcaggttaaggtactaaaggagagccaagataactgcacctgctcagcaagcaagaaccagcagcactcctgctgaaaccgtaatgctcactgtacatgaatgacctcgaaagcatgtccactcgggaaagaaaaagattgtagcttttgtatgagcgaagggggatgaagcaatggcatcatcaagcattcaagtgattgggagaagggtaaaaaaagtggggagagatatatatacaggagaaacaactgtatagtttggctgtagctttgctatatatacacacacgcactaccctttcggtagaaagtggttaatttacctctgtttactagtagcaccagctgtaaatgtgccgcagataaacagtggagaagcttggaggtgttcagtgcgagcgatagtgtttcaactctatgaacatatcatcgttgggttaatgggcatcatctactggggtctggggatagccctgcttcctctcggacctcaggcctgaagcttgtatgttgttcagctatctgacattctgactatatcgatgcttaacatagctctagtgcgacaccaagagaacattcaggctctggacatggcatttatattgttccatcgccttggtcttaggctatggccagcggattgtgatatgaccaaaacattatttatagagtggagtttgaaacgagagatgtggatgagtaaactacttgggtatcttcgccgctgctagatgtggtagagcctcacagaatccgttcgcacacatgcactatgttttgcccctgaagaagctatttgcac

SEQ ID NO: 66880 - DNA, 1920 bp, Zea Mays
accgcgcaccgcccgaccagcgacgggaacccacgccgccccctctccgccccgtgcagtcgctccccagctcccgcgccgccgttccctgctaaccccatccccttcgcctcgcctcgtgctaagagagcgcggaccactgcggtgccacgccgacgccttctgccggccccaggtggattctgtccgcagactcctggaggtgctgctatctagccccttgatctgagctgaaattaggagctgaacctgccgggcgagccgatgtacggctcgccggtgtccaaggacctcaacctcccggtgcagccgcccatggcctcgtccgggctgctgagcagcagcagcagcagatgatgttccactcccagcagcagcaggagatggtgagcgccaagtccggcctttaccgcaccgtgaactcaggcgtagaaaccgcggccgctgctggtgccggcggggccagctccagtgacaacgctagcaacctgattcgacagagcagctcccccgccggattcctcgatcatttgaacatggagaacggatacggggccatgctgagggcgggcatggccacggcggactccctcgcaggcggcggcagcaggctaaaagggcaactgagcttctcgtcacggcaggggtcattgatgtcccagatctcagagatggacagcgaggaggtcggagggagcagcccagaggcttccggcggcggcggcagggggtacatccctgggtacccaatgggctctgggtgggaggactcgtcggctctcttgtcagacaatttgtctggcgtcaaacgcccccgggactcgtcggagcctggccagagcggccttacgcaccagttcagcgtgcccaagacgtcgtccgagatggcaactattgagaaattcctccagttccaggacgccgtgccttgtaagatccgtgccaagcgggggtgcgccactcatccacgcagcatcgctgagagggtgaggagaacaaagatcagtgagcgaatccgaaagctgcaagaactcgttccaaatatggacaagcaaaccaacacatctgacatgctggatttggctgtcgactacatcaaggatctccagaagcaggttaaggtactaaaggagagccaagataactgcacctgctcagcaagcaagaaccagcagcactcctgctgaaaccgtaatgctcactgtacatgaatgacctcgaaagcatgtccactcgggaaagaaaaagatgcagtgtagcttttgtatgagcgaagggggatgaagcaatggcatcatcaagcattcaagtgattgggagaagggtaaaaaaagtggggagagatatatatacaggagaaacaactgtatagtttggctgtagctttgctatatatacacacacgcactaccctttcggtagaaagtggttaatttacctctgtttactagtagcaccagctgtaaatgtgccgcagataaacagtggagaagcttggaggtgttcagtgcgagcgatagtgtttcaactctatgaacatatcatcgttgggttaatgggcatcatctactggggtctggggatagccctgcttcctctcggacctcaggcctgaagcttgtatgttgttcagctatctgacattctgactatatcgatgcttaacatagctctagtgcgacaccaagagaacattcaggctctggacatggcatttatattgttccatcgccttggtcttaggctatggccagcggattgtgatatgaccaaaacattatttatagagtggagtttgaaacgagagatgtggatgagtaaactacttgggtatcttcgccgctgctagatgtggtagagcctcacagaatccgttcgcacacatgcactatgttttgcccctgaagaagctatttgcac

SEQ ID NO: 66881 - DNA, 2127 bp, Zea Mays
accgcgcaccgcccgaccagcgacgggaacccacgccgccccctctccgccccgtgcagtcgctccccagctcccgcgccgccgttccctgctaaccccatccccttcgcctcgcctcgtgctaagagagcgcggaccactgcggtgccacgccgacgccttctgccggccccaggtggattctgtccgcagactcctggaggtgctgctatctagccccttgatctgagctgaaattaggagctgaacctgccgggcgagccgatgtacggctcgccggtgtccaaggacctcaacctcccggtgcagccgcccatggcctcgtccgggctgctgaggtacagatcggcgcccagcacggtgctcggcgacctgtgcgaggacttcctctcttccgcgccccgcgccgccagccctgacgccggcgccgacaacgtcttctccaggttccttgctgaccaccacatccgggacgacaagccgtcgccgcttgcctccgccgccgtccacttcccgactgaaaccgacacggcctcccagcagcagcagcagcagatgatgttccactcccagcagcagcaggagatggtgagcgccaagtccggcctttaccgcaccgtgaactcaggcgtagaaaccgcggccgctgctggtgccggcggggccagctccagtgacaacgctagcaacctgattcgacagagcagctcccccgccggattcctcgatcatttgaacatggagaacggatacggggccatgctgagggcgggcatggccacggcggactccctcgcaggcggcggcagcaggctaaaagggcaactgagcttctcgtcacggcaggggtcattgatgtcccagatctcagagatggacagcgaggaggtcggagggagcagcccagaggcttccggcggcggcggcagggggtacatccctgggtacccaatgggctctgggtgggaggactcgtcggctctcttgtcagacaatttgtctggcgtcaaacgcccccgggactcgtcggagcctggccagtgcagagcggccttacgcaccagttcagcgtgcccaagacgtcgtccgagatggcaactattgagaaattcctccagttccaggacgccgtgccttgtaagatccgtgccaagcgggggtgcgccactcatccacgcagcatcgctgagagggtgaggagaacaaagatcagtgagcgaatccgaaagctgcaagaactcgttccaaatatggacaagcaaaccaacacatctgacatgctggatttggctgtcgactacatcaaggatctccagaagcaggttaaggtactaaaggagagccaagataactgcacctgctcagcaagcaagaaccagcagcactcctgctgaaaccgtaatgctcactgtacatgaatgacctcgaaagcatgtccactcgggaaagaaaaagatgcagtgtagcttttgtatgagcgaagggggatgaagcaatggcatcatcaagcattcaagtgattgggagaagggtaaaaaaagtggggagagatatatatacaggagaaacaactgtatagtttggctgtagctttgctatatatacacacacgcactaccctttcggtagaaagtggttaatttacctctgtttactagtagcaccagctgtaaatgtgccgcagataaacagtggagaagcttggaggtgttcagtgcgagcgatagtgtttcaactctatgaacatatcatcgttgggttaatgggcatcatctactggggtctggggatagccctgcttcctctcggacctcaggcctgaagcttgtatgttgttcagctatctgacattctgactatatcgatgcttaacatagctctagtgcgacaccaagagaacattcaggctctggacatggcatttatattgttccatcgccttggtcttaggctatggccagcggattgtgatatgaccaaaacattatttatagagtggagtttgaaacgagagatgtggatgagtaaactacttgggtatcttcgccgctgctagatgtggtagagcctcacagaatccgttcgcacacatgcactatgttttgcccctgaagaagctatttgcac

SEQ ID NO: 66882 - DNA, 1483 bp, Zea Mays
gtttcatctcttcttctgtttgttcctttggtgtttccctttggctccatggcaggctcttcatcatacagcgttctccctgaccagaccatggacaacgatgatgcacaaattggagttgctaaaactcagggaaagtattggggcattttcatctgctggcttcttggaaatggatgtctatttgggttcaatgggatgcttactattgaagattactacgtgtacctcttcccgaagtaccatccaacaaggattattactctcacctatcagccctttgttctcgccacaaccgccatattcacatatcacgaggccaaggtcaatactagggtgcgcaacctggcaggatacacgttgttcttcttgagctcatttggagtgatcatcctggatgttttgtcttcaggaagtggtggaatcgccccattcgttggtatctgtaccattgctgctgcttttggcatagcagacggtcatgttcaaggcggaatgactggtgatctgtccctgatgtgcccagaattcgtccagtccttctttggcggcgttgctgcatcaggtgcaataaccgcggcgttaaggttcttcacaaaagcggtgtttgagaattccagagatggcctgcggaaaggagctatgctgttctcttcgatctcgtgcttctttgagcttctatgcgttctactttatgctctggtgttcccgaagttgccaatcgtgaaattctaccgttcaaaagctgcctctgaggggtctcagacagtcaccgctgaccttgctgctggaggcatcaaaagcctgccgaatccattggctgaggaagatggtgtggtcgaacggttgaacaacaagcagttgctgcatgagaacatggactacgctctggacatgttcctggtctatgtcctgacactgtcgattttcccagggtttttggcggaagacactggatcgcacagcttgggttcttggtacgtgcttgtgttgatcgcgagctttaacgtgtcggacctgatcggaagatacctgcctctggtcgagcaaatgaagctgacatccaggacggggctactaaccgcagccatctctaggttcctgctcgtcccggcgttctacttcacggcaaagtacggtgaccagggctggatgatcatgttaacgtcgctccttggactgagcaacggccatctcaccgtctccgtcctcaccgaggcgccgaaaggctacaaggggccagaacagaatgctctggggaacctgctggtgcttttcctcttggcaggcatatttgttggcgccgtttctgattggctgtggctcataggcaaagggtggtgaccgaacttaacttgttctccccaggtgtatatttattatgcaagctagcagatcatgcaatcaataaatcatttctaaagttgactcgtatctttttttttaatcatcataaccaatatgatccaaccattcacatgct

SEQ ID NO: 66883 - DNA, 1430 bp, Zea Mays
cgatatcggtgaaacgtatattgatatcgatccgtcgggatcgacttccgaagccagatcaaatacacacgttgcctggagattctgcatacgcgcctaaaatctcaactgctatataaacaccgtcatcagattaaaactgaccaccaggcctggtacccgcactccccggctcgttggtcgttgccctgccccggctttctcggtgtccgcctgccgctcttggccgccgccgccgccgccgcggacgacggcgagtgggccgagacttgcccccccgcgccgcccggcacaccgcaggtgaagccatgagcatggaggtagcaggtgcagaggcacctgtcaaggggaaattccttggtatacttgtctgctggcttttgggaaatggaagccttttcgcgtggaacagtattctaaccattgaagattactactcccatctcttcccggattatcatccaacaagagtactcacactagtttaccagccttttgcctttggaataaccctcatcatgacatattatgaagcaaagatgaacacaagattgagaaatcttgcaggattttcccttttcttcctcggttcttttgcattgataattctggatgttgcaactaaaggacatggtgggcttggtgttttcgttggtgtatgcataattagcgccatatttgggacagctgatgctaattgtcaaggcgcactggttggcgacctttctttaatgtgcccagagttcattcagtccttcatggcgggactagctgcatcaggggtcctaacatcagctttgagattagttaccaaggcagcttttgagagctcaaaagatggtcttcgcattggagctatactgttcttttcaatcacatgcctgttcgagctggtgtgcctcctgctatacacattcgtcttcggcaaactacccatcgtgaagtactaccgtgcaaaggcagccgctgaaggcagcaagactgttgccagcgacctcgccgctgcagggatcatctctgaacaacagggacagatggaggaggatccagagaaatacaagcgtctgaccactaaagagctgctgatgcagaacatcgactacgcgctcgatatctacctgatatacgtcctaacgctgtcgatcttcccaggatttttgtctgaagacaccggagcacacaacctgggaacatggtacgcgcttgtgctgatcgcgatgtacaacgtgtgggacctgatcgggaggtacgtgccgctgatcccgtgcttgaaactgacctcccggaagggcacgctggcggctgtcttggcgcggttcctgttcatcccggccttctacttcacggccaaatacggcgaccagggataagaagaatggcagccctaagattatggtgggttccacttccacctctccccgaccctccac

SEQ ID NO: 66884 - DNA, 1342 bp, Zea Mays
ctgaccaccaggcctggtacccgcactccccggctcgttggtcgttgccctgccccggctttctcggtgtccgcctgccgctcttggccgccgccgccgccgccgcggacgacggcgagtgggccgagacttgcccccccgcgccgcccggcacaccgcaggtgaagccatgagcatggaggtagcaggtgcagaggcacctgtcaaggggaaattccttggtatacttgtctgctggcttttgggaaatggaagccttttcgcgtggaacagtattctaaccattgaagattactactcccatctcttcccggattatcatccaacaagagtactcacactagtttaccagccttttgcctttggaataaccctcatcatgacatattatgaagcaaagatgaacacaagattgagaaatcttgcaggattttcccttttcttcctcggttcttttgcattgataattctggatgttgcaactaaaggacatggtgggcttggtgttttcgttggtgtatgcataattagcgccatatttgggacagctgatgctaattgtcaaggcgcactggttggcgacctttctttaatgtgcccagagttcattcagtccttcatggcgggactagctgcatcaggggtcctaacatcagctttgagattagttaccaaggcagcttttgagagctcaaaagatggtcttcgcattggagctatactgttcttttcaatcacatgcctgttcgagctggtgtgcctcctgctatacacattcgtcttcggcaaactacccatcgtgaagtactaccgtgcaaaggcagccgctgaaggcagcaagactgttgccagcgacctcgccgctgcagggatcatctctgaacaacagggacagatggaggaggatccagagaaatacaagcgtctgaccactaaagagctgctgatgcagaacatcgactacgcgctcgatatctacctgatatacgtcctaacgctgtcgatcttcccaggatttttgtctgaagacaccggagcacacaacctgggaacatggtacgcgcttgtgctgatcgcgatgtacaacgtgtgggacctgatcgggaggtacgtgccgctgatcccgtgcttgaaactgacctcccggaagggcacgctggcggctgtcttggcgcggttcctgttcatcccggccttctacttcacggccaaatacggcgaccaggggacatgtttgagaaaataaaggcagaggagcagaaaaaagaaatatgcatgtcccgtgttatctcatattgtggaggccaatgagggtggggagcatgaggacaatactttgctt

SEQ ID NO: 66885 - DNA, 1256 bp, Zea Mays
ctccatcgggacgtcgtaaaattagggcacaccgcaggtgaagccatgagcatggaggtagcaggtgcagaggcacctgtcaaggggaaattccttggtatacttgtctgctggcttttgggaaatggaagccttttcgcgtggaacagtattctaaccattgaagattactactcccatctcttcccggattatcatccaacaagagtactcacactagtttaccagccttttgcctttggaataaccctcatcatgacatattatgaagcaaagatgaacacaagattgagaaatcttgcaggattttcccttttcttcctcggttcttttgcattgataattctggatgttgcaactaaaggacatggtgggcttggtgttttcgttggtgtatgcataattagcgccatatttgggacagctgatgctaattgtcaaggcgcactggttggcgacctttctttaatgtgcccagagttcattcagtccttcatggcgggactagctgcatcaggggtcctaacatcagctttgagattagttaccaaggcagcttttgagagctcaaaagatggtcttcgcattggagctatactgttcttttcaatcacatgcctgttcgagctggtgtgcctcctgctatacacattcgtcttcggcaaactacccatcgtgaagtactaccgtgcaaaggcagccgctgaaggcagcaagactgttgccagcgacctcgccgctgcagggatcatctctgaacaacagggacagatggaggaggatccagagaaatacaagcgtctgaccactaaagagctgctgatgcagaacatcgactacgcgctcgatatctacctgatatacgtcctaacgctgtcgatcttcccaggatttttgtctgaagacaccggagcacacaacctgggaacatggtacgcgcttgtgctgatcgcgatgtacaacgtgtgggacctgatcgggaggtacgtgccgctgatcccgtgcttgaaactgacctcccggaagggcacgctggcggctgtcttggcgcggttcctgttcatcccggccttctacttcacggccaaatacggcgaccagggacccagtggaaaggcagatccagtggcatttcaaattcttcgagttcattcaactagttccatggattttccattttatctgctcacagataagaagaatggcagccctaagattatggtgggttccacttccacctctccccgaccctccac

SEQ ID NO: 66886 - DNA, 947 bp, Zea Mays
cattctctgtttgatcgaaagacgctgtccatattattgatgtaatttgatccacgatgctgcgatttgcccttctgaccccagttctccagttctcctctcctgggctgcgagagtagtagattcgattcggcgcgcgagctcggcgtcttgtctgacctaccctgatgcagtgatgctcccgtttccaatttccggcacgacgcgtgtatgcggtacggcgggaccaggcgccgctcatcggcggtgcagcccggaccccatttgtcagcgcggaaggcgacaaaacagagcgcaacagccgttcagccagcgtccgttgccttgcctgcctgcggccgccgcccgcgaggccgcgaggtacgctggacccgggcggacgggcggtgccgccgccgggttctgctccttgcgcggatgaattcaggttaacaaagtatgagcgattcggagtgtgcaggagcacctcaacttaaggggaagtacatggtctgttcgtctgctctctattggggaatggatgcctcttctcatggaacagccgaggaagctaaatgctaaaaaaatggaatcgagtgtacattacggtgtagattttggcaaggagtaatatgtatgatgctgatgcaacagacaaatgcatatgccatgtatcatcaggggagcttagtcagaagcattgcaaaagtgaaacaaaccagctatttatgttcaggctccagacatctcttttttctcgtattcacaattttagtgagaaggattgccaagctgacaagtgggataaaccattcgagaatttagtatataacatgttatctgcttccgtgtgtcttagaatagtaatatctctgttccaagttgttctgtttccatgtacttttgacagtgtgcttgactgcgttgtaaaaacagagaagaaaagaacaatttatgtcatcttgaac

SEQ ID NO: 66887 - DNA, 2045 bp, Zea Mays
agtcagagagcgggccccatgcacgcagccctctttacccccatccgcagcccgcgcttgtgtccttctccgcgagccagtacacgcaccacttccccccttcgatctagccatcccaactccgccgactcgctggaaccctagccagccgccgccatgccgccgcgccgcggtagaaggaaggggaagggcagggcaaagccaagagcgaaggccaccgagcccgagcctgagctagaggaagccgccgattccgagatcgaggcgggggacgcgaaggcggaggagtccggcgaagcgaaagaagatgaatcggcaagcgacgccgagtccatggatgcagatgccaacgaggaagccgtcgagaacggagcggatgagatggatgcggagcctgaagccaaagccgagccggaagcggtagccaccgaggcggaagcgaaacctgacgtctcggatgccgaggatgaagaagccggtgaaacgtgctccgaccgcgaagcagatgccaaggatgttgattcgaaggccaaagcggaggagtccgacggcgaggatgaggagggagccaccgccgagaccgacggcgaggatgaggagggagccaccgccgagaccgacggcgagagtgaagaggaagccgctgagacgggcggcgagaacgaagaagatggtggggactccgacaccgaaggtgatgctgaggaatcccctccaccccctccttcccgcagccgccgccgtaagcgagcggccactcccgatgatgaagcagaggagacccctacaccgtcgcgtcgccggcgccgtcggaagtcgaggcagcgtggtgactctccgccgccacttccggaccacctccgttgccgtcgtagcgacgggaagaagtggcgctgctcgggccgtgcactcccaactgttagcttctgcgaataccactacgcgagggccaacaagggcaagaagctaccagcggatggagagctccttgctgtcgctcttcagaggcagaagaacaagaggaagggcaggaggagaatcaatccgtcgacgtcccctcaggcagccacgagtgaccgccagaccagggatctcccaaacggactgatgacgatcttgccaggtagcagtggacctgcagcactgtcaactcctgttactacaaaagttggtgtagaaatttctgcaccgatgcagcggtgctatcgatccaagaatgctgagccattgcctgttggtcctgtgaaggttgttcctcgtgctatgagtatgacgaaagcagcaccaagaatgtgtcactgctgcggggtaaagaaggcagcgcgtgttgccaattgcaagaactgtgatacgaatttctgtaacagctgcattaataaatggtattctaagttgtccaggaaggatataaaggctcgttgtccagcttgccgtggtctctgcaattgtaaactgtgcagccttggtcataccaagggtgctactcataaggaaccgccaagtggtgaaaggaagatactcagcataaaaatttccaaccatcaattttacaagcttttacctgtaaaacttgaccgggagcaacttgacgagttggaattagaagctaaaatacaaggttgctgaaaatggtcagagtgagtcactctactggtaagctcaaatctcttatgttactaccagctactatgtcgccatcagctacatataggctagtaacagtttaataggttttctcccttggctttgtgttattttgtacagagtaaagtgtaacctgggtccttgaactttaggttctatttttaaatggttcactctagagcaaccaatttaaatgtataaggacccagatcctcactgagactggacctagatgagaacctgagaaaaaaattaaggactgtgagtgcattttactcttatttgtggtgagcatgaaataaatcaatcttgtaattgcacggacagttagatatttctttggtcaggcaaatgttgtcttgtcgcaactcgccagcttagtattattatgttccgatttt

SEQ ID NO: 66888 - DNA, 2405 bp, Zea Mays
agtcagagagcgggccccatgcacgcagccctctttacccccatccgcagcccgcgcttgtgtccttctccgcgagccagtacacgcaccacttccccccttcgatctagccatcccaactccgccgactcgctggaaccctagccagccgccgccatgccgccgcgccgcggtagaaggaaggggaagggcagggcaaagccaagagcgaaggccaccgagcccgagcctgagctagaggaagccgccgattccgagatcgaggcgggggacgcgaaggcggaggagtccggcgaagcgaaagaagatgaatcggcaagcgacgccgagtccatggatgcagatgccaacgaggaagccgtcgagaacggagcggatgagatggatgcggagcctgaagccaaagccgagccggaagcggtagccaccgaggcggaagcgaaacctgacgtctcggatgccgaggatgaagaagccggtgaaacgtgctccgaccgcgaagcagatgccaaggatgttgattcgaaggccaaagcggaggagtccgacggcgaggatgaggagggagccaccgccgagaccgacggcgaggatgaggagggagccaccgccgagaccgacggcgagagtgaagaggaagccgctgagacgggcggcgagaacgaagaagatggtggggactccgacaccgaaggtgatgctgaggaatcccctccaccccctccttcccgcagccgccgccgtaagcgagcggccactcccgatgatgaagcagaggagacccctacaccgtcgcgtcgccggcgccgtcggaagtcgaggcagcgtggtgactctccgccgccacttccggaccacctccgttgccgtcgtagcgacgggaagaagtggcgctgctcgggccgtgcactcccaactgttagcttctgcgaataccactacgcgagggccaacaagggcaagaagctaccagcggatggagagctccttgctgtcgctcttcagaggcagaagaacaagaggaagggcaggaggagaatcaatccgtcgacgtcccctcaggcagccacgagtgaccgccagaccagggatctcccaaacggactgatgacgatcttgccaggtagcagtggacctgcagcactgtcaactcctgttactacaaaagttggtgtagaaatttctgcaccgatgcagcggtgctatcgatccaagaatgctgagccattgcctgttggtcctgtgaaggttgttcctcgtgctatgagtatgacgaaagcagcaccaagaatgtgtcactgctgcggggtaaagaaggcagcgcgtgttgccaattgcaagaactgtgatacgaatttctgtaacagctgcattaataaatggtattctaagttgtccaggaaggatataaaggctcgttgtccagcttgccgtggtctctgcaattgtaaactgtgcagccttggtcataccaagggtgctactcataaggaaccgccaagtggtgaaaggaagatactcagcataaaaatttccaaccatcaattttacaagcttttacctgtaaaacttgaccgggagcaacttgacgagttggaattagaagctaaaatacaaggaacaaaaacatctaatgtccgtgtccaggttgctgaaaatggtcagataataactgtaagctctctgtgagtcaattcttgagatgctgcccaacatgcccgtttaagctgtgcctaagttgctgtcagaagatacgtcaaggaaacatgtcgaacagcaaccctgaagataagttcaagaaccggttgcttcaacaagagtctgtccatgaggatggcagcattacttgcccttcgattgagctgggtggctgcggtgacgccatgctgaacctgatatatgcatctccatcgagccagtctgaagagctcagttcagaatgtgagctggatgctgcaggcaatcattctggagtgaaggatgctgaagttcacggatcacctgtacctgagagtaatggaagattagcagcagcttcccaggcagaaacaatgtccacatagtctcagaagatgcaattcttgttggctcatctttcaggtgggagcgcaagcgtttatattacattgaagcctgaagatagtgtatgatatggtcaaaaatcggtagagggtaggttgcctgattaggttgcttgatttaggaggttgccagcctatatggccattgattttaggcctgtgacctggggataatcccaattgttgtattgttcatctttgaccagggagcgaacatcgttgtacatatggttatggctttatttttgtcattaccgaggggcgagagctgatgaatggttgtactgtcgttcgttcaagggattacctggctattttgtggta

SEQ ID NO: 66889 - DNA, 2296 bp, Zea Mays
agtcagagagcgggccccatgcacgcagccctctttacccccatccgcagcccgcgcttgtgtccttctccgcgagccagtacacgcaccacttccccccttcgatctagccatcccaactccgccgactcgctggaaccctagccagccgccgccatgccgccgcgccgcggtagaaggaaggggaagggcagggcaaagccaagagcgaaggccaccgagcccgagcctgagctagaggaagccgccgattccgagatcgaggcgggggacgcgaaggcggaggagtccggcgaagcgaaagaagatgaatcggcaagcgacgccgagtccatggatgcagatgccaacgaggaagccgtcgagaacggagcggatgagatggatgcggagcctgaagccaaagccgagccggaagcggtagccaccgaggcggaagcgaaacctgacgtctcggatgccgaggatgaagaagccggtgaaacgtgctccgaccgcgaagcagatgccaaggatgttgattcgaaggccaaagcggaggagtccgacggcgaggatgaggagggagccaccgccgagaccgacggcgaggatgaggagggagccaccgccgagaccgacggcgagagtgaagaggaagccgctgagacgggcggcgagaacgaagaagatggtggggactccgacaccgaaggtgatgctgaggaatcccctccaccccctccttcccgcagccgccgccgtaagcgagcggccactcccgatgatgaagcagaggagacccctacaccgtcgcgtcgccggcgccgtcggaagtcgaggcagcgtggtgactctccgccgccacttccggaccacctccgttgccgtcgtagcgacgggaagaagtggcgctgctcgggccgtgcactcccaactgttagcttctgcgaataccactacgcgagggccaacaagggcaagaagctaccagcggatggagagctccttgctgtcgctcttcagaggcagaagaacaagaggaagggcaggaggagaatcaatccgtcgacgtcccctcaggcagccacgagtgaccgccagaccagggatctcccaaacggactgatgacgatcttgccaggttgttcctcgtgctatgagtatgacgaaagcagcaccaagaatgtgtcactgctgcggggtaaagaaggcagcgcgtgttgccaattgcaagaactgtgatacgaatttctgtaacagctgcattaataaatggtattctaagttgtccaggaaggatataaaggctcgttgtccagcttgccgtggtctctgcaattgtaaactgtgcagccttggtcataccaagggtgctactcataaggaaccgccaagtggtgaaaggaagatactcagcataaaaatttccaaccatcaattttacaagcttttacctgtaaaacttgaccgggagcaacttgacgagttggaattagaagctaaaatacaaggaacaaaaacatctaatgtccgtgtccaggttgctgaaaatggtcagagtgagtcactctactgtaataactgtaagctctctgtgagtcaattcttgagatgctgcccaacatgcccgtttaagctgtgcctaagttgctgtcagaagatacgtcaaggaaacatgtcgaacagcaaccctgaagataagttcaagaaccggttgcttcaacaagagtctgtccatgaggatggcagcattacttgcccttcgattgagctgggtggctgcggtgacgccatgctgaacctgatatatgcatctccatcgagccagtctgaagagctcagttcagaatgtgagctggatgctgcaggcaatcattctggagtgaaggatgctgaagttcacggatcacctgtacctgagagtaatggaagattagcagcagcttcccaggcagaaacaatgtccacatagtctcagaagatgcaattcttgttggctcatctttcaggtgggagcgcaagcgtttatattacattgaagcctgaagatagtgtatgatatggtcaaaaatcggtagagggtaggttgcctgattaggttgcttgatttaggaggttgccagcctatatggccattgattttaggcctgtgacctggggataatcccaattgttgtattgttcatctttgaccagggagcgaacatcgttgtacatatggttatggctttatttttgtcattaccgaggggcgagagctgatgaatggttgtactgtcgttcgttcaagggattacctggctattttgtggta

SEQ ID NO: 66890 - DNA, 2392 bp, Zea Mays
agtcagagagcgggccccatgcacgcagccctctttacccccatccgcagcccgcgcttgtgtccttctccgcgagccagtacacgcaccacttccccccttcgatctagccatcccaactccgccgactcgctggaaccctagccagccgccgccatgccgccgcgccgcggtagaaggaaggggaagggcagggcaaagccaagagcgaaggccaccgagcccgagcctgagctagaggaagccgccgattccgagatcgaggcgggggacgcgaaggcggaggagtccggcgaagcgaaagaagatgaatcggcaagcgacgccgagtccatggatgcagatgccaacgaggaagccgtcgagaacggagcggatgagatggatgcggagcctgaagccaaagccgagccggaagcggtagccaccgaggcggaagcgaaacctgacgtctcggatgccgaggatgaagaagccggtgaaacgtgctccgaccgcgaagcagatgccaaggatgttgattcgaaggccaaagcggaggagtccgacggcgaggatgaggagggagccaccgccgagaccgacggcgaggatgaggagggagccaccgccgagaccgacggcgagagtgaagaggaagccgctgagacgggcggcgagaacgaagaagatggtggggactccgacaccgaaggtgatgctgaggaatcccctccaccccctccttcccgcagccgccgccgtaagcgagcggccactcccgatgatgaagcagaggagacccctacaccgtcgcgtcgccggcgccgtcggaagtcgaggcagcgtggtgactctccgccgccacttccggaccacctccgttgccgtcgtagcgacgggaagaagtggcgctgctcgggccgtgcactcccaactgttagcttctgcgaataccactacgcgagggccaacaagggcaagaagctaccagcggatggagagctccttgctgtcgctcttcagaggcagaagaacaagaggaagggcaggaggagaatcaatccgtcgacgtcccctcaggcagccacgagtgaccgccagaccagggatctcccaaacggactgatgacgatcttgccaggtagcagtggacctgcagcactgtcaactcctgttactacaaaagttggtgtagaaatttctgcaccgatgcagcggtgctatcgatccaagaatgctgagccattgcctgttggtcctgtgaaggttgttcctcgtgctatgagtatgacgaaagcagcaccaagaatgtgtcactgctgcggggtaaagaaggcagcgcgtgttgccaattgcaagaactgtgatacgaatttctgtaacagctgcattaataaatggtattctaagttgtccaggaaggatataaaggctcgttgtccagcttgccgtggtctctgcaattgtaaactgtgcagccttggtcataccaagggtgctactcataaggaaccgccaagtggtgaaaggaagatactcagcataaaaatttccaaccatcaattttacaagcttttacctgtaaaacttgaccgggagcaacttgacgagttggaattagaagctaaaatacaaggttgctgaaaatggtcagagtgagtcactctactgtaataactgtaagctctctgtgagtcaattcttgagatgctgcccaacatgcccgtttaagctgtgcctaagttgctgtcagaagatacgtcaaggaaacatgtcgaacagcaaccctgaagataagttcaagaaccggttgcttcaacaagagtctgtccatgaggatggcagcattacttgcccttcgattgagctgggtggctgcggtgacgccatgctgaacctgatatatgcatctccatcgagccagtctgaagagctcagttcagaatgtgagctggatgctgcaggcaatcattctggagtgaaggatgctgaagttcacggatcacctgtacctgagagtaatggaagattagcagcagcttcccaggcagaaacaatgtccacatagtctcagaagatgcaattcttgttggctcatctttcaggtgggagcgcaagcgtttatattacattgaagcctgaagatagtgtatgatatggtcaaaaatcggtagagggtaggttgcctgattaggttgcttgatttaggaggttgccagcctatatggccattgattttaggcctgtgacctggggataatcccaattgttgtattgttcatctttgaccagggagcgaacatcgttgtacatatggttatggctttatttttgtcattaccgaggggcgagagctgatgaatggttgtactgtcgttcgttcaagggattacctggctattttgtggta

SEQ ID NO: 66891 - DNA, 486 bp, Zea Mays
cgcgaccgccgcatactccgctgcgcgctccgagctcaattccccgcgcgcccagccccgagctcaatcccccgcgcgcggccccgagacttaatattcgttcacccgtcgattccgcctccgatcccctccctccttccgttgcggagactcccgcttctgcggcggaggccaagcaggagtcggtgttggagacggaggaaactaagcaggcggtggcagcagcagcagcagcggcaggaggtgtgcaggccatggcggtcaccgtagtgcgggacgtcgagacgggtctggacacgagtaccagcgaccaggacggcgacaagccttcctggttcacacctaagagctgctcgggattaacttgagcttctggcgatgctcaagtgcggtgggatctgagcagaccagcggaggtagcagtttagtagttcgaactggagcaacaaatcatttggtgcggtgtgtttcattagttaattcgga

SEQ ID NO: 66892 - DNA, 375 bp, Zea Mays
cgcgaccgccgcatactccgctgcgcgctccgagctcaattccccgcgcgcccagccccgagctcaatcccccgcgcgcggccccgagacttaatattcgttcacccgtcgattccgcctccgatcccctccctccttccgttgcggagactcccgcttctgcggcggaggccaagcaggagtcggtgttggagacggaggaaactaagcaggcggtggcagcagcagcagcagcggcaggaggtgtgcaggccatggcggtcaccgtagtgcgggacgtcgagacgggtctggacacgagtaccagcgaccaggacggcgacaagccttcctggttcacacctaagaggcaactgctgtgctggcaaccctttt

SEQ ID NO: 66893 - DNA, 711 bp, Zea Mays
aatgggttggtcatgtggtgacaagaatgacggccgagatgcccggccgggctcctcgaaatttgacgacaaggtaagatatatattttttggtgtcagcagtcagcaagtgtggcacatccggggccatgttcgtttaggctgttcccggccgggaacagcgaccaaacctcgtggatcccttcccatggaaataaacccggcccacagaaaaacaagcgttcggttaagtccgatgtgggctgtatccagatcgttcctcgtcgttccagcccgggaaacacgcccggtcgaccgggggtggaaaatatcccagcctggactgcacgcgaacgcgaagggcacgcgacttctcgtcggtgtcgatctgctccggcgaccgcttgtcatcgattatccctacatcggtttgacttggagaagacgagcttccaccatcttgggaccctataccctctcctttagagagctgcacctgaagaaaccaatgaacattaggtgtgcgacttgcttttgtttatgtggatctattaattatgttcaaacagttgcttcataattggcattggcattggctgctcaattgtgtgcccctcgaacctcccctgcaccatctagagatattttgtgatgccattctagtattgcttttagcatttttatccataggcttaaccgaacaggattttggcacagggattattccctgac

SEQ ID NO: 66894 - DNA, 1059 bp, Zea Mays
gacgacaaggtaagatatatattttttggtgtcagcagtcagcaagtgtggcacatccggggccatgttcgtttaggctgttcccggccgggaacagcgaccaaacctcgtggatcccttcccatggaaataaacccggcccacagaaaaacaagcgttcggttaagtccgatgtgggctgtatccagatcgttcctcgtcgttccagcccgggaaacacgcccggtcgaccgggggtggaaaatatcccagcctggactgcacgcgaacgcgaagggcacgcgacttctcgtcggtgtcgatctgctccggcgaccgcttgtcatcggtatgtttcttcctccctgggctttcccttcccaccatctcagcggacggcttgaagtttcctctaagtggtgggcgctcgctacccgcagctcccatggtctgcttgaagtttcctcgccctaaaccctaaccctaaatgtggctcccatgtctgcttgatctccttttagctgctgtagtgatggcgccatggccatggtctgcttagtttcctcgccctatccaacacgaaagctgccgccgaagcacggtcggtcacgtcgttcctgctgacatggtcttcttgagtttggggacaaagaaacaagaagaattagactagaagattatccctacatcggtttgacttggagaagacgagcttccaccatcttgggaccctataccctctcctttagagagctgcacctgaagaaaccaatgaacattaggtattacaaataagggctgtattgtattaatgtggttcttgtaaactaatttttcctttgaattttgtaattgaatcatccacaggtgtgcgacttgcttttgtttatgtggatctattaattatgttcaaacagttgcttcataattggcattggcattggctgctcaattgtgtgcccctcgaacctcccctgcaccatctagagatattttgtgatgccattctagtattgcttttagcatttttatccataggcttaaccgaacaggattttggcacagggattattccctgac

SEQ ID NO: 66895 - DNA, 659 bp, Zea Mays
gacgacaaggtaagatatatattttttggtgtcagcagtcagcaagtgtggcacatccggggccatgttcgtttaggctgttcccggccgggaacagcgaccaaacctcgtggatcccttcccatggaaataaacccggcccacagaaaaacaagcgttcggttaagtccgatgtgggctgtatccagatcgttcctcgtcgttccagcccgggaaacacgcccggtcgaccgggggtggaaaatatcccagcctggactgcacgcgaacgcgaagggcacgcgacttctcgtcggtgtcgatctgctccggcgaccgcttgtcatcgagagctgcacctgaagaaaccaatgaacattaggtattacaaataagggctgtattgtattaatgtggttcttgtaaactaatttttcctttgaattttgtaattgaatcatccacaggtgtgcgacttgcttttgtttatgtggatctattaattatgttcaaacagttgcttcataattggcattggcattggctgctcaattgtgtgcccctcgaacctcccctgcaccatctagagatattttgtgatgccattctagtattgcttttagcatttttatccataggcttaaccgaacaggattttggcacagggattattccctgac

SEQ ID NO: 66896 - DNA, 811 bp, Zea Mays
gacgacaaggtaagatatatattttttggtgtcagcagtcagcaagtgtggcacatccggggccatgttcgtttaggctgttcccggccgggaacagcgaccaaacctcgtggatcccttcccatggaaataaacccggcccacagaaaaacaagcgttcggttaagtccgatgtgggctgtatccagatcgttcctcgtcgttccagcccgggaaacacgcccggtcgaccgggggtggaaaatatcccagcctggactgcacgcgaacgcgaagggcacgcgacttctcgtcggtgtcgatctgctccggcgaccgcttgtcatcgattatccctacatcggtttgacttggagaagacgagcttccaccatcttgggaccctataccctctcctttagcaatggatgtggcactaagcctcttagaaagaggatgatgatgaggatgatgatgaattccatgacctgctcttaattgagagctgcacctgaagaaaccaatgaacattaggtattacaaataagggctgtattgtattaatgtggttcttgtaaactaatttttcctttgaattttgtaattgaatcatccacaggtgtgcgacttgcttttgtttatgtggatctattaattatgttcaaacagttgcttcataattggcattggcattggctgctcaattgtgtgcccctcgaacctcccctgcaccatctagagatattttgtgatgccattctagtattgcttttagcatttttatccataggcttaaccgaacaggattttggcacagggattattccctgac

SEQ ID NO: 66897 - DNA, 805 bp, Zea Mays
gacgacaaggtaagatatatattttttggtgtcagcagtcagcaagtgtggcacatccggggccatgttcgtttaggctgttcccggccgggaacagcgaccaaacctcgtggatcccttcccatggaaataaacccggcccacagaaaaacaagcgttcggttaagtccgatgtgggctgtatccagatcgttcctcgtcgttccagcccgggaaacacgcccggtcgaccgggggtggaaaatatcccagcctggactgcacgcgaacgcgaagggcacgcgacttctcgtcggtgtcgatctgctccggcgaccgcttgtcatcgattatccctacatcggtttgacttggagaagacgagcttccaccatcttgggaccctataccctctcctttagattattcctgcaccggttcgagttggagaagacgaacttccaccgtcttgggatccaatatcctctcctttagagagctgcacctgaagaaaccaatgaacattaggtattacaaataagggctgtattgtattaatgtggttcttgtaaactaatttttcctttgaattttgtaattgaatcatccacaggtgtgcgacttgcttttgtttatgtggatctattaattatgttcaaacagttgcttcataattggcattggcattggctgctcaattgtgtgcccctcgaacctcccctgcaccatctagagatattttgtgatgccattctagtattgcttttagcatttttatccataggcttaaccgaacaggattttggcacagggattattccctgac

SEQ ID NO: 66898 - DNA, 159 bp, Zea Mays
atgggagaccataagaataccacgaccattacatgcagcaacgctatcatctttcttgttgactatgtcatcgttggtccaatttggacatcccatcactccaactgttacctttccattcaccacaagtgccagacccaccttaaaaatggacaaaaa

SEQ ID NO: 66899 - DNA, 1120 bp, Zea Mays
ttgcctgatgagattggttaccagatgaactttaacagattagaaataaaatataacaacatatcaggcccatacctaacacttttgccaacttaacaagaattaaacataaaggctaacacctacggatttttgactaagaactggtctccaccatagatccaagaatgtgatatatggcaagaaaacatatgtgtaatgaggtgtatgagcctctggttgaagataaatggccacacaacccccatttttgtcgaaaatagccatgaactatatgcgcactgataggaatacaagatagtgaaacagatttcagatacaaaaataaacgacaatgtttccttctaagaaaaatagtgagcaaatgtggaacatgcatattttctaattagaaggctaacacctacggatttttgaccaagaactggtctccaccatagatccaagaatgtgatatatggcaagaaaacatatgtgtagtgaggtgtatgagcctctggttgaagataaatggccacacaacccccatttttgtcgaaaatagccatgaactatatgcgcactgataggaatacaagatagtgaaacagatttcagatacaaaaataaacgacaatgtttccttctaagaaaaatagtgagcaaatgtggttgaagacatcatttaagtcggtatgttaaactatatgcgcactgataggaatacaagatagtgaaacagatttcagatacaaaaataaacgacaatgtttccttctaagaaaaatagtgagcaaatgtggaacatgcataatttctaattagtaggctccgtgtcttgatgaatgatatatggcgctaatcaacaaaagcaagacatggtgttcaatgagacttcttcagaacattcaccttaatatacttcttgcgttatcctatgcagcacagtgttggaagtagagatggcaatttgtccaaagcagaaatctccataaaccctagaacaagcaaacacattgaagtgcacagagagagtagaaggcaaagtgcgcacctgcactccaaaaaccagggcaccagcaaaaacgccagagagagtctcgatgccaaagaggttccatcaatgagggagtcagcatga

SEQ ID NO: 66900 - DNA, 2563 bp, Zea Mays
gtcgcgcatgtcgaaggtgacggcgatgtaaccccgcagcgcaatgccctccgccatccccctcaatattagtactaaaatatttgacaactaatatcctgatgtgaattgagtagcggatttctcactctaaaatgaagatacaatactaaaagcatttaataaataatattgggaaaacatatgtttttgaaaggctgcaagttaatgtaaaaggataatttatgattgtaagatgtccaaaaaccgagaaaggaaacattgcatttaatctggacttacaagtacccaaatttaggtatgacactcaaatctggaacaacccaaactatagtttcttagactcctggtaacatgtaaaaggatggtttactcaacacgtcttgatttgagtttaaacatgatgttgattgtgtggtgcttgtccttgaatgaatataatgaagtaattgttgtttcagttatcagtgaaaatgatctccacagaatgaaagaagactacctataaaattttaaatgtaatgtttttcgatatttttttaaatataaatatttccagataaatggaccagttgcatccaactatttggcagctataggctgcaatagaagaggagtcagtgtaaaaacgagctttttgttgcacacggagcaaattcgttcttatctatgtgatgccctgaactttgatatactacctatctcaactaaaagcataagccatttggcaaatacaaacacttttattcaaaatattcttcttttaaccttaggtttgtactcaccaatgcctacacttttaatcaaggttattaaaacgacgaaacgttgaaacgctcatgggtaagttttaacttttaaacggtttaaacaaagtttaaatgtagttttaaacaacatagggaaatttcaatatatcataatttcaggcaattatatcaagtcaaataccaaacagtgggacagtcagtctctgtactctgtagtcctgccgcagtgggacagcagaggcggggctggaggggctggcagccggacaggcggcgcaggagggaggacggcctggagcgcggcggcctggagcggtggcacgcagaggctctgaggcggggctggaggacggccttgagagcagcggcctggagcggcctggagagcagcggcctggagggaggacggcctggagagcagctgactggagcggcggcggcctggagcagcggcacgcagaggcgggcctggcggcgccggacgggcggcgcaggagggttggagcagcggcggcctggaggctggagcgcgccctggagtgcgacggctggtgagaacgcgagttactaattgggctggtgaaagtgcggcttgtagcggcggtctgggtgggctgggcgggagtttctaattgggctgggccaattactagcagcagacgcattaaacgcggcgtttcactctataccgcgtttaaacgtcaaaacgcgacgtttaaacgacgttaaacaacgttttacgacgaatcgtaaaacgttttgtcgtttcacttcctgtcagcgttttatagtttaaacgacgtttaaacgtcgttttaacgtcgttttaataagcatgcttttaatgattgttctcaataacagaagttgtaatagctgttaaattcttttgccctcatctacctcaaattctgaaaagagagaacatgagcgaaaaggttgttacactcacagctttagaagtgtttgtatgttgttgtattcagcaggatggagcttccactgaagttgttattatcagcctgactataagtacacagatacatagatatgagaaatatttgtcatagataacaaaaaagtctaatctatacagaataaacaaaaaaaatcaaagacaaaggcctggatcattatctccttagcatgccattagatttacataagcaagtgaagtgtactcatgaaattggtgtatattacttaaatttcttaaacatctagagccagaggaacctcaagatatcatgaacaagtacaaatccttaacattgtgctgcagaaaaatgtacttacagtcaagatagcaagaagactacgtgtatctactaattctggtggaagaggcccagatcaattattgttatcaacaaggctgcaagttcacagcacaagacatgtcaacttacaagtcatctgcaacttgcaaaatagaaaatattagaaaaagttgaggtctacttacaaatgaaggagttaaggcaagttggacaactcagatgggatttgtaatgagttattattcatgtgactaaaaggtaaaattggaaccagaattatttactaattttacaaatcagaagcatcagggatgggcagaaaataaagatactcgacactaacagatgtttaattcttgttaagttggcaaaagtgttaggtatgggcctgatatgttgttatattttatttctaatctgttaaagttcatctggtaaccaatctcatcaggcaaagatccagataactggttgccattcaaagttctgcaagattgtggatgtggcattagc

SEQ ID NO: 66901 - DNA, 1136 bp, Zea Mays
acatgcgcactgacgttcttgagagtccaggcagagtcgtagtttcttcggaacgcagggaaaaaaaagaggatgaggtttgcggtggcgaacaaggcgtacattgcggtgacgctgggcgccgccatcgagctcaaggagcaggtggccaagccttgctcctcggccgcgaagcggggcgcgttgcggttgtcggcggccggcaagatcggcggcggcggcggcgccgaggagtcgctaaggatgatcatgttcctcagctgctggggaccgagctaagctctgaagccgcggcagaggtggctagtgccgcagggcaggtctacaactgactgtgccttggaggttgctaagtggccgacaacacctgctactgttctcggcttctcactgagctccgagactcctctacggaacctcgtgttcatggattggatggatgctcgtctgaagctacaaaagctaaaatctgacatgtaaatttgttcgaaagataaacaaacggctacgtacgtatgtgcgcttctttcagttgctgtttggctgtcctggctgatcctcatattgagccttgacagcacggtagactacgagacaagctcgtctaggattgaattgaatcgcttgttcatctctggtttctcgctgggcacggtggtacagtacgagtagctagcaaaggatcaaagcaggaagcaaccccgtacggtatatgaacagaattgcagaaacttatgcgtatgacctagtcaagtctcaacatgaggatcagaggatgtatcgaaaacaacaaaagaacgagaaagagaatcaagttaacagtcacaaatcccaagataatatactagtattatcatgtcatcactcgagtacgaccaattatcggtgtcaaccatcaccataatttagtctgaacactgcaaaaaagagagaaaaggagaggtggagaagtggacaagagtacatgcatccgcatccaaagcgacaaagcaggaggtgccccactgccactcgatggaaaacgatgagtcaccatggcccctctcgggataagcctcgacacctgtggtggtctcactcaagctggtacgaacagataaggaatcatctcgtgctttccatccggtttctctccc

SEQ ID NO: 66902 - DNA, 1678 bp, Zea Mays
gaaaagtgaggagggtcagaggtgtacagataaggatgagggctgaaaagaggagcaggaaggcttggcttgctgcaatgcctgtgctgtttggcgccacaaaaggagcagaggtgtgttccttcaaatgccagatagcccactggagacaaggtcacaaagatgaatgccatccaccaagtgttaatacaaggcatgatgatgaagaagaaaaggctgaagtgggaagagctgccaaagagaatgtatcagttggtgttaaacaggttgctgaaatgaacaaaccagatgtaggatctgaaacttctgatgcaaaccatgatttgaagagttcaaatggtaaaagtaaacatatgccttctaaagcagtatgttccagtgtagagattcctggaggtcataagtccaacaacacagttgaaatttctcaaaacgttcagtctgttgacagtagtaagatgggatcaagtatcaaacatgcaaattttgttgaagatggttcttccaccgaggacttaaatgaggaataccaaagagctaaggatgccactgttgttgaggattgttctcagacaaacagtaccaggtagcttgaagacagtagcattcaccacgcagttgcatctgttgtctttgagtccaaaagttctaggacaagagcttaggctaattgttatgcaaatgctgtttttcagtgtttgatgtttactcgaccactcacaacatatcttttggaagggcttcacgcaaaaaactataattctccactactatgtgtgtcacgttacattttcactatgtgcttgagtatttgtataatacctcttgcgctgtaggttctcaaaatggatggtgcttcctgtgtgaattttaaaaactcattgtggagggcaaacggtgcaaccttgtcaccgacaggaatactctctcatttgaatgacattggcagtagctttggtcctgaaatgctccaagaagctggagcagctcatacttatatagaatccttcgcttaccgtttgtacatattgattatccggtgcgtggcgccaccactggtgccggagctggacagggacgccgtggcccctgcgggcagcggtgaccggaaggcggccaagctcgggagctggagcagcatgagcagcaaccgcggtagcaagaagcggaagagcagtagcagcagcttcgggaggagatccacatccacctgcgaggaaaggcagggggtcttccgcatgctcatgagctggaaccaggagagccgattcagcaacaagatcaagacgacgacgagcaaagaaagatgaacgaaatgaagtgttcttagcttggtgtgattattcggggggttgcttgctggatggtttttgttcgtttagtgtctggccttagcttacttattacttttgttagtactctactagcagagtacatgcatagagtcagtggtgtggctgtggcgtggatcagatcattgatttgatcgagctgtacaaatagcgaggcgatacatgtcactgagttgatcagttgacaaggtggtttagaccatgttgaggcacggagaaacatcatccctaggttttagtttgtctggctttgctcgtcattttgtacttgctcttctcacatatttgttcgcttagaatttacttcaaactcacgtccttttggc

SEQ ID NO: 66903 - DNA, 1769 bp, Zea Mays
cgacacattctacttatgttaataattcaaattctgttattactcctttgtttgaaaagatgctaagtgctagtgatgctgggcggattggtcgtttagttttgccaaagaagtgtgctgagacatacttccctccaatctcccaacctgaagggctccctttaaaggttcaggatgccagtggtaaagaatggatattccaattccgtttctggccaaataataatagcaggatgtatgtattggagggtgtcacaccttgcattcagtcaatgcagttacaagcaggcgacacagtaacctttagtcgaatagacccagaagggaaattgatcatgggcttcaggaaggcaactaacaattctttcgaacaggagcaagctacaaagcctgccaatggcgccctagcaacttcagaagcaaatggtaaagtttctgccccagattccagtccaaatgctgcagtttcccgtcaaaacaagctcaacacagagaccaaaagttctagtcctgtggaacaagccactgcattgaaaatggacaaggatggattaacacagaaggaagggcctggaactggtagttcttccccaggttctgtcaagagaaaaacaactattcttggtcaaaagaataaaagattacggatggataatgaggaatcaatggagttgaagataacatgggaggaagctcaagaattgcttcgccctcctcctaaggccccatccattgttattgttgatggccatgagtttgaggaatatgaggagccaccggtacttggaaggaagacttattttgtagcagataaatcaggttcgaaccatcaatgggcccaatgtgaagattgttccaaatggaggaaacttccaatagatgctctgttgccctccaaatggacctgctctgacaacaaatgggatccagagaggtgttcttgcgaatctgcacaggaaataagtatagaggagcttgcagaattcattcctataaaacctgatgggctggacacgcttgcaaaccttgcgattcttggtgaaggacactcatgcttcgacgcgagaagaaggcgacaaaggatctgtctcgcaagaaagagacgggccaatccagtgagaaggccacacaacaagctgtgtccggacctccaggagccaatgccactgcaaccagatctgcccagaaagcagatggaaacaccgatggacctgaagacatggccgtcgatcacaaggtgacaacatcctctcccgtcaagaaccatattgacctgaacatccaacctgaacgggacgatgagcagtcaccgaaatctggtgcggctggtttgttgagccgagacaatgcaacttagagagtggatagcgtggattgattgatcataccataccaatgagtggacatagataaccgatcgaacatatccttccgaatgtctatacccttgttttttttttaagatagatgtggcgtgaggcgtggggccttgtagtgtagctgttaccttcccataccatagagccggtttccttttaccctgagactccagtggtaatgttatcgtgtataccatagggcaggacacccgtaggtgttgcgtggggacttgcataaccatgtatattgcaagaccagctcgtttcggctgaatgtgaaccgtaagttgctactgtacccctgcacatatttcccccgagttggcaggaattgttacattacattcgtaggatgaatgagctttgtcttacgagtttgctccattcttt

SEQ ID NO: 66904 - DNA, 1767 bp, Zea Mays
cgacacattctacttatgttaataattcaaattctgttattactcctttgtttgaaaagatgctaagtgctagtgatgctgggcggattggtcgtttagttttgccaaagaagtgtgctgagacatacttccctccaatctcccaacctgaagggctccctttaaaggttcaggatgccagtggtaaagaatggatattccaattccgtttctggccaaataataatagcaggatgtatgtattggagggtgtcacaccttgcattcagtcaatgcagttacaagcaggcgacacagtaacctttagtcgaatagacccagaagggaaattgatcatgggcttcaggaaggcaactaacaattctttcgaacaggagcaagctacaaagcctgccaatggcgccctagcaacttcagaagcaaatggtaaagtttctgccccagattccagtccaaatgctgcagtttcccgtcaaaacaagctcaacacagagaccaaaagttctagtcctgtggaacaagccactgcattgaaaatggacaaggatggattaacacagaaggaagggcctggaactggtagttcttccccaggttctgtcaagagaaaaacaactattcttggtcaaaagaataaaagattacggatggataatgaggaatcaatggagttgaagataacatgggaggaagctcaagaattgcttcgccctcctcctaaggccccatccattgttattgttgatggccatgagtttgaggaatatgagttcgaaccatcaatgggcccaatgtgaagattgttccaaatggaggaaacttccaatagatgctctgttgccctccaaatggacctgctctgacaacaaatgggatccagagaggtgttcttgcgaatctgcacaggaaataagtatagaggagcttgcagaattcattcctataaaacctgccaaaaagcccaaattgaagatagaatctgatgctatcgatgcttcagatgggctggacacgcttgcaaaccttgcgattcttggtgaaggacactcatgcttcgacgcgagaagaaggcgacaaaggatctgtctcgcaagaaagagacgggccaatccagtgagaaggccacacaacaagctgtgtccggacctccaggagccaatgccactgcaaccagatctgcccagaaagcagatggaaacaccgatggacctgaagacatggccgtcgatcacaaggtgacaacatcctctcccgtcaagaaccatattgacctgaacatccaacctgaacgggacgatgagcagtcaccgaaatctggtgcggctggtttgttgagccgagacaatgcaacttagagagtggatagcgtggattgattgatcataccataccaatgagtggacatagataaccgatcgaacatatccttccgaatgtctatacccttgttttttttttaagatagatgtggcgtgaggcgtggggccttgtagtgtagctgttaccttcccataccatagagccggtttccttttaccctgagactccagtggtaatgttatcgtgtataccatagggcaggacacccgtaggtgttgcgtggggacttgcataaccatgtatattgcaagaccagctcgtttcggctgaatgtgaaccgtaagttgctactgtacccctgcacatatttcccccgagttggcaggaattgttacattacattcgtaggatgaatgagctttgtcttacgagtttgctccattcttt

SEQ ID NO: 66905 - DNA, 1695 bp, Zea Mays
cttaaatataaatacatgacctgactgatcttttgatgcggtgttaattatgactttacgcattttcaataacctttagtcgaatagacccagaagggaaattgatcatgggcttcaggaaggcaactaacaattctttcgaacaggagcaagctacaaagcctgccaatggcgccctagcaacttcagaagcaaatggtaaagtttctgccccagattccagtccaaatgctgcagtttcccgtcaaaacaagctcaacacagagaccaaaagttctagtcctgtggaacaagccactgcattgaaaatggacaaggatggattaacacagaaggaagggcctggaactggtagttcttccccaggttctgtcaagagaaaaacaactattcttggtcaaaagaataaaagattacggatggataatgaggaatcaatggagttgaagataacatgggaggaagctcaagaattgcttcgccctcctcctaaggccccatccattgttattgttgatggccatgagtttgaggaatatgaggagccaccggtacttggaaggaagacttattttgtagcagataaatcaggttcgaaccatcaatgggcccaatgtgaagattgttccaaatggaggaaacttccaatagatgctctgttgccctccaaatggacctgctctgacaacaaatgggatccagagaggtgttcttgcgaatctgcacaggaaataagtatagaggagcttgcagaattcattcctataaaacctgatgggctggacacgcttgcaaaccttgcgattcttggtgaaggtgaagctctcccttcacagccaacaacaaaacatccccgccatcgtccgggctgctcatgcatcgtctgcatccaaccaccaagcgggaagggtccaaagcacaagcaaacttgcacctgtaacgtttgtatgacggttcgccgccgtttcaggacactcatgcttcgacgcgagaagaaggcgacaaaggatctgtctcgcaagaaagagacgggccaatccagtgagaaggccacacaacaagctgtgtccggacctccaggagccaatgccactgcaaccagatctgcccagaaagcagatggaaacaccgatggacctgaagacatggccgtcgatcacaaggtgacaacatcctctcccgtcaagaaccatattgacctgaacatccaacctgaacgggacgatgagcagtcaccgaaatctggtgcggctggtttgttgagccgagacaatgcaacttagagagtggatagcgtggattgattgatcataccataccaatgagtggacatagataaccgatcgaacatatccttccgaatgtctatacccttgttttttttttaagatagatgtggcgtgaggcgtggggccttgtagtgtagctgttaccttcccataccatagagccggtttccttttaccctgagactccagtggtaatgttatcgtgtataccatagggcaggacacccgtaggtgttgcgtggggacttgcataaccatgtatattgcaagaccagctcgtttcggctgaatgtgaaccgtaagttgctactgtacccctgcacatatttcccccgagttggcaggaattgttacattacattcgtaggatgaatgagctttgtcttacgagtttgctccattcttt

SEQ ID NO: 66906 - DNA, 1563 bp, Zea Mays
gatcttttgatgcggtgttaattatgactttacgcattttcaataacctttagtcgaatagacccagaagggaaattgatcatgggcttcaggaaggcaactaacaattctttcgaacaggagcaagctacaaagcctgccaatggcgccctagcaacttcagaagcaaatggtaaagtttctgccccagattccagtccaaatgctgcagtttcccgtcaaaacaagctcaacacagagaccaaaagttctagtcctgtggaacaagccactgcattgaaaatggacaaggatggattaacacagaaggaagggcctggaactggtagttcttccccaggttctgtcaagagaaaaacaactattcttggtcaaaagaataaaagattacggatggataatgaggaatcaatggagttgaagataacatgggaggaagctcaagaattgcttcgccctcctcctaaggccccatccattgttattgttgatggccatgagtttgaggaatatgaggagccaccggtacttggaaggaagacttattttgtagcagataaatcaggttcgaaccatcaatgggcccaatgtgaagattgttccaaatggaggaaacttccaatagatgctctgttgccctccaaatggacctgctctgacaacaaatgggatccagagaggtgttcttgcgaatctgcacaggaaataagtatagaggagcttgcagaattcattcctataaaacctgccaaaaagcccaaattgaagatagaatctgatgctatcgatgcttcagatgggctggacacgcttgcaaaccttgcgattcttggtgaaggacactcatgcttcgacgcgagaagaaggcgacaaaggatctgtctcgcaagaaagagacgggccaatccagtgagaaggccacacaacaagctgtgtccggacctccaggagccaatgccactgcaaccagatctgcccagaaagcagatggaaacaccgatggacctgaagacatggccgtcgatcacaaggtgacaacatcctctcccgtcaagaaccatattgacctgaacatccaacctgaacgggacgatgagcagtcaccgaaatctggtgcggctggtttgttgagccgagacaatgcaacttagagagtggatagcgtggattgattgatcataccataccaatgagtggacatagataaccgatcgaacatatccttccgaatgtctatacccttgttttttttttaagatagatgtggcgtgaggcgtggggccttgtagtgtagctgttaccttcccataccatagagccggtttccttttaccctgagactccagtggtaatgttatcgtgtataccatagggcaggacacccgtaggtgttgcgtggggacttgcataaccatgtatattgcaagaccagctcgtttcggctgaatgtgaaccgtaagttgctactgtacccctgcacatatttcccccgagttggcaggaattgttacattacattcgtaggatgaatgagctttgtcttacgagtttgctccattcttt

SEQ ID NO: 66907 - DNA, 592 bp, Zea Mays
agctagtcctggtcgagcaggtcgccgaggcattcggtgccgtgggggcgcgacggtcgtggcagcagaggttgaggcggagggatcgtcttcgtcggagggaaccgctcacgccacgaggcggagggatcgtcttcgtcggagggaaccgctcacgccacccaacgtcagcagatcctgatccgtcggagactcggagggcgtcgggaggtaggttcaggggggatcgatcgcgaggaccttgtcgtgggacgacgcttcccaagaggctcctccgcagtgttctaccaaaggagacagcaaccgcgagcaggagcagcacgagttcatcgagaagaccctggcatccgctggcttctgcaacgagaagacccaggacatctttgcccggtggcattcgctcgaccggcccttggaccccgccgtggtcgaccagctgctggaacgcatggggaggacgccaagtgccgagagaggcgcgagatgcggcgggagatgcagtgagagagaggaggggagcagtggcgtcggtggatccgtagaggccgaactgcacagcttgagcccgtgggagtcggatgatgcagattga

SEQ ID NO: 66908 - DNA, 3445 bp, Zea Mays
atggcggggtggctggcgctagacgtcgccgcggaggcagaggcgaacgagaatgaggccacgacggaggatgcgaatgcgcagaggatcggtctcgaactctcaattgtccctagagggcttgggttccgtgttgagggcgttcaaattactaccaaaaaattgggagttcaagacaccctgatgccatcagcacctggggagaaggatccacaagttataccgaggcctgcgacggggcctcctctggtgcagactctcacgcctgtcaatgcaacaggaagtcctgccatagacccgaggctggcgcagccgtcttggcctggccatgtagtactcctgcgcccttgtgcagcttggcctcctcatttgccagtcccgttgctgcttccgcaccaaaatgtggatgctctggaggatgtggctgcagcagatgttaaccctgcgatcgatagctgtgacgagaagatgttgcccaaggtgaatatgttgttcgatggtgaaagcgatgcgtatgagttctacaatgcatatgcggaaaaggtgggcttctttgtccgaaggtcaacgctctggacgacgtcaaagaacataatcactaggagaacttttgtgtgctcgagagaggggtttcgggagaagaagaagggagcaaaggaagcaaagtgcccacgtcccgaaacacgaattggatgccctgcaagcttgaccattagacttactgctaatggcaagtaccgtttgacagagtttgtgccgaatcataaccatcagctggcaacagcctctacagttcatatgctgaaaacaaagaaaatcaggcgcaaagcacgggctgcgagagaaaacctggcagatgataccgtgagtacaccagaatttgagaatgaagacgaggcatatgaattttacagcatgtatgcggggaaaattgggttcagcgtgcgcagggctagcatgacggtgaataatgagaatgttataaccagaagaatgtttgtttgttcaaaagaaggattccgtgagaagaaaagaggagcaaaaagagtaaagaaacctcgaccagaaacacgaactggctgtccggcatgtatggtcatcaggcttggaactaacgagaaatatcaagtcacagaatttgttacctgccacaatcaccagcttggagctgcagcagcttctgatcttgtcatggcatctgggagtacagaaaatgatcaagatgatggatttgatcaggcagatagatcacccgatgattctgttcacaagcaaaatctgatttatggaagtaccactctgagttccctagaaggtagaagttgcaaaagatacaagtatacaaagactccacgctcaggtgatgttggcgctacactagaatacctgcaaaagattcaaaatctattgtggactttttccattttggtgacgtagtctgttttgattcaggatatgcattgcaaggctatgataggccattggctttgtttacaggtgtgaatcatcataagcagacagttatctttggtgctgcaattatatatgatgaaagtaaagaagctttccaatggttattagatactttcaagatggcaatgaacggaacacatcccaagacattgttaactgatagatctgttgccttaagtgaagctgttgcagccacgttgcctgctacagcccatcgttattgtgtgtggcaaatttatcaaaatgctctgcagcagctgagtcaagctttccatggttcaaaaactctagaatgcaacttcaagagatgcctatttgattgtgaggatgaggatgagtttgtgacagcatggaaggaaatgttggaaaagtatgacctagaagataatcaatggctagcagatttgttctcaataaaggagaaatgggcactggcatatggccgcgatgcattttatgctgatatgaaaagcgtccagcaaaaggaaagtttgacaagtgagctgaagaaacatctatcattggaatgtgaccttttgaacttctttgagcagtttgaaagactgttatgtgatcgtcggtctgcagagatggaggctgatgtgaatgctaatcagagtacaaagaagccaccttctatgcgaatgttaaggcaagctgccaatgcatatacaccttctgcctttaaaatgtttgagagggaatttgaattgtacatggattgcatgctctacatctgtggtgagatgagcacaattttcgagtatagaataagtgttgaggacaagtcaagagatcacttcgttaaatttgattcactcaattccatgatgaattgtacttgtaagacgtttgaatttattggcatcccatgtcgccatatgctgaaggtacttgacatgaggaatatcaaggaccttcctgcccagtacatcatgaaaaggtggaggaaggatgccaaatcaggatcctcaaatggtggttgtgctttcttgtttgatggtgaccctgacttttctcacataaaacgttataattttttgtgtcgtatgttcagtgtagcagcggctagagctgcaacttctgatgaatcatttgcatatatggaaaaccagtcaaacatactgatggatcaaatagagcaagttattcaaaccaggccccctgacatagctgatcttattggtgctaattgtgatcgaacacaaaatccagttgacaatattgtcgctgaaggcattcaaagtcatactaattttcttagtggctccactgatggctctctaacatttccattcacattgggtgctggcacattggattaccgctgactggtacctactgttaggatggcatgcaaaatgacataatggatgttctactaatgtgttggtagcttcacattggctgcagagctgcaaataacaatggtacacctactgcactggtagttggcaggcctgatattgtctgccttaacttctcacccaaagaaaggaaggattttttccccttcgccagcactcattgtatgtacttgatgggaaatgatgtttcatgaggtagcacccgaaatatcacctggttttccagcctggtgattgtgcacagggtgctcccggtaatgagggactccgcctgctgtgttgccagtttacaaggtgatgatgctgaacttaaccaacgcgagcccatctgatttttaaccagtgctgtacgcctgtagcgtaatgctgttgcgatagccttgtcatgacagttgtgcaatgtacagattttttaacccattacgtaaatatattgacatgtgatcactggtttcaaattgccagctgtgcaatgtattatgctagggagtacatattaacagctacgtagtatttatttagaaaaaaattagaacggcttacaatttggaattgaggaagaatgtgagaatggaacatgaataagaatgaggacgtgaggcaat

SEQ ID NO: 66909 - DNA, 3424 bp, Zea Mays
atggcggggtggctggcgctagacgtcgccgcggaggcagaggcgaacgagaatgaggccacgacggaggatgcgaatgcgcagaggatcggtctcgaactctcaattgtccctagagggcttgggttccgtgttgagggcgttcaaattactaccaaaaaattgggagttcaagacaccctgatgccatcagcacctggggagaaggatccacaagttataccgaggcctgcgacggggcctcctctggtgcagactctcacgcctgtcaatgcaacaggaagtcctgccatagacccgaggctggcgcagccgtcttggcctggccatgtagtactcctgcgcccttgtgcagcttggcctcctcatttgccagtcccgttgctgcttccgcaccaaaatgtggatgtggctgcagcagatgttaaccctgcgatcgatagctgtgacgagaagatgttgcccaaggtgaatatgttgttcgatggtgaaagcgatgcgtatgagttctacaatgcatatgcggaaaaggtgggcttctttgtccgaaggtcaacgctctggacgacgtcaaagaacataatcactaggagaacttttgtgtgctcgagagaggggtttcgggagaagaagaagggagcaaaggaagcaaagtgcccacgtcccgaaacacgaattggatgccctgcaagcttgaccattagacttactgctaatggcaagtaccgtttgacagagtttgtgccgaatcataaccatcagctggcaacagcctctacagttcatatgctgaaaacaaagaaaatcaggcgcaaagcacgggctgcgagagaaaacctggcagatgataccgtgagtacaccagaatttgagaatgaagacgaggcatatgaattttacagcatgtatgcggggaaaattgggttcagcgtgcgcagggctagcatgacggtgaataatgagaatgttataaccagaagaatgtttgtttgttcaaaagaaggattccgtgagaagaaaagaggagcaaaaagagtaaagaaacctcgaccagaaacacgaactggctgtccggcatgtatggtcatcaggcttggaactaacgagaaatatcaagtcacagaatttgttacctgccacaatcaccagcttggagctgcagcagcttctgatcttgtcatggcatctgggagtacagaaaatgatcaagatgatggatttgatcaggcagatagatcacccgatgattctgttcacaagcaaaatctgatttatggaagtaccactctgagttccctagaaggtagaagttgcaaaagatacaagtatacaaagactccacgctcaggtgtgaatcatcataagcagacagttatctttggtgctgcaattatatatgatgaaagtaaagaagctttccaatggttattagatactttcaagatggcaatgaacggaacacatcccaagacattgttaactgatagatctgttgccttaagtgaagctgttgcagccacgttgcctgctacagcccatcgttattgtgtgtggcaaatttatcaaaatgctctgcagcagctgagtcaagctttccatggttcaaaaactctagaatgcaacttcaagagatgcctatttgattgtgaggatgaggatgagtttgtgacagcatggaaggaaatgttggaaaagtatgacctagaagataatcaatggctagcagatttgttctcaataaaggagaaatgggcactggcatatggccgcgatgcattttatgctgatatgaaaagcgtccagcaaaaggaaagtttgacaagtgagctgaagaaacatctatcattggaatgtgaccttttgaacttctttgagcagtttgaaagactgttatgtgatcgtcggtctgcagagatggaggctgatgtgaatgctaatcagagtacaaagaagccaccttctatgcgaatgttaaggcaagctgccaatgcatatacaccttctgcctttaaaatgtttgagagggaatttgaattgtacatggattgcatgctctacatctgtggtgagatgagcacaattttcgagtatagaataagtgttgaggacaagtcaagagatcacttcgttaaatttgattcactcaattccatgatgaattgtacttgtaagacgtttgaatttattggcatcccatgtcgccatatgctgaaggtacttgacatgaggaatatcaaggaccttcctgcccagtacatcatgaaaaggtggaggaaggatgccaaatcaggatcctcaaatggtggttgtgctttcttgtttgatggtgaccctgacttttctcacataaaacgttataattttttgtgtcgtatgttcagtgtagcagcggctagagctgcaacttctgatgaatcatttgcatatatggaaaaccagtcaaacatactgatggatcaaatagagcaagttattcaaaccaggccccctgacatagctgatcttattggtgctaattgtgatcgaacacaaaatccagttgacaatattgtcgctgaaggcattcaaagtcatactaattttcttagtggctccactgatggctctctaacatttccattcacattgggtgctggcacattggattaccgctgactggtacctactgttaggatggtactgcagtacagaacaaagcatgcaaaatgacataatggatgttctactaatgtgttggtagcttcacattggctgcagagctgcaaataacaatggtacacctactgcactggtagttggcaggtagattttacatttgctggagatccatttggttgtccttaggaagtaatctcaaaaataacttatgcacaacagctcacctccatgcgaaactacccaacatttcaggcctgatattgtctgccttaacttctcacccaaagaaaggaaggattttttccccttcgccagcactcattgtatgtacttgatgggaaatgatgtttcatgaggtagcacccgaaatatcacctggttttccagcctggtgattgtgcacagggtgctcccggtaatgagggactccgcctgctgtgttgccagtttacaaggtgatgatgctgaacttaaccaacgcgagcccatctgatttttaaccagtgctgtacgcctgtagcgtaatgctgttgcgatagccttgtcatgacagttgtgcaatgtacagattttttaacccattacgtaaatatattgacatgtgatcactggtttcaaattgccagctgtgcaatgtattatgctagggagtacatattaacagctacgtagtatttatttagaaaaaaattagaacggcttacaatttggaattgaggaagaatgtgagaatggaacatgaataagaatgaggacgtgaggcaat

SEQ ID NO: 66910 - DNA, 3544 bp, Zea Mays
atggcggggtggctggcgctagacgtcgccgcggaggcagaggcgaacgagaatgaggccacgacggaggatgcgaatgcgcagaggatcggtctcgaactctcaattgtccctagagggcttgggttccgtgttgagggcgttcaaattactaccaaaaaattgggagttcaagacaccctgatgccatcagcacctggggagaaggatccacaagttataccgaggcctgcgacggggcctcctctggtgcagactctcacgcctgtcaatgcaacaggaagtcctgccatagacccgaggctggcgcagccgtcttggcctggccatgtagtactcctgcgcccttgtgcagcttggcctcctcatttgccagtcccgttgctgcttccgcaccaaaatgtggatgctctggaggatgtggctgcagcagatgttaaccctgcgatcgatagctgtgacgagaagatgttgcccaaggtgaatatgttgttcgatggtgaaagcgatgcgtatgagttctacaatgcatatgcggaaaaggtgggcttctttgtccgaaggtcaacgctctggacgacgtcaaagaacataatcactaggagaacttttgtgtgctcgagagaggggtttcgggagaagaagaagggagcaaaggaagcaaagtgcccacgtcccgaaacacgaattggatgccctgcaagcttgaccattagacttactgctaatggcaagtaccgtttgacagagtttgtgccgaatcataaccatcagctggcaacagcctctacagttcatatgctgaaaacaaagaaaatcaggcgcaaagcacgggctgcgagagaaaacctggcagatgataccgtgagtacaccagaatttgagaatgaagacgaggcatatgaattttacagcatgtatgcggggaaaattgggttcagcgtgcgcagggctagcatgacggtgaataatgagaatgttataaccagaagaatgtttgtttgttcaaaagaaggattccgtgagaagaaaagaggagcaaaaagagtaaagaaacctcgaccagaaacacgaactggctgtccggcatgtatggtcatcaggcttggaactaacgagaaatatcaagtcacagaatttgttacctgccacaatcaccagcttggagctgcagcagcttctgatcttgtcatggcatctgggagtacagaaaatgatcaagatgatggatttgatcaggcagatagatcacccgatgattctgttcacaagcaaaatctgatttatggaagtaccactctgagttccctagaaggtagaagttgcaaaagatacaagtatacaaagactccacgctcaggtgatgttggcgctacactagaatacctgcaaaaggtgcaacatgataacccttcattcttctatgctgtaaaatctgatgatgatgggaacttcacaaattttttctgggcagattcaaaatctattgtggactttttccattttggtgacgtagtctgttttgattcaggatatgcattgcaaggctatgataggccattggctttgtttacaggtgtgaatcatcataagcagacagttatctttggtgctgcaattatatatgatgaaagtaaagaagctttccaatggttattagatactttcaagatggcaatgaacggaacacatcccaagacattgttaactgatagatctgttgccttaagtgaagctgttgcagccacgttgcctgctacagcccatcgttattgtgtgtggcaaatttatcaaaatgctctgcagcagctgagtcaagctttccatggttcaaaaactctagaatgcaacttcaagagatgcctatttgattgtgaggatgaggatgagtttgtgacagcatggaaggaaatgttggaaaagtatgacctagaagataatcaatggctagcagatttgttctcaataaaggagaaatgggcactggcatatggccgcgatgcattttatgctgatatgaaaagcgtccagcaaaaggaaagtttgacaagtgagctgaagaaacatctatcattggaatgtgaccttttgaacttctttgagcagtttgaaagactgttatgtgatcgtcggtctgcagagatggaggctgatgtgaatgctaatcagagtacaaagaagccaccttctatgcgaatgttaaggcaagctgccaatgcatatacaccttctgcctttaaaatgtttgagagggaatttgaattgtacatggattgcatgctctacatctgtggtgagatgagcacaattttcgagtatagaataagtgttgaggacaagtcaagagatcacttcgttaaatttgattcactcaattccatgatgaattgtacttgtaagacgtttgaatttattggcatcccatgtcgccatatgctgaaggtacttgacatgaggaatatcaaggaccttcctgcccagtacatcatgaaaaggtggaggaaggatgccaaatcaggatcctcaaatggtggttgtgctttcttgtttgatggtgaccctgacttttctcacataaaacgttataattttttgtgtcgtatgttcagtgtagcagcggctagagctgcaacttctgatgaatcatttgcatatatggaaaaccagtcaaacatactgatggatcaaatagagcaagttattcaaaccaggccccctgacatagctgatcttattggtgctaattgtgatcgaacacaaaatccagttgacaatattgtcgctgaaggcattcaaagtcatactaattttcttagtggctccactgatggctctctaacatttccattcacattgggtgctggcacattggattaccgctgactggtacctactgttaggatggtactgcagtacagaacaaagcatgcaaaatgacataatggatgttctactaatgtgttggtagcttcacattggctgcagagctgcaaataacaatggtacacctactgcactggtagttggcaggcctgatattgtctgccttaacttctcacccaaagaaaggaaggattttttccccttcgccagcactcattgtatgtacttgatgggaaatgatgtttcatgaggtagcacccgaaatatcacctggttttccagcctggtgattgtgcacagggtgctcccggtaatgagggactccgcctgctgtgttgccagtttacaaggtgatgatgctgaacttaaccaacgcgagcccatctgatttttaaccagtgctgtacgcctgtagcgtaatgctgttgcgatagccttgtcatgacagttgtgcaatgtacagattttttaacccattacgtaaatatattgacatgtgatcactggtttcaaattgccagctgtgcaatgtattatgctagggagtacatattaacagctacgtagtatttatttagaaaaaaattagaacggcttacaatttggaattgaggaagaatgtgagaatggaacatgaataagaatgaggacgtgaggcaat

SEQ ID NO: 66911 - DNA, 3217 bp, Zea Mays
atggcggggtggctggcgctagacgtcgccgcggaggcagaggcgaacgagaatgaggccacgacggaggatgcgaatgcgcagaggatcggtctcgaactctcaattgtccctagagggcttgggttccgtgttgagggcgttcaaattactaccaaaaaattgggagttcaagacaccctgatgccatcagcacctggggagaaggatccacaagttataccgaggcctgcgacggggcctcctctggtgcagactctcacgcctgtcaatgcaacaggaagtcctgccatagacccgaggctggcgcagccgtcttggcctggccatgtagtactcctgcgcccttgtgcagcttggcctcctcatttgccagtcccgttgctgcttccgcaccaaaatgtggatgtggctgcagcagatgttaaccctgcgatcgatagctgtgacgagaagatgttgcccaaggtgaatatgttgttcgatggtgaaagcgatgcgtatgagttctacaatgcatatgcggaaaaggtgggcttctttgtccgaaggtcaacgctctggacgacgtcaaagaacataatcactaggagaacttttgtgtgctcgagagaggggtttcgggagaagaagaagggagcaaaggaagcaaagtgcccacgtcccgaaacacgaattggatgccctgcaagcttgaccattagacttactgctaatggcaagtaccgtttgacagagtttgtgccgaatcataaccatcagctggcaacagcctctacagttcatatgctgaaaacaaagaaaatcaggcgcaaagcacgggctgcgagagaaaacctggcagatgataccgtgagtacaccagaatttgagaatgaagacgaggcatatgaattttacagcatgtatgcggggaaaattgggttcagcgtgcgcagggctagcatgacggtgaataatgagaatgttataaccagaagaatgtttgtttgttcaaaagaaggattccgtgagaagaaaagaggagcaaaaagagtaaagaaacctcgaccagaaacacgaactggctgtccggcatgtatggtcatcaggcttggaactaacgagaaatatcaagtcacagaatttgttacctgccacaatcaccagcttggagctgcagcagcttctgatcttgtcatggcatctgggagtacagaaaatgatcaagatgatggatttgatcaggcagatagatcacccgatgattctgttcacaagcaaaatctgatttatggaagtaccactctgagttccctagaaggtagaagttgcaaaagatacaagtatacaaagactccacgctcaggtgatgttggcgctacactagaatacctgcaaaaggtgtgaatcatcataagcagacagttatctttggtgctgcaattatatatgatgaaagtaaagaagctttccaatggttattagatactttcaagatggcaatgaacggaacacatcccaagacattgttaactgatagatctgttgccttaagtgaagctgttgcagccacgttgcctgctacagcccatcgttattgtgtgtggcaaatttatcaaaatgctctgcagcagctgagtcaagctttccatggttcaaaaactctagaatgcaacttcaagagatgcctatttgattgtgaggatgaggatgagtttgtgacagcatggaaggaaatgttggaaaagtatgacctagaagataatcaatggctagcagatttgttctcaataaaggagaaatgggcactggcatatggccgcgatgcattttatgctgatatgaaaagcgtccagcaaaaggaaagtttgacaagtgagctgaagaaacatctatcattggaatgtgaccttttgaacttctttgagcagtttgaaagactgttatgtgatcgtcggtctgcagagatggaggctgatgtgaatgctaatcagagtacaaagaagccaccttctatgcgaatgttaaggcaagctgccaatgcatatacaccttctgcctttaaaatgtttgagagggaatttgaattgtacatggattgcatgctctacatctgtggtgagatgagcacaattttcgagtatagaataagtgttgaggacaagtcaagagatcacttcgttaaatttgattcactcaattccatgatgaattgtacttgtaagacgtttgaatttattggcatcccatgtcgccatatgctgaaggtacttgacatgaggaatatcaaggaccttcctgcccagtacatcatgaaaagtgtagcagcggctagagctgcaacttctgatgaatcatttgcatatatggaaaaccagtcaaacatactgatggatcaaatagagcaagttattcaaaccaggccccctgacatagctgatcttattggtgctaattgtgatcgaacacaaaatccagttgacaatattgtcgctgaaggcattcaaagtcatactaattttcttagtggctccactgatggctctctaacatttccattcacattgggtgctggcacattggattaccgctgactggtacctactgttaggatggcatgcaaaatgacataatggatgttctactaatgtgttggtagcttcacattggctgcagagctgcaaataacaatggtacacctactgcactggtagttggcaggcctgatattgtctgccttaacttctcacccaaagaaaggaaggattttttccccttcgccagcactcattgtatgtacttgatgggaaatgatgtttcatgaggtagcacccgaaatatcacctggttttccagcctggtgattgtgcacagggtgctcccggtaatgagggactccgcctgctgtgttgccagtttacaaggtgatgatgctgaacttaaccaacgcgagcccatctgatttttaaccagtgctgtacgcctgtagcgtaatgctgttgcgatagccttgtcatgacagttgtgcaatgtacagattttttaacccattacgtaaatatattgacatgtgatcactggtttcaaattgccagctgtgcaatgtattatgctagggagtacatattaacagctacgtagtatttatttagaaaaaaattagaacggcttacaatttggaattgaggaagaatgtgagaatggaacatgaataagaatgaggacgtgaggcaat

SEQ ID NO: 66912 - DNA, 3580 bp, Zea Mays
atggcggggtggctggcgctagacgtcgccgcggaggcagaggcgaacgagaatgaggccacgacggaggatgcgaatgcgcagaggatcggtctcgaactctcaattgtccctagagggcttgggttccgtgttgagggcgttcaaattactaccaaaaaattgggagttcaagacaccctgatgccatcagcacctggggagaaggatccacaagttataccgaggcctgcgacggggcctcctctggtgcagactctcacgcctgtcaatgcaacaggaagtcctgccatagacccgaggctggcgcagccgtcttggcctggccatgtagtactcctgcgcccttgtgcagcttggcctcctcatttgccagtcccgttgctgcttccgcaccaaaatgtggatgtggctgcagcagatgttaaccctgcgatcgatagctgtgacgagaagatgttgcccaaggtgaatatgttgttcgatggtgaaagcgatgcgtatgagttctacaatgcatatgcggaaaaggtgggcttctttgtccgaaggtcaacgctctggacgacgtcaaagaacataatcactaggagaacttttgtgtgctcgagagaggggtttcgggagaagaagaagggagcaaaggaagcaaagtgcccacgtcccgaaacacgaattggatgccctgcaagcttgaccattagacttactgctaatggcaagtaccgtttgacagagtttgtgccgaatcataaccatcagctggcaacagcctctacagttcatatgctgaaaacaaagaaaatcaggcgcaaagcacgggctgcgagagaaaacctggcagatgataccgtgagtacaccagaatttgagaatgaagacgaggcatatgaattttacagcatgtatgcggggaaaattgggttcagcgtgcgcagggctagcatgacggtgaataatgagaatgttataaccagaagaatgtttgtttgttcaaaagaaggattccgtgagaagaaaagaggagcaaaaagagtaaagaaacctcgaccagaaacacgaactggctgtccggcatgtatggtcatcaggcttggaactaacgagaaatatcaagtcacagaatttgttacctgccacaatcaccagcttggagctgcagcagcttctgatcttgtcatggcatctgggagtacagaaaatgatcaagatgatggatttgatcaggcagatagatcacccgatgattctgttcacaagcaaaatctgatttatggaagtaccactctgagttccctagaaggtagaagttgcaaaagatacaagtatacaaagactccacgctcaggtgatgttggcgctacactagaatacctgcaaaaggtgcaacatgataacccttcattcttctatgctgtaaaatctgatgatgatgggaacttcacaaattttttctgggcagattcaaaatctattgtggactttttccattttggtgacgtagtctgttttgattcaggatatgcattgcaaggctatgataggccattggctttgtttacaggtgtgaatcatcataagcagacagttatctttggtgctgcaattatatatgatgaaagtaaagaagctttccaatggttattagatactttcaagatggcaatgaacggaacacatcccaagacattgttaactgatagatctgttgccttaagtgaagctgttgcagccacgttgcctgctacagcccatcgttattgtgtgtggcaaatttatcaaaatgctctgcagcagctgagtcaagctttccatggttcaaaaactctagaatgcaacttcaagagatgcctatttgattgtgaggatgaggatgagtttgtgacagcatggaaggaaatgttggaaaagtatgacctagaagataatcaatggctagcagatttgttctcaataaaggagaaatgggcactggcatatggccgcgatgcattttatgctgatatgaaaagcgtccagcaaaaggaaagtttgacaagtgagctgaagaaacatctatcattggaatgtgaccttttgaacttctttgagcagtttgaaagactgttatgtgatcgtcggtctgcagagatggaggctgatgtgaatgctaatcagagtacaaagaagccaccttctatgcgaatgttaaggcaagctgccaatgcatatacaccttctgcctttaaaatgtttgagagggaatttgaattgtacatggattgcatgctctacatctgtggtgagatgagcacaattttcgagtatagaataagtgttgaggacaagtcaagagatcacttcgttaaatttgattcactcaattccatgatgaattgtacttgtaagacgtttgaatttattggcatcccatgtcgccatatgctgaaggtacttgacatgaggaatatcaaggaccttcctgcccagtacatcatgaaaaggtggaggaaggatgccaaatcaggatcctcaaatggtggttgtgctttcttgtttgatggtgaccctgacttttctcacataaaacgttataattttttgtgtcgtatgttcagtgtagcagcggctagagctgcaacttctgatgaatcatttgcatatatggaaaaccagtcaaacatactgatggatcaaatagagcaagttattcaaaccaggccccctgacatagctgatcttattggtgctaattgtgatcgaacacaaaatccagttgacaatattgtcgctgaaggcattcaaagtcatactaattttcttagtggctccactgatggtatgtgttgaagtattggttttctttccatataaatacttgttgccacccaataaatgcattatgtgcattgcaggctctctaacatttccattcacattgggtgctggcacattggattaccgctgactggtacctactgttaggatggtactgcagtacagaacaaagcatgcaaaatgacataatggatgttctactaatgtgttggtagcttcacattggctgcagagctgcaaataacaatggcctgatattgtctgccttaacttctcacccaaagaaaggaaggattttttccccttcgccagcactcattgtatgtacttgatgggaaatgatgtttcatgaggtagcacccgaaatatcacctggttttccagcctggtgattgtgcacagggtgctcccggtaatgagggactccgcctgctgtgttgccagtttacaaggtgatgatgctgaacttaaccaacgcgagcccatctgatttttaaccagtgctgtacgcctgtagcgtaatgctgttgcgatagccttgtcatgacagttgtgcaatgtacagattttttaacccattacgtaaatatattgacatgtgatcactggtttcaaattgccagctgtgcaatgtattatgctagggagtacatattaacagctacgtagtatttatttagaaaaaaattagaacggcttacaatttggaattgaggaagaatgtgagaatggaacatgaataagaatgaggacgtgaggcaat

SEQ ID NO: 66913 - DNA, 3466 bp, Zea Mays
tctgactccgtcatcgccgtcctcttctttgcccgtcggccggcgccgccgcagaaaccagccacccgagtgagctcttccagtcgtacttgtattaatcggcccactgtccggctactggtattaggttcgtgttgactggagattcagaattcatttttgtttgttgtgacagctggtgatccatctcgtgctcaaggatcggtctcgaactctcaattgtccctagagggcttgggttccgtgttgagggcgttcaaattactaccaaaaaattgggagttcaagacaccctgatgccatcagcacctggggagaaggatccacaagttataccgaggcctgcgacggggcctcctctggtgcagactctcacgcctgtcaatgcaacaggaagtcctgccatagacccgaggctggcgcagccgtcttggcctggccatgtagtactcctgcgcccttgtgcagcttggcctcctcatttgccagtcccgttgctgcttccgcaccaaaatgtggatgctctggaggatgtggctgcagcagatgttaaccctgcgatcgatagctgtgacgagaagatgttgcccaaggtgaatatgttgttcgatggtgaaagcgatgcgtatgagttctacaatgcatatgcggaaaaggtgggcttctttgtccgaaggtcaacgctctggacgacgtcaaagaacataatcactaggagaacttttgtgtgctcgagagaggggtttcgggagaagaagaagggagcaaaggaagcaaagtgcccacgtcccgaaacacgaattggatgccctgcaagcttgaccattagacttactgctaatggcaagtaccgtttgacagagtttgtgccgaatcataaccatcagctggcaacagcctctacagttcatatgctgaaaacaaagaaaatcaggcgcaaagcacgggctgcgagagaaaacctggcagatgataccgtgagtacaccagaatttgagaatgaagacgaggcatatgaattttacagcatgtatgcggggaaaattgggttcagcgtgcgcagggctagcatgacggtgaataatgagaatgttataaccagaagaatgtttgtttgttcaaaagaaggattccgtgagaagaaaagaggagcaaaaagagtaaagaaacctcgaccagaaacacgaactggctgtccggcatgtatggtcatcaggcttggaactaacgagaaatatcaagtcacagaatttgttacctgccacaatcaccagcttggagctgcagcagcttctgatcttgtcatggcatctgggagtacagaaaatgatcaagatgatggatttgatcaggcagatagatcacccgatgattctgttcacaagcaaaatctgatttatggaagtaccactctgagttccctagaaggtagaagttgcaaaagatacaagtatacaaagactccacgctcaggatatgcattgcaaggctatgataggccattggctttgtttacaggtgtgaatcatcataagcagacagttatctttggtgctgcaattatatatgatgaaagtaaagaagctttccaatggttattagatactttcaagatggcaatgaacggaacacatcccaagacattgttaactgatagatctgttgccttaagtgaagctgttgcagccacgttgcctgctacagcccatcgttattgtgtgtggcaaatttatcaaaatgctctgcagcagctgagtcaagctttccatggttcaaaaactctagaatgcaacttcaagagatgcctatttgattgtgaggatgaggatgagtttgtgacagcatggaaggaaatgttggaaaagtatgacctagaagataatcaatggctagcagatttgttctcaataaaggagaaatgggcactggcatatggccgcgatgcattttatgctgatatgaaaagcgtccagcaaaaggaaagtttgacaagtgagctgaagaaacatctatcattggaatgtgaccttttgaacttctttgagcagtttgaaagactgttatgtgatcgtcggtctgcagagatggaggctgatgtgaatgctaatcagagtacaaagaagccaccttctatgcgaatgttaaggcaagctgccaatgcatatacaccttctgcctttaaaatgtttgagagggaatttgaattgtacatggattgcatgctctacatctgtggtgagatgagcacaattttcgagtatagaataagtgttgaggacaagtcaagagatcacttcgttaaatttgattcactcaattccatgatgaattgtacttgtaagacgtttgaatttattggcatcccatgtcgccatatgctgaaggtacttgacatgaggaatatcaaggaccttcctgcccagtacatcatgaaaaggtggaggaaggatgccaaatcaggatcctcaaatggtggttgtgctttcttgtttgatggtgaccctgacttttctcacataaaacgttataattttttgtgtcgtatgttcagtgtagcagcggctagagctgcaacttctgatgaatcatttgcatatatggaaaaccagtcaaacatactgatggatcaaatagagcaagttattcaaaccaggccccctgacatagctgatcttattggtgctaattgtgatcgaacacaaaatccagttgacaatattgtcgctgaaggcattcaaagtcatactaattttcttagtggctccactgatggctctctaacatttccattcacattgggtgctggcacattggattaccgctgactggtacctactgttaggatggcatgcaaaatgacataatggatgttctactaatgtgttggtagcttcacattggctgcagagctgcaaataacaatggtacacctactgcactggtagttggcaggcctgatattgtctgccttaacttctcacccaaagaaaggaaggattttttccccttcgccagcactcattgtatgtacttgatgggaaatgatgtttcatgaggtagcacccgaaatatcacctggttttccagcctggtgattgtgcacagggtgctcccggtaatgagggactccgcctgctgtgttgccagtttacaaggtgatgatgctgaacttaaccaacgcgagcccatctgatttttaaccagtgctgtacgcctgtagcgtaatgctgttgcgatagccttgtcatgacagttgtgcaatgtacagattttttaacccattacgtaaatatattgacatgtgatcactggtttcaaattgccagctgtgcaatgtattatgctagggagtacatattaacagctacgtagtatttatttagaaaaaaattagaacggcttacaatttggaattgaggaagaatgtgagaatggaacatgaataagaatgaggacgtgaggcaat

SEQ ID NO: 66914 - DNA, 3598 bp, Zea Mays
ctgactccgtcatcgccgtcctcttctttgcccgtcggccggcgccgccgcagaaaccagccacccgagtgagctcttccagtcgtacttgtattaatcggcccactgtccggctactggtattaggttcgtgttgactggagattcagaattcatttttgtttgttggtaaggaaccctaacttccttgttcccgaggagcaatcacatccgattttccgctcctccatcagtggcgtaggtgctagtccaatcgagcgtccgttttattttctgggttcagtgacagctggtgatccatctcgtgctcaaggatcggtctcgaactctcaattgtccctagagggcttgggttccgtgttgagggcgttcaaattactaccaaaaaattgggagttcaagacaccctgatgccatcagcacctggggagaaggatccacaagttataccgaggcctgcgacggggcctcctctggtgcagactctcacgcctgtcaatgcaacaggaagtcctgccatagacccgaggctggcgcagccgtcttggcctggccatgtagtactcctgcgcccttgtgcagcttggcctcctcatttgccagtcccgttgctgcttccgcaccaaaatgtggatgctctggaggatgtggctgcagcagatgttaaccctgcgatcgatagctgtgacgagaagatgttgcccaaggtgaatatgttgttcgatggtgaaagcgatgcgtatgagttctacaatgcatatgcggaaaaggtgggcttctttgtccgaaggtcaacgctctggacgacgtcaaagaacataatcactaggagaacttttgtgtgctcgagagaggggtttcgggagaagaagaagggagcaaaggaagcaaagtgcccacgtcccgaaacacgaattggatgccctgcaagcttgaccattagacttactgctaatggcaagtaccgtttgacagagtttgtgccgaatcataaccatcagctggcaacagcctctacagttcatatgctgaaaacaaagaaaatcaggcgcaaagcacgggctgcgagagaaaacctggcagatgataccgtgagtacaccagaatttgagaatgaagacgaggcatatgaattttacagcatgtatgcggggaaaattgggttcagcgtgcgcagggctagcatgacggtgaataatgagaatgttataaccagaagaatgtttgtttgttcaaaagaaggattccgtgagaagaaaagaggagcaaaaagagtaaagaaacctcgaccagaaacacgaactggctgtccggcatgtatggtcatcaggcttggaactaacgagaaatatcaagtcacagaatttgttacctgccacaatcaccagcttggagctgcagcagcttctgatcttgtcatggcatctgggagtacagaaaatgatcaagatgatggatttgatcaggcagatagatcacccgatgattctgttcacaagcaaaatctgatttatggaagtaccactctgagttccctagaaggtagaagttgcaaaagatacaagtatacaaagactccacgctcaggtgatgttggcgctacactagaatacctgcaaaagattcaaaatctattgtggactttttccattttggtgacgtagtctgttttgattcaggatatgcattgcaaggctatgataggccattggctttgtttacaggtgtgaatcatcataagcagacagttatctttggtgctgcaattatatatgatgaaagtaaagaagctttccaatggttattagatactttcaagatggcaatgaacggaacacatcccaagacattgttaactgatagatctgttgccttaagtgaagctgttgcagccacgttgcctgctacagcccatcgttattgtgtgtggcaaatttatcaaaatgctctgcagcagctgagtcaagctttccatggttcaaaaactctagaatgcaacttcaagagatgcctatttgattgtgaggatgaggatgagtttgtgacagcatggaaggaaatgttggaaaagtatgacctagaagataatcaatggctagcagatttgttctcaataaaggagaaatgggcactggcatatggccgcgatgcattttatgctgatatgaaaagcgtccagcaaaaggaaagtttgacaagtgagctgaagaaacatctatcattggaatgtgaccttttgaacttctttgagcagtttgaaagactgttatgtgatcgtcggtctgcagagatggaggctgatgtgaatgctaatcagagtacaaagaagccaccttctatgcgaatgttaaggcaagctgccaatgcatatacaccttctgcctttaaaatgtttgagagggaatttgaattgtacatggattgcatgctctacatctgtggtgagatgagcacaattttcgagtatagaataagtgttgaggacaagtcaagagatcacttcgttaaatttgattcactcaattccatgatgaattgtacttgtaagacgtttgaatttattggcatcccatgtcgccatatgctgaaggtacttgacatgaggaatatcaaggaccttcctgcccagtacatcatgaaaaggtggaggaaggatgccaaatcaggatcctcaaatggtggttgtgctttcttgtttgatggtgaccctgacttttctcacataaaacgttataattttttgtgtcgtatgttcagtgtagcagcggctagagctgcaacttctgatgaatcatttgcatatatggaaaaccagtcaaacatactgatggatcaaatagagcaagttattcaaaccaggccccctgacatagctgatcttattggtgctaattgtgatcgaacacaaaatccagttgacaatattgtcgctgaaggcattcaaagtcatactaattttcttagtggctccactgatggcatgcaaaatgacataatggatgttctactaatgtgttggtagcttcacattggctgcagagctgcaaataacaatggtacacctactgcactggtagttggcaggcctgatattgtctgccttaacttctcacccaaagaaaggaaggattttttccccttcgccagcactcattgtatgtacttgatgggaaatgatgtttcatgaggtagcacccgaaatatcacctggttttccagcctggtgattgtgcacagggtgctcccggtaatgagggactccgcctgctgtgttgccagtttacaaggtgatgatgctgaacttaaccaacgcgagcccatctgatttttaaccagtgctgtacgcctgtagcgtaatgctgttgcgatagccttgtcatgacagttgtgcaatgtacagattttttaacccattacgtaaatatattgacatgtgatcactggtttcaaattgccagctgtgcaatgtattatgctagggagtacatattaacagctacgtagtatttatttagaaaaaaattagaacggcttacaatttggaattgaggaagaatgtgagaatggaacatgaataagaatgaggacgtgaggcaat

SEQ ID NO: 66915 - DNA, 3590 bp, Zea Mays
ctgactccgtcatcgccgtcctcttctttgcccgtcggccggcgccgccgcagaaaccagccacccgagtgagctcttccagtcgtacttgtattaatcggcccactgtccggctactggtattaggttcgtgttgactggagattcagaattcatttttgtttgttggtaaggaaccctaacttccttgttcccgaggagcaatcacatccgattttccgctcctccatcagtggcgtaggtgctagtccaatcgagcgtccgttttattttctgggttcagtgacagctggtgatccatctcgtgctcaaggatcggtctcgaactctcaattgtccctagagggcttgggttccgtgttgagggcgttcaaattactaccaaaaaattgggagttcaagacaccctgatgccatcagcacctggggagaaggatccacaagttataccgaggcctgcgacggggcctcctctggtgcagactctcacgcctgtcaatgcaacaggaagtcctgccatagacccgaggctggcgcagccgtcttggcctggccatgtagtactcctgcgcccttgtgcagcttggcctcctcatttgccagtcccgttgctgcttccgcaccaaaatgtggatgctctggaggatgtggctgcagcagatgttaaccctgcgatcgatagctgtgacgagaagatgttgcccaaggtgaatatgttgttcgatggtgaaagcgatgcgtatgagttctacaatgcatatgcggaaaaggtgggcttctttgtccgaaggtcaacgctctggacgacgtcaaagaacataatcactaggagaacttttgtgtgctcgagagaggggtttcgggagaagaagaagggagcaaaggaagcaaagtgcccacgtcccgaaacacgaattggatgccctgcaagcttgaccattagacttactgctaatggcaagtaccgtttgacagagtttgtgccgaatcataaccatcagctggcaacagcctctacagttcatatgctgaaaacaaagaaaatcaggcgcaaagcacgggctgcgagagaaaacctggcagatgataccgtgagtacaccagaatttgagaatgaagacgaggcatatgaattttacagcatgtatgcggggaaaattgggttcagcgtgcgcagggctagcatgacggtgaataatgagaatgttataaccagaagaatgtttgtttgttcaaaagaaggattccgtgagaagaaaagaggagcaaaaagagtaaagaaacctcgaccagaaacacgaactggctgtccggcatgtatggtcatcaggcttggaactaacgagaaatatcaagtcacagaatttgttacctgccacaatcaccagcttggagctgcagcagcttctgatcttgtcatggcatctgggagtacagaaaatgatcaagatgatggatttgatcaggcagatagatcacccgatgattctgttcacaagcaaaatctgatttatggaagtaccactctgagttccctagaaggtagaagttgcaaaagatacaagtatacaaagactccacgctcaggtgatgttggcgctacactagaatacctgcaaaaggtgtgaatcatcataagcagacagttatctttggtgctgcaattatatatgatgaaagtaaagaagctttccaatggttattagatactttcaagatggcaatgaacggaacacatcccaagacattgttaactgatagatctgttgccttaagtgaagctgttgcagccacgttgcctgctacagcccatcgttattgtgtgtggcaaatttatcaaaatgctctgcagcagctgagtcaagctttccatggttcaaaaactctagaatgcaacttcaagagatgcctatttgattgtgaggatgaggatgagtttgtgacagcatggaaggaaatgttggaaaagtatgacctagaagataatcaatggctagcagatttgttctcaataaaggagaaatgggcactggcatatggccgcgatgcattttatgctgatatgaaaagcgtccagcaaaaggaaagtttgacaagtgagctgaagaaacatctatcattggaatgtgaccttttgaacttctttgagcagtttgaaagactgttatgtgatcgtcggtctgcagagatggaggctgatgtgaatgctaatcagagtacaaagaagccaccttctatgcgaatgttaaggcaagctgccaatgcatatacaccttctgcctttaaaatgtttgagagggaatttgaattgtacatggattgcatgctctacatctgtggtgagatgagcacaattttcgagtatagaataagtgttgaggacaagtcaagagatcacttcgttaaatttgattcactcaattccatgatgaattgtacttgtaagacgtttgaatttattggcatcccatgtcgccatatgctgaaggtacttgacatgaggaatatcaaggaccttcctgcccagtacatcatgaaaaggtggaggaaggatgccaaatcaggatcctcaaatggtggttgtgctttcttgtttgatggtgaccctgacttttctcacataaaacgttataattttttgtgtcgtatgttcagtgtagcagcggctagagctgcaacttctgatgaatcatttgcatatatggaaaaccagtcaaacatactgatggatcaaatagagcaagttattcaaaccaggccccctgacatagctgatcttattggtgctaattgtgatcgaacacaaaatccagttgacaatattgtcgctgaaggcattcaaagtcatactaattttcttagtggctccactgatggctctctaacatttccattcacattgggtgctggcacattggattaccgctgactggtacctactgttaggatggtactgcagtacagaacaaagcatgcaaaatgacataatggatgttctactaatgtgttggtagcttcacattggctgcagagctgcaaataacaatggtacacctactgcactggtagttggcaggcctgatattgtctgccttaacttctcacccaaagaaaggaaggattttttccccttcgccagcactcattgtatgtacttgatgggaaatgatgtttcatgaggtagcacccgaaatatcacctggttttccagcctggtgattgtgcacagggtgctcccggtaatgagggactccgcctgctgtgttgccagtttacaaggtgatgatgctgaacttaaccaacgcgagcccatctgatttttaaccagtgctgtacgcctgtagcgtaatgctgttgcgatagccttgtcatgacagttgtgcaatgtacagattttttaacccattacgtaaatatattgacatgtgatcactggtttcaaattgccagctgtgcaatgtattatgctagggagtacatattaacagctacgtagtatttatttagaaaaaaattagaacggcttacaatttggaattgaggaagaatgtgagaatggaacatgaataagaatgaggacgtgaggcaat

SEQ ID NO: 66916 - DNA, 3644 bp, Zea Mays
ctgactccgtcatcgccgtcctcttctttgcccgtcggccggcgccgccgcagaaaccagccacccgagtgagctcttccagtcgtacttgtattaatcggcccactgtccggctactggtattaggttcgtgttgactggagattcagaattcatttttgtttgttgtgacagctggtgatccatctcgtgctcaaggatcggtctcgaactctcaattgtccctagagggcttgggttccgtgttgagggcgttcaaattactaccaaaaaattgggagttcaagacaccctgatgccatcagcacctggggagaaggatccacaagttataccgaggcctgcgacggggcctcctctggtgcagactctcacgcctgtcaatgcaacaggaagtcctgccatagacccgaggctggcgcagccgtcttggcctggccatgtagtactcctgcgcccttgtgcagcttggcctcctcatttgccagtcccgttgctgcttccgcaccaaaatgtggatgtggctgcagcagatgttaaccctgcgatcgatagctgtgacgagaagatgttgcccaaggtgaatatgttgttcgatggtgaaagcgatgcgtatgagttctacaatgcatatgcggaaaaggtgggcttctttgtccgaaggtcaacgctctggacgacgtcaaagaacataatcactaggagaacttttgtgtgctcgagagaggggtttcgggagaagaagaagggagcaaaggaagcaaagtgcccacgtcccgaaacacgaattggatgccctgcaagcttgaccattagacttactgctaatggcaagtaccgtttgacagagtttgtgccgaatcataaccatcagctggcaacagcctctacagttcatatgctgaaaacaaagaaaatcaggcgcaaagcacgggctgcgagagaaaacctggcagatgataccgtgagtacaccagaatttgagaatgaagacgaggcatatgaattttacagcatgtatgcggggaaaattgggttcagcgtgcgcagggctagcatgacggtgaataatgagaatgttataaccagaagaatgtttgtttgttcaaaagaaggattccgtgagaagaaaagaggagcaaaaagagtaaagaaacctcgaccagaaacacgaactggctgtccggcatgtatggtcatcaggcttggaactaacgagaaatatcaagtcacagaatttgttacctgccacaatcaccagcttggagctgcagcagcttctgatcttgtcatggcatctgggagtacagaaaatgatcaagatgatggatttgatcaggcagatagatcacccgatgattctgttcacaagcaaaatctgatttatggaagtaccactctgagttccctagaaggtagaagttgcaaaagatacaagtatacaaagactccacgctcaggtgatgttggcgctacactagaatacctgcaaaaggtgcaacatgataacccttcattcttctatgctgtaaaatctgatgatgatgggaacttcacaaattttttctgggcagattcaaaatctattgtggactttttccattttggtgacgtagtctgttttgattcaggatatgcattgcaaggctatgataggccattggctttgtttacaggtgtgaatcatcataagcagacagttatctttggtgctgcaattatatatgatgaaagtaaagaagctttccaatggttattagatactttcaagatggcaatgaacggaacacatcccaagacattgttaactgatagatctgttgccttaagtgaagctgttgcagccacgttgcctgctacagcccatcgttattgtgtgtggcaaatttatcaaaatgctctgcagcagctgagtcaagctttccatggttcaaaaactctagaatgcaacttcaagagatgcctatttgattgtgaggatgaggatgagtttgtgacagcatggaaggaaatgttggaaaagtatgacctagaagataatcaatggctagcagatttgttctcaataaaggagaaatgggcactggcatatggccgcgatgcattttatgctgatatgaaaagcgtccagcaaaaggaaagtttgacaagtgagctgaagaaacatctatcattggaatgtgaccttttgaacttctttgagcagtttgaaagactgttatgtgatcgtcggtctgcagagatggaggctgatgtgaatgctaatcagagtacaaagaagccaccttctatgcgaatgttaaggcaagctgccaatgcatatacaccttctgcctttaaaatgtttgagagggaatttgaattgtacatggattgcatgctctacatctgtggtgagatgagcacaattttcgagtatagaataagtgttgaggacaagtcaagagatcacttcgttaaatttgattcactcaattccatgatgaattgtacttgtaagacgtttgaatttattggcatcccatgtcgccatatgctgaaggtacttgacatgaggaatatcaaggaccttcctgcccagtacatcatgaaaaggtggaggaaggatgccaaatcaggatcctcaaatggtggttgtgctttcttgtttgatggtgaccctgacttttctcacataaaacgttataattttttgtgtcgtatgttcagtgtagcagcggctagagctgcaacttctgatgaatcatttgcatatatggaaaaccagtcaaacatactgatggatcaaatagagcaagttattcaaaccaggccccctgacatagctgatcttattggtgctaattgtgatcgaacacaaaatccagttgacaatattgtcgctgaaggcattcaaagtcatactaattttcttagtggctccactgatggctctctaacatttccattcacattgggtgctggcacattggattaccgctgactggtacctactgttaggatggtactgcagtacagaacaaagcatgcaaaatgacataatggatgttctactaatgtgttggtagcttcacattggctgcagagctgcaaataacaatggtacacctactgcactggtagttggcaggcctgatattgtctgccttaacttctcacccaaagaaaggaaggattttttccccttcgccagcactcattgtatgtacttgatgggaaatgatgtttcatgaggtagcacccgaaatatcacctggttttccagcctggtgattgtgcacagggtgctcccggtaatgagggactccgcctgctgtgttgccagtttacaaggtgatgatgctgaacttaaccaacgcgagcccatctgatttttaaccagtgctgtacgcctgtagcgtaatgctgttgcgatagccttgtcatgacagttgtgcaatgtacagattttttaacccattacgtaaatatattgacatgtgatcactggtttcaaattgccagctgtgcaatgtattatgctagggagtacatattaacagctacgtagtatttatttagaaaaaaattagaacggcttacaatttggaattgaggaagaatgtgagaatggaacatgaataagaatgaggacgtgaggcaat

SEQ ID NO: 66917 - DNA, 3485 bp, Zea Mays
ctgactccgtcatcgccgtcctcttctttgcccgtcggccggcgccgccgcagaaaccagccacccgagtgagctcttccagtcgtacttgtattaatcggcccactgtccggctactggtattaggttcgtgttgactggagattcagaattcatttttgtttgttgtgacagctggtgatccatctcgtgctcaaggatcggtctcgaactctcaattgtccctagagggcttgggttccgtgttgagggcgttcaaattactaccaaaaaattgggagttcaagacaccctgatgccatcagcacctggggagaaggatccacaagttataccgaggcctgcgacggggcctcctctggtgcagactctcacgcctgtcaatgcaacaggaagtcctgccatagacccgaggctggcgcagccgtcttggcctggccatgtagtactcctgcgcccttgtgcagcttggcctcctcatttgccagtcccgttgctgcttccgcaccaaaatgtggatgctctggaggatgtggctgcagcagatgttaaccctgcgatcgatagctgtgacgagaagatgttgcccaaggtgaatatgttgttcgatggtgaaagcgatgcgtatgagttctacaatgcatatgcggaaaaggtgggcttctttgtccgaaggtcaacgctctggacgacgtcaaagaacataatcactaggagaacttttgtgtgctcgagagaggggtttcgggagaagaagaagggagcaaaggaagcaaagtgcccacgtcccgaaacacgaattggatgccctgcaagcttgaccattagacttactgctaatggcaagtaccgtttgacagagtttgtgccgaatcataaccatcagctggcaacagcctctacagttcatatgctgaaaacaaagaaaatcaggcgcaaagcacgggctgcgagagaaaacctggcagatgataccgtgagtacaccagaatttgagaatgaagacgaggcatatgaattttacagcatgtatgcggggaaaattgggttcagcgtgcgcagggctagcatgacggtgaataatgagaatgttataaccagaagaatgtttgtttgttcaaaagaaggattccgtgagaagaaaagaggagcaaaaagagtaaagaaacctcgaccagaaacacgaactggctgtccggcatgtatggtcatcaggcttggaactaacgagaaatatcaagtcacagaatttgttacctgccacaatcaccagcttggagctgcagcagcttctgatcttgtcatggcatctgggagtacagaaaatgatcaagatgatggatttgatcaggcagatagatcacccgatgattctgttcacaagcaaaatctgatttatggaagtaccactctgagttccctagaaggtagaagttgcaaaagatacaagtatacaaagactccacgctcaggatatgcattgcaaggctatgataggccattggctttgtttacaggtgtgaatcatcataagcagacagttatctttggtgctgcaattatatatgatgaaagtaaagaagctttccaatggttattagatactttcaagatggcaatgaacggaacacatcccaagacattgttaactgatagatctgttgccttaagtgaagctgttgcagccacgttgcctgctacagcccatcgttattgtgtgtggcaaatttatcaaaatgctctgcagcagctgagtcaagctttccatggttcaaaaactctagaatgcaacttcaagagatgcctatttgattgtgaggatgaggatgagtttgtgacagcatggaaggaaatgttggaaaagtatgacctagaagataatcaatggctagcagatttgttctcaataaaggagaaatgggcactggcatatggccgcgatgcattttatgctgatatgaaaagcgtccagcaaaaggaaagtttgacaagtgagctgaagaaacatctatcattggaatgtgaccttttgaacttctttgagcagtttgaaagactgttatgtgatcgtcggtctgcagagatggaggctgatgtgaatgctaatcagagtacaaagaagccaccttctatgcgaatgttaaggcaagctgccaatgcatatacaccttctgcctttaaaatgtttgagagggaatttgaattgtacatggattgcatgctctacatctgtggtgagatgagcacaattttcgagtatagaataagtgttgaggacaagtcaagagatcacttcgttaaatttgattcactcaattccatgatgaattgtacttgtaagacgtttgaatttattggcatcccatgtcgccatatgctgaaggtacttgacatgaggaatatcaaggaccttcctgcccagtacatcatgaaaaggtggaggaaggatgccaaatcaggatcctcaaatggtggttgtgctttcttgtttgatggtgaccctgacttttctcacataaaacgttataattttttgtgtcgtatgttcagtgtagcagcggctagagctgcaacttctgatgaatcatttgcatatatggaaaaccagtcaaacatactgatggatcaaatagagcaagttattcaaaccaggccccctgacatagctgatcttattggtgctaattgtgatcgaacacaaaatccagttgacaatattgtcgctgaaggcattcaaagtcatactaattttcttagtggctccactgatggctctctaacatttccattcacattgggtgctggcacattggattaccgctgactggtacctactgttaggatggtactgcagtacagaacaaagcatgcaaaatgacataatggatgttctactaatgtgttggtagcttcacattggctgcagagctgcaaataacaatggtacacctactgcactggtagttggcaggcctgatattgtctgccttaacttctcacccaaagaaaggaaggattttttccccttcgccagcactcattgtatgtacttgatgggaaatgatgtttcatgaggtagcacccgaaatatcacctggttttccagcctggtgattgtgcacagggtgctcccggtaatgagggactccgcctgctgtgttgccagtttacaaggtgatgatgctgaacttaaccaacgcgagcccatctgatttttaaccagtgctgtacgcctgtagcgtaatgctgttgcgatagccttgtcatgacagttgtgcaatgtacagattttttaacccattacgtaaatatattgacatgtgatcactggtttcaaattgccagctgtgcaatgtattatgctagggagtacatattaacagctacgtagtatttatttagaaaaaaattagaacggcttacaatttggaattgaggaagaatgtgagaatggaacatgaataagaatgaggacgtgaggcaat

SEQ ID NO: 66918 - DNA, 2304 bp, Zea Mays
cggctaccgcgcatagagacccgggcagacgagagggcttgtggggtcccggtcgatttcttcttcttgctacgcaagtcgaggtctccccgccgcgaccgcgagatccccctccggcaagtcaggaaataaaataaagtgaggcagcaacacgagcacgggccgtggctcaatatctccagattttcccgaaacccttgtcccatttccttccatattatttacatataccctctgtccttgtcgcggcgatgctctgttggtaatcttggaggcgatcgatgtcgacaggccgtgacgtcgtccgatgattctccctctccctcgtcgccttcgttgtcatcttcgcacggttgaagcagctgctcccgcagatggcggcggtgtggtctaggatcgggaggggagcgcagctgtcgctgtcgctgtccctgtcgaggaccttctacgacggcgcgtcggcggcttccacgctgcgcagtgctgccgcgctgtcccgcgcccggggccagcacgcgtcgtcgctccacagcctcgcgggaaggtccgccggccacctcctccagccgccgagcaggggcatcgtgaccacgcccgcgaggcttcacccggcgtcgtccgcggcagtggtggcagagctctcggacgcggaggcgagggagtccgaggccgtggcggcgccgcctcgccagatgccgagcctcggcccgacgcggcccggggagaagccccgcgtcgtggtgctgggcaccgggtgggcggcgtgccggctgctcaaggacgtggacacgcgcgcctacgacgtcgtgtgcgtgtccccccggaaccacatggtgttcacgccgctgctggcgtccacgtgcgtcggcacgctcgagttccgctccgtcgtcgagcccgtcagccgcatccagtcggcgctcgccacccgccccggctcctacttcttcctcgcctcctgcaccggcgtcgacaccaaggcgcacgaggtgtactgcgaggccgcgtccagcgacggacagctgccctgccacccgtaccggttcaaggtcgcctacgacaagctggtgatcgcgagcggcgccgagccgctcaccttcaacatcaagggtgtccaggagcatgccatcttcctccgcgaggtgagccacgcgcaggagatccgcaggaagctgctcgctaatctcatgctggccgagaatccaggcttgtctgcggaagagaaggagcggctcctgcactgcgtggtggtcggcggaggacccaccggcgtcgagttcagcggcgagctcagcgacttcatcacacgcgacgtgcgccagaggtacgcgcacgtcaaggactacgtcaagatcaccctcatcgaggcaaacgaaatcttgtcatcgttcgatatcggactgcggcagtacgcgacgaatcacctgtcaaagtatggagttaatctggtgcgaggcattgtgaaggaggtgaaggccacggagatcaccctgagcgatggcacccgcgtgccctacggcctgctggtctggtccacgggcgtcggcccgtcggagttcgtcaggtccctgcaccttcccaagtccccaggcgggagggtcggcgtggacgagtggctccgcgtgcccacggcgccggacgtgttcgcgctgggcgactgcgcgggtttcctggaggggaccggcaagccggtgctcccggcgttggcccaggtcgcggagcgggagggccggtacctggcgcggctgctcgggaggatcgcggcgcagaacggcggcaaggcgcactgcgccggcaaggccgacctcggggagccgttcgtgtacaagcacatcggcagcatggcgtccgtcggccggtacaaggcgctcgtcgacctcagggagaacaaggatgccaagggggtgtcgatggctggcttcctcagctggctgatgtggcggtcagcgtacctgacgcgggtggtgagctggaggaacaggttctacgtggcggtgaactggggaacgacgcttgtgtttggcagggacaacaccaggattggctgacgacgtttagcagcttaagctggtgttcctctggatagtaccacgggaacaagagactgcctgtcattgttgttcttttgtttgtaattcaacacgtgctgagagatttctattggcttccatactctctctctctctattggtcagatgaagtcatgaagtgcagacttgcaaatgtaagtcaccagtttcttttttaaaaaaaagattaaagatatgatgccgatggagcttgtacaacagacgaaaaatacat

SEQ ID NO: 66919 - DNA, 157 bp, Zea Mays
cttttatgtgtttccccgtttcgttgttttcggttctcctttgcctttgtttcccttttctgttctttgggggttgagctctgaggttttcatacggggttttatctctagcctaccccaacgtgcttgggacaaaaaggctttgttgttgttgttg

SEQ ID NO: 66920 - DNA, 6687 bp, Zea Mays
gctcacctttgttcgcatatcaaggcctggagccctcccctgctaatcataacagatgccatggtcatagaacaaaatagagaacatatatattcaaaataaatttgtttggaggtataaatattgatattattttctatatacttggtcaaaatcaaaaacattttgacttgtccacaaacgtgatgtgcacttgttttgggaagggggagtatgcagcaaacatttaaataaggtgtcaggcacacaacgtactctcgatctttggatttgagctgctttctggccgagtggcttggcatttttgccacgaataccatccttccagaagtcaaaacaaacaacagaggtaacatttaacattattttgcacatcaatagagaaaattcatgatatacaagatgtaaagatagagacacaaggcatagtattatcaaaaaacattcccattgcaagcgaagacaaattcccagttcccatcataattttacctcataaaatatcaattatgacaaagatagcctttttttttaaaaaaaaaaaagaggtcagccccatttccattacccccataacagaaatatagaagtttgatgacaagaagtcaagaacctagaaaagtaagggaaacaaagaacttttcttgtctcgtaaaaaacttaattaaggattgcatgaattatgcacactaagccttttttttctcagaacacacaaaaggaaataattatcctcctagcctggagcatctggttggtgagaaatgattgaatattttgcaagtcccaccctctagaagcttgtaaagctaagttcaacatgaattcactatgcttttgcatcatgcgaagaagagttactttcccagtattagtgattggctagatagtttcttgtaattttttctctgtttttttcttttgggctgactgtttttttcttcttgttttcctaactatttatatatatatatatatatccagtaggggcaagctcctcctgtttcctaaaaaaagtttgtgtgttatgcattaggaagcgcagctcaaattcatggcgtgtactgaaaaatattgttacggtctattgtcacccgtttagggttagccccttgtaattacagttatatccctgtgtaatgggtcagccttggtctattaatacatctcccaactctaagttagggtcagggtttcccacatggtatttagctacgttttaggttttcgatttttttgccctctccatccgtcgcctgactcaccttccagccgtcggcgcccctgcctcccgtcggcctcatgctgctccgccagcagggccacgcctgcttcgtccgcgcctgggtgcactccgcgccgccaccactgaagccctcagcggctgacgtcaacgtccgcgcctgggtgctctccgagccaccagtagggtcgcgcctgctgctcctccgtcccagctgacgcctgccactagggccgcgacagctctcccggcggggcctatcgcgcccctcccgcgttcgtctcgcctcctcgtgctcctggccatccgccacgaggaggagctcgacaaactgctggccggcgtcctctcctgccttcccccgcttagctgctctccccggccggcccgtgccaccctgcgccgccgtccggccagccgggctcgtcctcccccactcggttgctctctccggctggcctgtgcctacctgcgtcgtcgtccgcctgtttgtgctggaagccagtgctggacactcgcgagcagctaccgccgtcttccccaccagcctgcccccaacccgtgctgctgcgtgcccaaagctctacaccggacaccgcccccttctccaccatctgtcgtccactagcctgccccctacccgcgctactgcgcgcccagagctctgcaccgaccaccgtccctttctccaccatctgtcgtcggtgtgtcccaccgtcggccacccgcagtgtgtcgctgctcgcctcccatctcctaccctagcgcccttttctcacacgtcgctgccgctggccccccgagcacccttctccccgttggcgcgcatgtcggcctttccccagccggctgcgctctccttcccaaccccctgacatccttctatggggtcccaccatcctctgcccctctggtttcgcctcagggaactcctacctccgtcgcggctcctgtcccaggtcccgtgcatgtgaacgtccttctccacgacgaccagcttgtcggggcagctttgtggccttcgatcgcgccaagagccttgtccttcgtgactacgtcgagcttcacccacacgtgcctggaccgcttgtctttcccaaagctgtgattgcctcccttgcgatcgataccttgttgtctccctccactactagtgactttgtcggagcacctcccctggatctttctacgcaccccgtggcttcaccaccctctcccaccgattgggtgttcgacttcggagcctccttccacactactacctagctcgttattccactcccatccaccacacccctcacatcctccctctagcgttgtgggcaacagttccaccctcccgattacctcagtaggtgcatcggtccttctgggaccattctaccttgttgctcctggtctgactcatccccttatctcggttcgtcgcttcactagtgacaaccactgttctatgaagtttgatccctgggggctcaccatatgccaccttctgactcgtatcgtgcccggtcgttgtgacagctccgaccccctctactctattcacttgcccactactaccccaaccggtgtagcctcccccatgctcttactgccaccaccacctccaccaactagcatcgtcgccttggtcacctggacctgacatgatgtcccagctctccagtcgctccaatatctcttgtagtcggggttcctctgggcatctctgccatgcctgccagctcgaccgtcactctcatcttcctttttccacttccacatccagggctactcaggcctttgatcttgttcattgtgatctctggacctctcatgtcttcatcccttctagttaaaaatactacctggtcattcttgatgacttctctcactttcgttggacatttcctttgtgctgaagtctgaaaccttctccaccctcacccacttcttcgtctaggtctccacccagttccgtcgcccagttcgtgcccttcagtgtgacaatggttgagagttcaacaacaacgcctctcgctccttcctcacccatggcgttcagttgtgtctctcgtgcccctacacctctccccagaacggctgggtcgaacacatcattcacaccagcaccaccatgatctattgcctcctctttcaggagtctcttcctgctagttactagacagaggacctgaacaccgccacacatctcctcaaccgctttccctcgaaggtggtgagccatcccactccccactttactctatatggcataaccccatcctacgaccaccttcgcgtgttcggttgtgcctgctatcccaacaattctgccactgatccccataagctagcactgcgctccactcgttgcctcttcctctgttactcccctgaccacaaggggtatcgctgtcttgacctcgtctcccacctcatactcatctctcgtcatgtggttttcgacgaagatgtgtttcctcttgttggctcctccccacccattgatctcgactctctccttgagttcgatccggtttttccaccccggttgctccccaggctcaaacgccaccgctcgcgcctctacccgcaccacgtgaggcccaggcacctcgtcttgcgttacacgcgacacacgcgattacgccgcctccgctcacgcctctaccaacgctacacgtggccccaccggcgagcgcggcctgcttcgctgaccctgacctcgtctaccgccgccgcgggcggaccactccttggctctcgccgacccgccagcccgcaccaagcctccccgtgtaccactcgttcaccatccattgcgaccccgagcacgtccacctgatggtgactcgccacgcaactggcattctccgccccgtcgacctgctgattctgacagctgacgctcctccggacgcctccccagtcccctcttttcgtgcggcccttgccaacccccactgacgtcgcgctttggaggagtacgtggccctgctggccaaccacaccagggatcttgtgtcgcgtccaacgtggtcaccggcaagtggatttttcgccacaagctaaccttgtatggctccctcgaccgctacaaggcccattgggtcctttggggcttcacccagcgccctagagtcgattacgatgagaccttcagccccgtcttcaagttcgccaccgttcgggccgttctcgccctctccctggaggtcgggaccgggcgattcatcagcacgatgtcaataatgccttcctccagggcactctgatggagactgtctgctgcagctagcccaccgacttcgtcgactccgctcgtccggatctgttctgtcggctgaacgctccatgtacggcctcaagcaggcgtcgcgggcctagtacagttgcttcgcctcctatttggcctccatcggcttcgtcgaggccaagtcggacacgtcccttttcatctaccggcgcgacgatgacgccgtctacctcctactctacgtcgacaacgttgtgctcacgacatccaccggggaccttctacaccacacaatcggcgcccttcagcgagaattcgcgatgaaggacctggggccttttcaccacttcctcggcatcaccgtcgagcgccgacctcagggtctcttcatccaccaacgccaatacgcaatcgacatcctagagcgggctggcatgtccgactgcaagccctgctccacgcctgtcgacactcaggcaaagctctctgaggataacgatgccctctagtacctgaccttctccaggcctgacatcgcctacgccgtccagcaggtgtgcctgcacatgcacaccccgcgagagccccatctcacaactctcaagcggatcatgcgctacctccgcggctcccttgactactaccttctacttcgacccttcccgacatcggagctcgtggtctacaccgactttgactaggtcggctgtcccaacacgcgccggtccacttccggttacgacgtgttcttgggcgccaacctcgtctactgggccgccaagaggcagcccgtcgtctctcgctccagcgcagaggccgagttgagaccgcgggggtgttagagtacccgtttagggttttgggttagccccttgtaactatagttatacccctgtgtaatgggccagaccgaacaaccttggtctattaatacatctcccaaccctgagttaggatcagggtttcccacagttctagcttgcaacaacaaaacaaaagtaaagccaaacctttgttattgtagaacctcctaatgtctgcactcctcggtgaactataaattcactatcaactacgccaatgttctttgtcctgtcaccctgaaagcattttaaaaaaagtttcatttaaagtctttaccaaaaacaagacgagcaagtttgtttggactatggagtcatggattcagaatgactatgttataaatcaaaatatgctagatgcataagagcataaacaagtacaaatatttatattccttttatatatccacatcagccaagaaaacaatcacttccaatagatcaccatacaaaaattatattgattgaacagatgaaacataatgctatatgatttttcttgggaataccgatcatagttcataatttataataaacaacaattcttgcaaggagaaaggtcgaactaacaacttaatcaatactttgtgatttagatgaacttaaattataaggcatgccacagttacttgaagaacacttttatcaaacctgagcacaatacccaaacttgtaatcgatgccccatccatggataagatcattctgtataaatacaacatggatatattaatagctggaatactccacaaaaaacaatcagataaaaccataaaagacaaaggagattatcacaaaaagtattttttttcttcaaacataggttgataaaatggcaatgtctcatctctcagcaatcaaatgctcaacttaaatacctatgacctaatgtgggattgtgggctcattttcctgtgtccctaacaaatgcagcacaacaacagtgaatgcatgtgttagactgtgtgtgggtcgacaccactgttgggctaccggcccataagggttagggtttcccctaagtctatatatgtaatcttcctctatgcaatagatatagggtttcatcacttccaatatggtatcagctagctaggttttccttcctcaaccccacagctgtcggctctcagcccacccactgcccccggagaggctattccttccctccccaggggggctccctcggtccctcctcccagcctatgctcctcctcttcaacctcgtcgcgctcactatcctgctctggttctcctccgccatggtgctcgtcggccctccctacctcgtcgtgcgccacgatcggcctcggcgcggtcccgtttcggcactcccctgc

SEQ ID NO: 66921 - DNA, 1883 bp, Zea Mays
aggcccggccctcggcttgatcccagcctttcttctcccgttcacagttcaccccacttgctctctttctcccaagtagcaacgaccgcgcgtcctccgccgccgcactaaaccctactccatgtacccaggtctgcgtcgggcccttgccggcgatgagaacccgtcagttaccattgtgcagttccaaagatggctcgtcgtggattgatggaacaggacttaagcaaactggatgtgacgaagcttcaccccctgtcacctgaagttatctcacgccaagcaacaatcaatatgggtaccattggccatgtggctcatggaaagtccactgttgttaaagctatatctggtgttcagactgttcggttcaagaatgagctggaacgtaacattactataaagctgggttacgctaatgcaaaaatctacaaatgtgaggatgacagatgtccgcgaccaatgtgctacaaggcctatggaagcggaaaagaagatagccctctatgtgatgtgcctggatttgaaaacactagaatgaaactcctgagacatgtttcttttgttgattgcccgggacacgacattctcatggctacaatgcttaatggagctgctatcatggatggagctcttcttttgatcgcagcaaatgaaagttgtccacagccccagacatcagagcatcttgctgctgttgaaatcatgcgtcttcaacatatcatcattctgcagaacaagatcgatcttatccaggaaagcgcagcgatgaatcagcatgaagcaatccaaaaattcatccagggaacaatagctgaaggtgcacctgtggtgcctatatccgcccagctgaaatacaacattgatgttatctgtgaataccttgtgaagaaaatccccatccctgaaaggaactttacctcacctcccaacatgattgttattcgctcctttgatgttaacaagcctggttcagaggtcgatgaaatcaggggtggtgtagctggtggtagtattctcaggggagtcctgagggtgaaccagaagattgaagttcgccctggcattgtcatgaaagatgagactggaaacatcaagtgcaccccaatctactcaaggattgtctcactgtacgctgagcagaatgaactccaatttgctgtcccaggagggcttattggtgtgggaacaaccatggacccaactctaacacgtgctgacagactggttggccaggttcttggtgaagtaggttcactacctgatgtttacgtagagcttgagatcaatttcttcctactccggaggctgttgggtgtgaggacgaaaggtacagagaaggcagggaaggtgtcgaagctcaccaaggctcaccgcgcctgtctgcacgagccgaggagagaaggttgctctgagccgtcgcgttgagaagcattggcgcctcatcggatggggccagatccaggcaggtacaacacttgaagtaccagcgtgcccggtgtaaagcgtcatactcagacgtgagctgaagttgtgtgcaaaagagaaaaaaaaatgagtttgttgttagtcctgtccctgcgttactgcagatccaaagtcctgggtcactctaattttattttgtttcgttcaattttggaggccgtttgcattatgattcctgtgaacattaccaggtcggaaaccagtattgtgaacattatgagtacggcatatggatcagcatttgccaatttcttctttcgcaccaaaatttagacttgccttcatatggtttgtgcctcaagaagtggctgtatgcctgtatatataagactgtctgcaactctctaaatttccctcctatagcgcactatacagccaccttattcaggttctat

SEQ ID NO: 66922 - DNA, 1755 bp, Zea Mays
aggcccggccctcggcttgatcccagcctttcttctcccgttcacagttcaccccacttgctctctttctcccaagtagcaacgaccgcgcgtcctccgccgccgcactaaaccctactccatgtacccaggtctgcgtcgggcccttgccggcgatgagaacccgtcaggtaccattggccatgtggctcatggaaagtccactgttgttaaagctatatctggtgttcagactgttcggttcaagaatgagctggaacgtaacattactataaagctgggttacgctaatgcaaaaatctacaaatgtgaggatgacagatgtccgcgaccaatgtgctacaaggcctatggaagcggaaaagaagatagccctctatgtgatgtgcctggatttgaaaacactagaatgaaactcctgagacatgtttcttttgttgattgcccgggacacgacattctcatggctacaatgcttaatggagctgctatcatggatggagctcttcttttgatcgcagcaaatgaaagttgtccacagccccagacatcagagcatcttgctgctgttgaaatcatgcgtcttcaacatatcatcattctgcagaacaagatcgatcttatccaggaaagcgcagcgatgaatcagcatgaagcaatccaaaaattcatccagggaacaatagctgaaggtgcacctgtggtgcctatatccgcccagctgaaatacaacattgatgttatctgtgaataccttgtgaagaaaatccccatccctgaaaggaactttacctcacctcccaacatgattgttattcgctcctttgatgttaacaagcctggttcagaggtcgatgaaatcaggggtggtgtagctggtggtagtattctcaggggagtcctgagggtgaaccagaagattgaagttcgccctggcattgtcatgaaagatgagactggaaacatcaagtgcaccccaatctactcaaggattgtctcactgtacgctgagcagaatgaactccaatttgctgtcccaggagggcttattggtgtgggaacaaccatggacccaactctaacacgtgctgacagactggttggccaggttcttggtgaagtaggttcactacctgatgtttacgtagagcttgagatcaatttcttcctactccggaggctgttgggtgtgaggacgaaaggtacagagaaggcagggaaggtgtcgaagctcaccaaggctcaccgcgcctgtctgcacgagccgaggagagaaggttgctctgagccgtcgcgttgagaagcattggcgcctcatcggatggggccagatccaggcaggtacaacacttgaagtaccagcgtgcccggtgtaaagcgtcatactcagacgtgagctgaagttgtgtgcaaaagagaaaaaaaaatgagtttgttgttagtcctgtccctgcgttactgcagatccaaagtcctgggtcactctaattttattttgtttcgttcaattttggaggccgtttgcattatgattcctgtgaacattaccaggtcggaaaccagtattgtgaacattatgagtacggcatatggatcagcatttgccaatttcttctttcgcaccaaaatttagacttgccttcatatggtttgtgcctcaagaagtggctgtatgcctgtatatataagactgtctgcaactctctaaatttccctcctatagcgcactatacagccaccttattcaggttctat

SEQ ID NO: 66923 - DNA, 1849 bp, Zea Mays
aggcccggccctcggcttgatcccagcctttcttctcccgttcacagttcaccccacttgctctctttctcccaagtagcaacgaccgcgcgtcctccgccgccgcactaaaccctactccatgtacccaggtctgcgtcgggcccttgccggcgatgagaacccgtcagttccaaagatggctcgtcgtggattgatggaacaggacttaagcaaactggatgtgacgaagcttcaccccctgtcacctgaagttatctcacgccaagcaacaatcaatatgggtaccattggccatgtggctcatggaaagtccactgttgttaaagctatatctggtgttcagactgttcggttcaagaatgagctggaacgtaacattactataaagctgggttacgctaatgcaaaaatctacaaatgtgaggatgacagatgtccgcgaccaatgtgctacaaggacacgacattctcatggctacaatgcttaatggagctgctatcatggatggagctcttcttttgatcgcagcaaatgaaagttgtccacagccccagacatcagagcatcttgctgctgttgaaatcatgcgtcttcaacatatcatcattctgcagaacaagatcgatcttatccaggaaagcgcagcgatgaatcagcatgaagcaatccaaaaattcatccagggaacaatagctgaaggtgcacctgtggtgcctatatccgcccagctgaaatacaacattgatgttatctgtgaataccttgtgaagaaaatccccatccctgaaaggaactttacctcacctcccaacatgattgttattcgctcctttgatgttaacaagcctggttcagaggtcgatgaaatcaggggtggtgtagctggtggtagtattctcaggggagtcctgagggtgaaccagaagattgaagttcgccctggcattgtcatgaaagatgagactggaaacatcaagtgcaccccaatctactcaaggattgtctcactgtacgctgagcagaatgaactccaatttgctgtcccaggagggcttattggtgtgggaacaaccatggacccaactctaacacgtgctgacagactggttggccaggttcttggtgaagtaggttcactacctgatgtttacgtagagcttgagatcaatttcttcctactccggaggctgttgggtgtgaggacgaaaggtacagagaaggcagggaaggtgtcgaagctcaccaagggtgagatcctcatgcttaacatagggtccatgtccacaggcgcccgtgtgctcgctgttaagaacgatcttgccaagctacagctcaccgcgcctgtctgcacgagccgaggagagaaggttgctctgagccgtcgcgttgagaagcattggcgcctcatcggatggggccagatccaggcaggtacaacacttgaagtaccagcgtgcccggtgtaaagcgtcatactcagacgtgagctgaagttgtgtgcaaaagagaaaaaaaaatgagtttgttgttagtcctgtccctgcgttactgcagatccaaagtcctgggtcactctaattttattttgtttcgttcaattttggaggccgtttgcattatgattcctgtgaacattaccaggtcggaaaccagtattgtgaacattatgagtacggcatatggatcagcatttgccaatttcttctttcgcaccaaaatttagacttgccttcatatggtttgtgcctcaagaagtggctgtatgcctgtatatataagactgtctgcaactctctaaatttccctcctatagcgcactatacagccaccttattcaggttctat

SEQ ID NO: 66924 - DNA, 1944 bp, Zea Mays
tcagatctgagcgggttttgtgtcgggcggctcaagttccagccgcggggttactggggcgggcgcagtcccccgcgccgtcgtcttccttgtccctggcgtcgtcgggggctgtgctcggcggttcaacatttggtcctgcactcctgcaggtgcagccagttccaaagatggctcgtcgtggattgatggaacaggacttaagcaaactggatgtgacgaagcttcaccccctgtcacctgaagttatctcacgccaagcaacaatcaatatgggtaccattggccatgtggctcatggaaagtccactgttgttaaagctatatctggtgttcagactgttcggttcaagaatgagctggaacgtaacattactataaagctgggttacgctaatgcaaaaatctacaaatgtgaggatgacagatgtccgcgaccaatgtgctacaaggcctatggaagcggaaaagaagatagccctctatgtgatgtgcctggatttgaaaacactagaatgaaactcctgagacatgtttcttttgttgattgcccgggacacgacattctcatggctacaatgcttaatggagctgctatcatggatggagctcttcttttgatcgcagcaaatgaaagttgtccacagccccagacatcagagcatcttgctgctgttgaaatcatgcgtcttcaacatatcatcattctgcagaacaagatcgatcttatccaggaaagcgcagcgatgaatcagcatgaagcaatccaaaaattcatccagggaacaatagctgaaggtgcacctgtggtgcctatatccgcccagctgaaatacaacattgatgttatctgtgaataccttgtgaagaaaatccccatccctgaaaggaactttacctcacctcccaacatgattgttattcgctcctttgatgttaacaagcctggttcagaggtcgatgaaatcaggggtggtgtagctggtggtagtattctcaggggagtcctgagggtgaaccagaagattgaagttcgccctggcattgtcatgaaagatgagactggaaacatcaagtgcaccccaatctactcaaggattgtctcactgtacgctgagcagaatgaactccaatttgctgtcccaggagggcttattggtgtgggaacaaccatggacccaactctaacacgtgctgacagactggttggccaggttcttggtgaagtaggttcactacctgatgtttacgtagagcttgagatcaatttcttcctactccggaggctgttgggtgtgaggacgaaaggtacagagaaggcagggaaggtgtcgaagctcaccaagggtgagatcctcatgcttaacatagggtccatgtccacaggcgcccgtgtgctcgctgttaagaacgatcttgccaagctacagctcaccgcgcctgtctgcacgagccgaggagagaaggttgctctgagccgtcgcgttgagaagcattggcgcctcatcggatggggccagatccaggcaggtacaacacttgaagtaccagcgtgcccggtgtaaagcgtcatactcagacgtgagctgaagttgtgtgcaaaagagaaaaaaaaatgagtttgttgttagtcctgtccctgcgttactgcagatccaaagtcctgggtcactctaattttattttgtttcgttcaattttggaggccgtttgcattatgattcctgtgaacattaccaggtcggaaaccagtattgtgaacattatgagtacggcatatggatcagcatttgccaatttcttctttcgcaccaaaatttagacttgccttcatatggtttgtgcctcaagaagtggctgtatgcctgtatatataagactgtctgcaactctctaaatttccctcctatagcgcactatacagccaccttattcaggttctat

SEQ ID NO: 66925 - DNA, 1721 bp, Zea Mays
gcggttcaacatttggtcctgcactcctgcaggtgcagccagttccaaagatggctcgtcgtggattgatggaacaggacttaagcaaactggatgtgacgaagcttcaccccctgtcacctgaagttatctcacgccaagcaacaatcaatatgggtaccattggccatgtggctcatggaaagtccactgttgttaaagctatatctggtgttcagactgttcggttcaagaatgagctggaacgtaacattactataaagctgggttacgctaatgcaaaaatctacaaatgtgaggatgacagatgtccgcgaccaatgtgctacaaggacacgacattctcatggctacaatgcttaatggagctgctatcatggatggagctcttcttttgatcgcagcaaatgaaagttgtccacagccccagacatcagagcatcttgctgctgttgaaatcatgcgtcttcaacatatcatcattctgcagaacaagatcgatcttatccaggaaagcgcagcgatgaatcagcatgaagcaatccaaaaattcatccagggaacaatagctgaaggtgcacctgtggtgcctatatccgcccagctgaaatacaacattgatgttatctgtgaataccttgtgaagaaaatccccatccctgaaaggaactttacctcacctcccaacatgattgttattcgctcctttgatgttaacaagcctggttcagaggtcgatgaaatcaggggtggtgtagctggtggtagtattctcaggggagtcctgagggtgaaccagaagattgaagttcgccctggcattgtcatgaaagatgagactggaaacatcaagtgcaccccaatctactcaaggattgtctcactgtacgctgagcagaatgaactccaatttgctgtcccaggagggcttattggtgtgggaacaaccatggacccaactctaacacgtgctgacagactggttggccaggttcttggtgaagtaggttcactacctgatgtttacgtagagcttgagatcaatttcttcctactccggaggctgttgggtgtgaggacgaaaggtacagagaaggcagggaaggtgtcgaagctcaccaagggtgagatcctcatgcttaacatagggtccatgtccacaggcgcccgtgtgctcgctgttaagaacgatcttgccaagctacagctcaccgcgcctgtctgcacgagccgaggagagaaggttgctctgagccgtcgcgttgagaagcattggcgcctcatcggatggggccagatccaggcaggtacaacacttgaagtaccagcgtgcccggtgtaaagcgtcatactcagacgtgagctgaagttgtgtgcaaaagagaaaaaaaaatgagtttgttgttagtcctgtccctgcgttactgcagatccaaagtcctgggtcactctaattttattttgtttcgttcaattttggaggccgtttgcattatgattcctgtgaacattaccaggtcggaaaccagtattgtgaacattatgagtacggcatatggatcagcatttgccaatttcttctttcgcaccaaaatttagacttgccttcatatggtttgtgcctcaagaagtggctgtatgcctgtatatataagactgtctgcaactctctaaatttccctcctatagcgcactatacagccaccttattcaggttctat

SEQ ID NO: 66926 - DNA, 1832 bp, Zea Mays
tggacgcaatttgttcttaccagctgtgctgcgagctatcggattcaaatttcccagaacgggcaatagatttggtgctcagttgaacgcccgtccaacgctaagttcgcatctggctgagaagcgattagtgttccaaagatggctcgtcgtggattgatggaacaggacttaagcaaactggatgtgacgaagcttcaccccctgtcacctgaagttatctcacgccaagcaacaatcaatatgggtaccattggccatgtggctcatggaaagtccactgttgttaaagctatatctggtgttcagactgttcggttcaagaatgagctggaacgtaacattactataaagctgggttacgctaatgcaaaaatctacaaatgtgaggatgacagatgtccgcgaccaatgtgctacaaggcctatggaagcggaaaagaagatagccctctatgtgatgtgcctggatttgaaaacactagaatgaaactcctgagacatgtttcttttgttgattgcccgggacacgacattctcatggctacaatgcttaatggagctgctatcatggatggagctcttcttttgatcgcagcaaatgaaagttgtccacagccccagacatcagagcatcttgctgctgttgaaatcatgcgtcttcaacatatcatcattctgcagaacaagatcgatcttatccaggaaagcgcagcgatgaatcagcatgaagcaatccaaaaattcatccagggaacaatagctgaaggtgcacctgtggtgcctatatccgcccagctgaaatacaacattgatgttatctgtgaataccttgtgaagaaaatccccatccctgaaaggaactttacctcacctcccaacatgattgttattcgctcctttgatgttaacaagcctggttcagaggtcgatgaaatcaggggtggtgtagctggtggtagtattctcaggggagtcctgagggtgaaccagaagattgaagttcgccctggcattgtcatgaaagatgagactggaaacatcaagtgcaccccaatctactcaaggattgtctcactgtacgctgagcagaatgaactccaatttgctgtcccaggagggcttattggtgtgggaacaaccatggacccaactctaacacgtgctgacagactggttggccaggttcttggtgaagtaggttcactacctgatgtttacgtagagcttgagatcaatttcttcctactccggaggctgttgggtgtgaggacgaaaggtacagagaaggcagggaaggtgtcgaagctcaccaaggctcaccgcgcctgtctgcacgagccgaggagagaaggttgctctgagccgtcgcgttgagaagcattggcgcctcatcggatggggccagatccaggcaggtacaacacttgaagtaccagcgtgcccggtgtaaagcgtcatactcagacgtgagctgaagttgtgtgcaaaagagaaaaaaaaatgagtttgttgttagtcctgtccctgcgttactgcagatccaaagtcctgggtcactctaattttattttgtttcgttcaattttggaggccgtttgcattatgattcctgtgaacattaccaggtcggaaaccagtattgtgaacattatgagtacggcatatggatcagcatttgccaatttcttctttcgcaccaaaatttagacttgccttcatatggtttgtgcctcaagaagtggctgtatgcctgtatatataagactgtctgcaactctctaaatttccctcctatagcgcactatacagccaccttattcaggttctat

SEQ ID NO: 66927 - DNA, 1586 bp, Zea Mays
agttaagggactgttgtgctttgtgcttttgtttaccagcatctgttacaatgacatagactgactgttcggttcaagaatgagctggaacgtaacattactataaagctgggttacgctaatgcaaaaatctacaaatgtgaggatgacagatgtccgcgaccaatgtgctacaaggcctatggaagcggaaaagaagatagccctctatgtgatgtgcctggatttgaaaacactagaatgaaactcctgagacatgtttcttttgttgattgcccgggacacgacattctcatggctacaatgcttaatggagctgctatcatggatggagctcttcttttgatcgcagcaaatgaaagttgtccacagccccagacatcagagcatcttgctgctgttgaaatcatgcgtcttcaacatatcatcattctgcagaacaagatcgatcttatccaggaaagcgcagcgatgaatcagcatgaagcaatccaaaaattcatccagggaacaatagctgaaggtgcacctgtggtgcctatatccgcccagctgaaatacaacattgatgttatctgtgaataccttgtgaagaaaatccccatccctgaaaggaactttacctcacctcccaacatgattgttattcgctcctttgatgttaacaagcctggttcagaggtcgatgaaatcaggggtggtgtagctggtggtagtattctcaggggagtcctgagggtgaaccagaagattgaagttcgccctggcattgtcatgaaagatgagactggaaacatcaagtgcaccccaatctactcaaggattgtctcactgtacgctgagcagaatgaactccaatttgctgtcccaggagggcttattggtgtgggaacaaccatggacccaactctaacacgtgctgacagactggttggccaggttcttggtgaagtaggttcactacctgatgtttacgtagagcttgagatcaatttcttcctactccggaggctgttgggtgtgaggacgaaaggtacagagaaggcagggaaggtgtcgaagctcaccaaggctcaccgcgcctgtctgcacgagccgaggagagaaggttgctctgagccgtcgcgttgagaagcattggcgcctcatcggatggggccagatccaggcaggtacaacacttgaagtaccagcgtgcccggtgtaaagcgtcatactcagacgtgagctgaagttgtgtgcaaaagagaaaaaaaaatgagtttgttgttagtcctgtccctgcgttactgcagatccaaagtcctgggtcactctaattttattttgtttcgttcaattttggaggccgtttgcattatgattcctgtgaacattaccaggtcggaaaccagtattgtgaacattatgagtacggcatatggatcagcatttgccaatttcttctttcgcaccaaaatttagacttgccttcatatggtttgtgcctcaagaagtggctgtatgcctgtatatataagactgtctgcaactctctaaatttccctcctatagcgcactatacagccaccttattcaggttctat

SEQ ID NO: 66928 - DNA, 1421 bp, Zea Mays
acacactaaatggcctatggaagcggaaaagaagatagccctctatgtgatgtgcctggatttgaaaacactagaatgaaactcctgagacatgtttcttttgttgattgcccgggacacgacattctcatggctacaatgcttaatggagctgctatcatggatggagctcttcttttgatcgcagcaaatgaaagttgtccacagccccagacatcagagcatcttgctgctgttgaaatcatgcgtcttcaacatatcatcattctgcagaacaagatcgatcttatccaggaaagcgcagcgatgaatcagcatgaagcaatccaaaaattcatccagggaacaatagctgaaggtgcacctgtggtgcctatatccgcccagctgaaatacaacattgatgttatctgtgaataccttgtgaagaaaatccccatccctgaaaggaactttacctcacctcccaacatgattgttattcgctcctttgatgttaacaagcctggttcagaggtcgatgaaatcaggggtggtgtagctggtggtagtattctcaggggagtcctgagggtgaaccagaagattgaagttcgccctggcattgtcatgaaagatgagactggaaacatcaagtgcaccccaatctactcaaggattgtctcactgtacgctgagcagaatgaactccaatttgctgtcccaggagggcttattggtgtgggaacaaccatggacccaactctaacacgtgctgacagactggttggccaggttcttggtgaagtaggttcactacctgatgtttacgtagagcttgagatcaatttcttcctactccggaggctgttgggtgtgaggacgaaaggtacagagaaggcagggaaggtgtcgaagctcaccaaggctcaccgcgcctgtctgcacgagccgaggagagaaggttgctctgagccgtcgcgttgagaagcattggcgcctcatcggatggggccagatccaggcaggtacaacacttgaagtaccagcgtgcccggtgtaaagcgtcatactcagacgtgagctgaagttgtgtgcaaaagagaaaaaaaaatgagtttgttgttagtcctgtccctgcgttactgcagatccaaagtcctgggtcactctaattttattttgtttcgttcaattttggaggccgtttgcattatgattcctgtgaacattaccaggtcggaaaccagtattgtgaacattatgagtacggcatatggatcagcatttgccaatttcttctttcgcaccaaaatttagacttgccttcatatggtttgtgcctcaagaagtggctgtatgcctgtatatataagactgtctgcaactctctaaatttccctcctatagcgcactatacagccaccttattcaggttctat

SEQ ID NO: 66929 - DNA, 1373 bp, Zea Mays
cacagctcggtggcgcacctaggcagcggaagaagggccggaagaaacccgggtgaatgataccatggacacgacattctcatggctacaatgcttaatggagctgctatcatggatggagctcttcttttgatcgcagcaaatgaaagttgtccacagccccagacatcagagcatcttgctgctgttgaaatcatgcgtcttcaacatatcatcattctgcagaacaagatcgatcttatccaggaaagcgcagcgatgaatcagcatgaagcaatccaaaaattcatccagggaacaatagctgaaggtgcacctgtggtgcctatatccgcccagctgaaatacaacattgatgttatctgtgaataccttgtgaagaaaatccccatccctgaaaggaactttacctcacctcccaacatgattgttattcgctcctttgatgttaacaagcctggttcagaggtcgatgaaatcaggggtggtgtagctggtggtagtattctcaggggagtcctgagggtgaaccagaagattgaagttcgccctggcattgtcatgaaagatgagactggaaacatcaagtgcaccccaatctactcaaggattgtctcactgtacgctgagcagaatgaactccaatttgctgtcccaggagggcttattggtgtgggaacaaccatggacccaactctaacacgtgctgacagactggttggccaggttcttggtgaagtaggttcactacctgatgtttacgtagagcttgagatcaatttcttcctactccggaggctgttgggtgtgaggacgaaaggtacagagaaggcagggaaggtgtcgaagctcaccaaggctcaccgcgcctgtctgcacgagccgaggagagaaggttgctctgagccgtcgcgttgagaagcattggcgcctcatcggatggggccagatccaggcaggtacaacacttgaagtaccagcgtgcccggtgtaaagcgtcatactcagacgtgagctgaagttgtgtgcaaaagagaaaaaaaaatgagtttgttgttagtcctgtccctgcgttactgcagatccaaagtcctgggtcactctaattttattttgtttcgttcaattttggaggccgtttgcattatgattcctgtgaacattaccaggtcggaaaccagtattgtgaacattatgagtacggcatatggatcagcatttgccaatttcttctttcgcaccaaaatttagacttgccttcatatggtttgtgcctcaagaagtggctgtatgcctgtatatataagactgtctgcaactctctaaatttccctcctatagcgcactatacagccaccttattcaggttctat

SEQ ID NO: 66930 - DNA, 1160 bp, Zea Mays
cagtgctagtgggcagcccgcagccacgacgtctactcgcatcccaatctccgtcgtcccccgcggccccgcctcactccttacgccgcactccacctccacatcgccgcccacacccgaccgcgtggccggcctcatgtgggagcgcggcaggccgccccgcaagccgcgcccgtccccaatcctcgtgccgccgccaccgtcgtcgccgcctccccgcctgaacctcctcctcccgagatccctcctcgcgctcgccgcgcgcgccatgccgtcgcgccgcccctccccgggagggaaggttcgtgatgcactttttcagattcttgaaaacgaggatgatgtaaccataaaacatggaacacaatcgagggagagtcggcgtgaagctacacaaggaatgcactcatctaaattttgcctgcatcctgccggagatactccctcagcatgcagattatttgatgcacttgtcagtctgtgtgttcctgttatagccagtgattacattgaacttccattcgaagatattatagactacaataaaatatcaatatttgttgggacaagcaaagcagtacagcctggatacttaacttcaactcttcgaagaatcagttcagagaggattctggagtaccagagggaaataaaaaaggtcagacattactttgagtacgaggatccgaatggaccagtgaatgagatttggcgccaagtatcccttaaagcaccactgataaagttgttgactaaccgcgacaaacggttgcttgaaagaggcaccaatggaacagattgttcgtgcatctgctctacaactccaactgacataactgcggccagttaaacaagatggaactcatcggcctacaagctctgtgcctatttcctgtgatcacattgcctgaattttttaggttgtacagttccatgtaaaacgagattaccagccactatttttgaacagtaaatttactaattaccacaatccttgagtttttactagatttgtataggaggagcggatagtcaggaaccttacagtgccctttttgtattgtaagttacattagctattttttgttgtcggcagttcgctgccctagtttttcgacctacataagcatcaatccccgtgccagtgcgtggaccaagtt

SEQ ID NO: 66931 - DNA, 1906 bp, Zea Mays
gtctactcgcatcccaatctccgtcgtcccccgcggccccgcctcactccttacgccgcactccacctccacatcgccgcccacacccgaccgcgtggccggcctcatgtgggagcgcggcaggccgccccgcaagccgcgcccgtccccaatcctcgtgccgccgccaccgtcgtcgccgcctccccgcctgaacctcctcctcccgagatccctcctcgcgctcgccgcgcgcgccatgccgtcgcgccgcccctccccggtcctcctcctcctcctcgcgctctcgctcgccctcctcttccttctcctctccccttccttcccctccacctcccgcttctctcgctccctcagctctggctccgctttcgcctcctcatctccggcgtcaacctccgccccgcctgcacccgtcaagatctacctgtacgacctgccggccaagtttacctacggcgtcgtccgtagctataaggctgcgcgtgcgacatctggctccgcggacgccgctgctactctgcccgacgagcaactgcggtacccgggacaccagcactcggcggagtggtggctcttcaaggacctgctccgacgcaggccgcaggaccgccccgtggcacgcgtggacgacccgagcgacgccgacctcttctacgtgcccttcttctcctctctcagccttgttgtcaaccccatccgctctccgctggcagcaaacgcctctggggcggggacagcgtacagcgacgaggccttgcaagaggagttgctagagtggctggagcggcaactttactggcagcgccacagggggagggatcacgttttcatctgccaggatcccaatgccctttacagggtggtcgatcggatcagcaatgccgtactcctggtttctgatttcggcaggttgcgcagcgaccaggcatctctcgtcaaggatgtcatcctgccctactcacatcgaatcaactccttcaagggtgaggtcggggtggatggtcgcccctctttgctgttcttcatgggcaatagggagggaaggttcgtgatgcactttttcagattcttgaaaacgaggatgatgtaaccataaaacatggaacacaatcgagggagagtcggcgtgaagctacacaaggaatgcactcatctaaattttgcctgcatcctgccggagatactccctcagcatgcagattatttgatgcacttgtcagtctgtgtgttcctgttatagccagtgattacattgaacttccattcgaagatattatagactacaataaaatatcaatatttgttgggacaagcaaagcagtacagcctggatacttaacttcaactcttcgaagaatcagttcagagaggattctggagtaccagagggaaataaaaaaggtcagacattactttgagtacgaggatccgaatggaccagtgaatgagatttggcgccaagtatcccttaaagcaccactgataaagttgttgactaaccgcgacaaacggttgcttgaaagaggcaccaatggaacagattgttcgtgcatctgctctacaactccaactgacataactgcggccagttaaacaagatggaactcatcggcctacaagctctgtgcctatttcctgtgatcacattgcctgaattttttaggttgtacagttccatgtaaaacgagattaccagccactatttttgaacagtaaatttactaattaccacaatccttgagtttttactagatttgtataggaggagcggatagtcaggaaccttacagtgccctttttgtattgtaagttacattagctattttttgttgtcggcagttcgctgccctagtttttcgacctacataagcatcaatccccgtgccagtgcgtggaccaagtt

SEQ ID NO: 66932 - DNA, 3605 bp, Zea Mays
gtctactcgcatcccaatctccgtcgtcccccgcggccccgcctcactccttacgccgcactccacctccacatcgccgcccacacccgaccgcgtggccggcctcatgtgggagcgcggcaggccgccccgcaagccgcgcccgtccccaatcctcgtgccgccgccaccgtcgtcgccgcctccccgcctgaacctcctcctcccgagatccctcctcgcgctcgccgcgcgcgccatgccgtcgcgccgcccctccccggtcctcctcctcctcctcgcgctctcgctcgccctcctcttccttctcctctccccttccttcccctccacctcccgcttctctcgctccctcagctctggctccgctttcgcctcctcatctccggcgtcaacctccgccccgcctgcacccgtcaagatctacctgtacgacctgccggccaagtttacctacggcgtcgtccgtagctataaggctgcgcgtgcgacatctggctccgcggacgccgctgctactctgcccgacgagcaactgcggtacccgggacaccagcactcggcggagtggtggctcttcaaggacctgctccgacgcaggccgcaggaccgccccgtggcacgcgtggacgacccgagcgacgccgacctcttctacgtgcccttcttctcctctctcagccttgttgtcaaccccatccgctctccgctggcagcaaacgcctctggggcggggacagcgtacagcgacgaggccttgcaagaggagttgctagagtggctggagcggcaactttactggcagcgccacagggggagggatcacgttttcatctgccaggatcccaatgccctttacagggtggtcgatcggatcagcaatgccgtactcctggtttctgatttcggcaggttgcgcagcgaccaggcatctctcgtcaaggatgtcatcctgccctactcacatcgaatcaactccttcaagggtgaggtcggggtggatggtcgcccctctttgctgttcttcatgggcaataggtaccgcaaggaggtaactcctgaattctggaagaaacatgatgaatctaatctgaccggggcattggtcaattgcgtttataaggggagcatatatgctgtagaatgtagattatagacaaccaagtgaaggcgcccctttggaacttgtagttttctagtgtgcccaagcacaacattcttaattgacactctccctccatcctaaaatgaatgtaattctagatttgaaccaagtcatttttttagtaagtttgactaagtttatataaaatagtatcaacatatgcctccaaataggtttgctatggaaatgtatttcataattagtctaatgatacttatttggcgtcataagtatttgtaactttttttgcacaaatttggtcaaactttaaattatttgactccttgaaaaagcaagaattgcactctttttgggacggaggaagtattatctaaatggcattacattaatggtgttctgatattcatattatcttgtataaaaatgaagcttagaagaaaacagagttaggatgcctttttcttttgcctaataaagagagagctttacgaattactcaagaaagaaatacaatctgcagcaactagatgctcgacacacactggacaattattgcaatctgcagtatgaaacatccattttgctagctgggtgagctcgtgagtaactgaattctgctccttttgtgtgcttgaggagagataggcatgtgcgtctagagaggacctatccctgactgcgaattggacaccccaaccctcaagaaggcacacttgggtcagattgcaccaacatcatcaagcacctgatcaaactaactgctcagagacccagctatagctttgttatccaggaagcactagaagtagcagatatactcccagtagttaggatgcaattgtgcccgttttgaactatctatggcaagttctgaaccggatgcccaaggaaacttgaactaggaaaattggtttcaacggaaacatatacaaactgaagcaattttttgataatatatttttggaattatgtgtaggggactaggggcttgttgactctgaagtttgtcgaatttcagaatggcatagcagttaaagttttgcaatcttcaattcaaaatatctagtttcagatatatttaccaaaacatttgttttttttgacaatgtcatttacaataattgtcctctgaatttttttgtttctgtttcaactacctagctcctttttttgttcatcttctatgcatagaatgcaacatcattgttgaaggcaattttttgttaggaagtaggaacactatagaagactactgtagcatccaagcatcagcaacatcctgataagaaacacaaaaccatgattgataagataaatgaagtatggaatagtcgaggaaaaaggaaggcgtatacttttttcttttggtttgaaacaaacaactaaattgttcattctcttccccatccaaaatttgtcaagtatcctcctttaaaaaaacaaatgtgcattactatgtttcatcttttagtttctttaatcaatttacatgtagttcatcgttgttttccttgtcaatggagttacagtcactgtcttgttttgattttgtactttggttatgcaatatcatatctttatgctacagttttatcattatgaatattgtagggagggaaggttcgtgatgcactttttcagattcttgaaaacgaggatgatgtaaccataaaacatggaacacaatcgagggagagtcggcgtgaagctacacaaggaatgcactcatctaaattttgcctgcatcctgccggagatactccctcagcatgcagattatttgatgcacttgtcagtctgtgtgttcctgttatagccagtgattacattgaacttccattcgaagatattatagactacaataaaatatcaatatttgttgggacaagcaaagcagtacagcctggatacttaacttcaactcttcgaagaatcagttcagagaggattctggagtaccagagggaaataaaaaaggtcagacattactttgagtacgaggatccgaatggaccagtgaatgagatttggcgccaagtatcccttaaagcaccactgataaagttgttgactaaccgcgacaaacggttgcttgaaagaggcaccaatggaacagattgttcgtgcatctgctctacaactccaactgacataactgcggccagttaaacaagatggaactcatcggcctacaagctctgtgcctatttcctgtgatcacattgcctgaattttttaggttgtacagttccatgtaaaacgagattaccagccactatttttgaacagtaaatttactaattaccacaatccttgagtttttactagatttgtataggaggagcggatagtcaggaaccttacagtgccctttttgtattgtaagttacattagctattttttgttgtcggcagttcgctgccctagtttttcgacctacataagcatcaatccccgtgccagtgcgtggaccaagtt

SEQ ID NO: 66933 - DNA, 537 bp, Zea Mays
ccaccagagcattgacgaagaggaactgatgactggtcagacattactttgagtacgaggatccgaatggaccagtgaatgagatttggcgccaagtatcccttaaagcaccactgataaagttgttgactaaccgcgacaaacggttgcttgaaagaggcaccaatggaacagattgttcgtgcatctgctctacaactccaactgacataactgcggccagttaaacaagatggaactcatcggcctacaagctctgtgcctatttcctgtgatcacattgcctgaattttttaggttgtacagttccatgtaaaacgagattaccagccactatttttgaacagtaaatttactaattaccacaatccttgagtttttactagatttgtataggaggagcggatagtcaggaaccttacagtgccctttttgtattgtaagttacattagctattttttgttgtcggcagttcgctgccctagtttttcgacctacataagcatcaatccccgtgccagtgcgtggaccaagtt

SEQ ID NO: 66934 - DNA, 574 bp, Zea Mays
ggcggaagatagcggaggctgggcatgctccccaaggacaaggagatcaaatcatgggaggcttcggcaggcatgcaagctgatacactgttatccatttggcgtcacagaagctatcaagttgggccatccttcagcgagaggagctgcgaccgttggttgtggagggttcgcgactcttggtgcgaacggccacggtctttttttcccgggtgcatgggtggcgatctagtcttcggattgactgtcgctagactgggaaagttgctgcgtttatgtttgtttgtttttttttagtttggctatgtgcattaggcagaggccggaagtttgtgtaccaagactatgtatcctcttgatgtatcgctcttggtaacctttaatataaagcttcctttatcgaaaaaactaactacgatagttcccaaaaaagtttctaaattaattttggtgctattatccaaaaatcatgctccaaaagtgtccttaacagaacagacccaaacttgtttttctttcctttggaacagaggatttttttcttgtttcctatgttttttctgtgaaaatgaac

SEQ ID NO: 66935 - DNA, 583 bp, Zea Mays
aaggagatcaaatcatgggaggcttcggcaggcatgcaagctgatacactcaaaacactttggatcccctgaagaagacgacaaggtgttcacgaaaattgaatcaaatcgaaatgtgaggctgcggcggggtcctaaggctcggataatggcctcagcgcacccattctggacccacaaatcagtgtcttcaggtggtaacgagataatttcgggagttaatgctggggggctgtcgtctcccgaagagtcgcgtgcgatcctcccaaggacgacttgcacttcttccagttcgtgtggctgggacagcaaggttgggagaggtcctcaagttaactcatcggactccgttttagccgacctaatcaagagggccaaggcttttggaaaaccacgctcctgcttgttccggcttcatcaaggcaaggtccctaggcccgtggcggtggatttaaaaggcgccatcctctcatcgcattcaccatcctatgctgagatggctgcccgtccgcctgctccagccagcaggtcgagtgaagctgctcatcgcccattcgccccaaacagtagactcccagggatg

SEQ ID NO: 66936 - DNA, 450 bp, Zea Mays
gatacactgaggaagacttttgctatcgacaataactagtcaagtcaacatgcttggactttgcaggcgcagctccggcacaaaccttagtgaaaagaatatatacacagtgctgccggtaattttccccccatcacaatgttttgcaagattcagcaatactagccattctgagtacctcattgaaagatttcttctgtgtacctgttctaaaccaaaataaagctcttagcaggagcttcagactgttgcaactataaaacatcaaggcaatggagacagtaacggttaaggattttcgaaacaagactgccgggttcaggaactagagcagatgtgatgccattccaaaaatggaaagtggtagagtcattcacgatcctagaaaagattgcatcatgatgtgctttttggaccatgttatcgggctctgagaaatatctgcagtac

SEQ ID NO: 66937 - DNA, 456 bp, Zea Mays
gccgtttcagtcaggaggaagacttttgctatcgacaataactagtcaagtcaacatgcttggactttgcaggcgcagctccggcacaaaccttagtgaaaagaatatatacacagtgctgccggtaattttccccccatcacaatgttttgcaagattcagcaatactagccattctgagtacctcattgaaagatttcttctgtgtacctgttctaaaccaaaataaagctcttagcaggagcttcagactgttgcaactataaaacatcaaggcaatggagacagtaacggttaaggattttcgaaacaagactgccgggttcaggaactagagcagatgtgatgccattccaaaaatggaaagtggtagagtcattcacgatcctagaaaagattgcatcatgatgtgctttttggaccatgttatcgggctctgagaaatatctgcagtac

SEQ ID NO: 66938 - DNA, 2174 bp, Zea Mays
ctttgccgtccgcccgtccctgctcggggatggggatgggagcggagatggagacgaccggtcgccttgtcgcggctcccgtcctttgattccccctgcctggtcgcgccagcaactccctgcaagcagacaaacaggcggccgccctggcacccctcctcggtcactagcacgcaccgcacccgtgaagccaacggcgagaccccgtgctaggctctccagtcaccagcgttatcagctgagccgtcccctctcgcttcgcttggcttaccacgcatcagtgatcaccgagtcactgacgccttgcccgaaaccaaattattgaccgacaacgcgatgctccaaggggtgctgtcccgcgcgcccgccaccgacgctgcggcagcaatgaaggccaagcgggcgggcgcgtcccccggcgaagaggaggaaggggacggccgttctgcgcgggggaagcgacagcagctgctcgggcttggccccgccaccgctttggcgtcggcggcggcggcggaggaagggccggagacgcgaggcctgcggctgctcagcctgctgctgcggtgcgcggaggcggtggccatggaccagctgacggaggcgcgggagctgctccccgagatcgcggagctggcgtcgccgttcgggtcgtccccggagcgcgtggcggcctacttcggtgacgcgctgtgcgcgcgcgtgctcagctcgtacctgggcgcctactcgccgctcgcgctccgcccgctggcggccgcgcagagccgccgcgtggcggtggcgttccaggcgtacaacgcgctgtcgccgctcgtcaagttctcgcacttcacggccaaccaggccatcctgcaggcgctcgacggcgaggactgcctccacgtgatcgacctggacatcatgcagggcctgcagtggccggggctcttccacatcctcgcgtcccgcccgcgcaagccgcggtcgctccggatcaccgggctcggcgcgtcgctcgacgtcctcgaggccactggccgccgcctcgccgacttcgcggcctcgctcggcctcccgttcgagttccgacccatcgaggggaagatcgggcacgtcgccgacgccgcggcgctcctcggctcgcgccagcggcggcgggatgacgaggccaccgtggtgcactggatgcaccactgcctctatgacgtgacggggtcggacgtgggcacggtgcggctgctccggagcctgcgcccgaagctgatcaccatcgtggaacaggacctgggccacagcggcgatttcctgggccggttcgtggaggcgctgcactactactcggcgctgttcgacgcgctgggagacggcgccggcgcggccgaggaggagtccgccgagcggtacgcggttgagcgacagctcctgggcgcggagatacgcaacatcgtggccgtaggggggcccaagcggacaggggaggtgcgcgtggagcggtggagccacgagctgcggcacgccgggttccggccagtgtccctggccgggagccctgccgcgcaggccaggctgctcctcggcatgtatccgtggaaggggtacacgctggtggaggaggacgcgtgccttaagctgggctggaaggacctctccctgctcaccgcgtcggcgtgggagccggcggacgacgctgccgcttctgcgcccaccggttaacgagtacaagacaagatttttgcagcagctttgagtcagaaaaaatggccacatgatcatctgcagtcgacagtcctgctgataaactggagattcggtgtggtgagttccccagctgggagggaggtgaacaggtcatagatactgtgctctgtgcagaagaagttgtcttcacgttacgcggtctggtcctgtcagtttactggttccggcaaacatcatccatcgccttgtacggttccggatgtcccatactgtatagacacagacagctcccgccgtcggccgtcagtttctttcccggcggctacacaacgctggccgtgaagatgacaggttattactgatacgaaagtgactgccagcacgtacgcgggcgcggtacgcgtgggcaaccgttcttcctggctccgatagttcgactcgatgttggggcgtgctgtttcgttccccgggatgaccacgacaaacgatgatac

SEQ ID NO: 66939 - DNA, 2375 bp, Zea Mays
ccggggctgcaacgatcgatgacgcaccggaacagtgcaggtgcagcgaaagaggagcgcgccgtcgctgtcgacggccgtgccgagcgccagcagacaagcggcgacgctacaaaacaacgcgccaaccaaccgccccactgctgaccctttccaacctccaagctccctgccttctgccggccggtcggcagcggtggtagcggccaccaccccagggtatggccgcccgctccctcctcctctacgcgctgctgctcctggccctcgccaccgccgcaccgtcccacggcctcactcaagcggatgttgcgaagcgattgaaggaggtgctgtcggagaggaaccgagggcatgagatgctcgattcgtggaatggggatggggacccgtgttctccgtctacctgggaaggcttctcttgcgaacccaaggatggtgcccaggtcgtcgtcaagttgaacttttcttcgaagaaactgcaagggccgattcctgcagagattgctaacttgacggagctaaatgaaatacatctgcagtataataacttcactggatttattccggcatccttttctgctttcagacacctgctgaagctgtcggtgatttgcaaccccttgttgaacaataagcagcctgatggattttctagtggcgtaaatttcagctatggaggatgtgccacccaagagtactatagctcaccagctgaagagtaccaaagcccacctgcagttgccagtcagaaagtatatgttattggtggtgtcgccggaggatctttggcatgtactgttgcactcggatcattctttgtttgttttaacaaacgtgaacggcgttctccaaaaaaggattgctcttctacaacaaatcctgtttttcaagaatgcagcatccataacactacaaatcctgcagtacaacagttgtccctcaaagcaatccagactgcaacaagcaactacaaaactatgataggagagggtgggtttggagcagtttatcgaggtgcattagcaaatgggcaagaagttgcagtaaaagtccgctcaagttcatcgacacagggaacacttaagacttctttctgctgtgtggcatgagaatttagtcccacttatcggctattgctgtgaaaaagatcaacagatattggtctatccgttcatgtccaatggctcactacaagatcgtctttacggtgaggcatcaaaaaggaaagttcttgattggcccacaagactatctgtttgcattggtgctgctagagggctagtatatctgcacaattttgcagggcgttgtatcatacacagagatattaaatcgagcaacatacttctggatcacagcatgtgtggcaaggtagccgactttgggttttccaagtacgcaccacaggaaggtgacagcaatccatcaatggaagtgaggggaactgctggatatttggaccctgaatactattccactcaggtgttatcaaccagaagcgatgtcttcagtttcggagtagtcctgttagaaattgtgacaggaagagaacctcttgatgtcaaaaggcctcgtcatgaatggagcttagttgagtgggcaaaaccatacatcagggagtacaagatcgaggagatggtggaccctggcataaaagggcagtattgctcagaggccatgtggagagtgctcgaggtcgcatctgtgtgcaccgagcccttctcaaccttcaggccgaccatggaggacgtcctgagggagctggaggacgctctgatcatcgagaacaacgcgtccgagtacatgaggtccatcgagagcactgggactctgggctccaaccgctatctgtccatcgacaggaagatgttcgcgtcagggtcagcgcgaatcgagtcgatgaaggggaatctgcaagcaatgccctcgcttccgcggtaactagacgccgcattgtgatttcgtagcgggcgtcgtcagggtgtgatccatgctcaaggcacatctaaccacgctgaggcctgactgagcacctgagatgggcatagacatgaagggatagtctgtactctgtaccatgtacagagcccattcagtggtgagagcacagatcagcgatacctacactgggaaatgccttctgaagccaatgtgctagttttgcctgttgaatttcccaaaagcaggcgaatgtgtgggcacaaactattctttggaccattataaacacgtaaaatgtgtcgagggaatccctcaagaaatcgaatattcagatctgtaccgtcacttcattatgtgaactattgctcgcttgttgtaattgtcattcttgcctaataaaccgatcaacagatgaattttctccaaacaag

SEQ ID NO: 66940 - DNA, 2173 bp, Zea Mays
gatcgatgacgcaccggaacagtgcaggtgcagcgaaagaggagcgcgccgtcgctgtcgacggccgtgccgagcgccagcagacaagcggcgacgctacaaaacaacgcgccaaccaaccgccccactgctgaccctttccaacctccaagctccctgccttctgccggccggtcggcagcggtggtagcggccaccaccccagggtatggccgcccgctccctcctcctctacgcgctgctgctcctggccctcgccaccgccgcaccgtcccacggcctcactcaagcggatgttgcgaagcgattgaaggaggtgctgtcggagaggaaccgagggcatgagatgctcgattcgtggaatggggatggggacccgtgttctccgtctacctgggaaggcttctcttgcgaacccaaggatggtgcccaggtcgtcgtcaagttgaacttttcttcgaagaaactgcaagggccgattcctgcagagattgctaacttgacggagctaaatgaaatacatctgcagtataataacttcactggatttattccggcatccttttctgctttcagacacctgctgaagctgtcggtgatttgcaaccccttgttgaacaataagcagcctgatggattttctagtggcgtaaatttcagatcctgtttttcaagaatgcagcatccataacactacaaatcctgcagtacaacagttgtccctcaaagcaatccagactgcaacaagcaactacaaaactatgataggagagggtgggtttggagcagtttatcgaggtgcattagcaaatgggcaagaagttgcagtaaaagtccgctcaagttcatcgacacagggaacacgtgagtttaacaacgagttaagacttctttctgctgtgtggcatgagaatttagtcccacttatcggctattgctgtgaaaaagatcaacagatattggtctatccgttcatgtccaatggctcactacaagatcgtctttacggtgaggcatcaaaaaggaaagttcttgattggcccacaagactatctgtttgcattggtgctgctagagggctagtatatctgcacaattttgcagggcgttgtatcatacacagagatattaaatcgagcaacatacttctggatcacagcatgtgtggcaaggtagccgactttgggttttccaagtacgcaccacaggaaggtgacagcaatccatcaatggaagtgaggggaactgctggatatttggaccctgaatactattccactcaggtgttatcaaccagaagcgatgtcttcagtttcggagtagtcctgttagaaattgtgacaggaagagaacctcttgatgtcaaaaggcctcgtcatgaatggagcttagttgagtgggcaaaaccatacatcagggagtacaagatcgaggagatggtggaccctggcataaaagggcagtattgctcagaggccatgtggagagtgctcgaggtcgcatctgtgtgcaccgagcccttctcaaccttcaggccgaccatggaggacgtcctgagggagctggaggacgctctgatcatcgagaacaacgcgtccgagtacatgaggtccatcgagagcactgggactctgggctccaaccgctatctgtccatcgacaggaagatgttcgcgtcagggtcagcgcgaatcgagtcgatgaaggggaatctgcaagcaatgccctcgcttccgcggtaactagacgccgcattgtgatttcgtagcgggcgtcgtcagggtgtgatccatgctcaaggcacatctaaccacgctgaggcctgactgagcacctgagatgggcatagacatgaagggatagtctgtactctgtaccatgtacagagcccattcagtggtgagagcacagatcagcgatacctacactgggaaatgccttctgaagccaatgtgctagttttgcctgttgaatttcccaaaagcaggcgaatgtgtgggcacaaactattctttggaccattataaacacgtaaaatgtgtcgagggaatccctcaagaaatcgaatattcagatctgtaccgtcacttcattatgtgaactattgctcgcttgttgtaattgtcattcttgcctaataaaccgatcaacagatgaattttctccaaacaag

SEQ ID NO: 66941 - DNA, 3970 bp, Zea Mays
gattcgcgtgtggtgaaagctactggtagatcgcttgacggaattcggaagccactgaggcgagcggcgagcgcacaccgtcacaagcaccacgccgccgctactgactgacccgaccatcactcacccaatacttggaggtgcgagatggcagcgtcaggatcgggaggcaacgagcccggcgggcggccttggacggcgaccagcacgtgggtcctcggtcccgccggcgggaccgcggaggacgctgtctcgttcgagacctccgactacgacgccgaggcgtcaccggctggcgtcgtgctctgccgcccgccggccgacgcggagggcgacgtgcattcctgcccctgcgagctcactgttagtttcagggggaagtatgagattcacagggtatatgtgcgaagcacagctcggatatatgaactataccactctcctgatgcaaagggcaccggcaaggattatctatgcaccgtgcgttgtggacttgctgttaaagaaccgcagccctatggcgaagaaagtatgtcccagcggactggcagtgctttaaacagtgccaagcgtgaacatgaggcaaaaagtgtaagcagtggtagtgatgaagatagttgggttgatgtcaatattccagaatctcctgcgggaaataaaacactaacatctcaagaaaggaatgtgattcgtacctgccaagtaaatactatggcacactatgaagctactgccgagatgactgatgttaacccatgtgcatcccttactatacgtcttctatcacttcagtcaaatacgtcagtgcacattgaggaaatctacatatttgctgatcctgttgaatccaccaatgatgtttcagtaagaggtcctggaaacatgggaggcagttctttgctggcaatgcttgctcctggccttatgcaaatgtctaagtcaagaaatttgaaaattgatggtagttatttttctgacaaatcaagggatcaagatagcgtcacatgtgaaagggttacacaggaagcagggctgtgtagcacaaatgattcaaaatatacgtctgcagggatagaaagtggaatgggccctacaattggtgttacagtatctgatgaaaaaagtagccaaagcgagttccagttcaaggagcccaattctcttccactgcctgtacaaacattagatagcacacaagcgccttcagtgaaggatcggcgagaattaaacacaggtcatcccctcatgaatgaaaactttactccttataatcatattgagagaaagctggatactctgctgtcaaaggtagagaaggtggaattatattgctctaggtttgaggacagcatgataaagccccttggtagcattgaggcaaggcttcagcgactggaggaacagtttagttcgttctctctggatattcagtctttgagaggttcttctgcatttatgtcagcaccagatggtatgcctaatacaaagagctcgcaggaggaagcacctaatgatgctaatgatagaagtacttctacaactgacaggaagccaggtttagttgttagggcgccagattttatgtcagatgattcctgtggttgtaatgtaataactaatggaaaccaggttagttgccatgggcctaatgtggtgccaaggctacttgtgaaggtccctgattttatttctcaagctgagttaactgatggaaacctccatgatggacatgctctatcttctgaaaaggagtgtaagccttccccgggtttaattgtcaaggttcctgaattcctagatgatgatgatgatgatgacgataatgacagcgacgacgaagtggaagggaagaaacaggcagaagtttgtggtgatggtgatgctcacgcatggtctgatgatactctgaagaaaaacacatccagcaacaccaagagcaaaaaaactgtatctatcaatggggcattggcgtccgcattggaggcattactcacttccaccataggaccaccatcttcaaaacctgctgtttgcgctaccagtaatttaagtgctgaaaatattaatgattccttcagttgctcccgttatcctggaaaaagtggcgagatgcccactaaatatggttcagttgaccaatttctgggtacatctggtgatccaaatttggtcggtgccttcatatcttttcaggatattgatacgactcataattctctgtcaaaggaaatgttggatagcgaggttgagataaatgaacataactgtgatctcaatacagaaaaggtggcatttgttgcaatcacagaaccattggatgtttcctcacagactgataaaattgacgaatctatttgtgatggaagttggatgaacagacaaaacaatggttctaattttgatacaatgccatatatcatgaacattgaacctttggatccttctaagcctcctacagtttttggacctgttgatagtggagttcaggtgaatgaagatagaccttccatatccttgctggagtttcttgcagcaaggaatgcaaactcttgcaagaatgatacttcggaggtatgccttggtaacgaagctgctgaaaaactgtcttttgagagaacatcggctggagctggtaaaaactcgaaaaataccagtcaacttctagtgaagaaagctcttgagattgacgcggacgagagattttttttgtctagtgtacccatcggggcaaaatttgaaagaacaagcagtcccgcccccagaactagtgggcacgatattaataatacaaaagaagctgtctcagataaggaatgtggcctggaggatagagagaatggaattaggctctcttcgaggatggactctatattttctcagtgtcatgctacagactccttgtcaagtttgagtagtatggagtcatttagtgcagcacctgccacagaccctgttgttccagggaatgacacatcgggaaatttcgtggaagatcttgcaggcattggagatcatcctgttgcaacactaatatctggggaagatctccaaaaggtttgtgatttgctttatgagttgaaggatgacatgttgggcatggcctccacagcaaagtgtacaaacaagagcagcccgtcccttgaagtcttgcttgctgaatcatctgattctgaagtgcaaatttctgatcttgaggagggtattgccagtggcgctggcattggctcagctggactgtttggtacattctcatcttcagatgacgatgcttctgctgcaggcgagcctttaggtgatgttgccgacctgactacaccatcagagccatatacttctgccttcaatgagcctctggttgacgtggctgacctgacaaacccttcagggacagatgctacttcagtgaatgagcagccttcggctgatgtggttgatccgctacatacttcaaacgagcctttggtcagtttggatgatctgccaaaccctccagagatgtcttttggtgggagcagtggagaacatcctgacagtcttatataggataaggctatgcgacactgatagttcagagatgagcgattgagcggaacatgttcctgctgctgcactagttggtgtgtgctgtacagtgatgactgttttcttcgtgcagaagtttctgtacataaataagtctttgtgtcctcaatagtttatgctaaatactacgaaagcaaagtaactttggtttcgggttgctattctccggttcgtgcaatccatcattacaaccgaacacctgccggcatattactttttactgttgcccgttcattttaagatctgagcatttgcaggagaaacacgtagctaccacttaccagacgcgcctatattgggtacaatttctagaccagaccagagttacaatcaagaatcaacccttcatctagaacagaccatacaagctggcaggtgaatctcggag

SEQ ID NO: 66942 - DNA, 2386 bp, Zea Mays
aatcacccctcgttgacctagtaaactccggtatctcgcctgtctgatggccgccacaaccgccgccgacgcattcccctccaccgtctcctcagactcggactccgacgacctacttctcccgaacctcctcccctccaccaccaccgcacccgcaccctcctccccatcgcgcgagcagctccaccacttccaaatcccctccctcccgtcccccatcaccgtccgcgcgctcccgtcacggggcctctcgtttcagctctggccctcggcctccaccctcctgcgagtcctccctgccaccccgtgcctcctcccgcgcccgcccgcgctggggagcccgctcagcgtcctcgagctcggctccggcaccggcgccgcggggctcgccctggccgcggcgctcccggcgcgcaccgtcctctccgacctccccgacgcgctccccaacctccgccacaacgtcgaactcaacgagcacctcctcggctccgccggtggcgcggcctccgtcgtgccgctccgatggggcgacgcctccgcgatggcggacgtggccgtggcgcagacggcgtccccgttcgacctcgtcgtggcgtcggacgtggtgtactacgaggagttggtggaccccttgatagagacgctgcggttctttgtgaagggggaggtggcattcgtgatggcgcacatgaggcggtggaagcgcacggacaagaagttcttcggcagggcgagaaagctgttcgacgttgaggtggttcacgaggatccaccgctcgagggctggcgccacgggccggtggtttaccggttcaccgccaagaagcagcacggcaagaagtgaagaaactaccttaaggtaaaggctgcttgcttgcctatctgcatgtgttcatgttgcagcgctgctgctgctgctgtttgtcctcgtttgttgcgtgctagattccaatgttggaaacagaaagtagttccttggaacaatgtgcaactctggaccaaaactgggttgaatttgcaggcatattgatttacattgtatcggtgaggttttgctctggtttactatatactatctagtttgatgagttcaatgtaagtgtcatattacatttttcgaattgaggaatctttattcttctctgtttttggtggtagctcatgttgagtttcaactctaacctagccaaacttgtagggtaaaaggcttttttgttgctgaaggatcttgttcttatgtatgatacattttcctaaaaaatcttatatatggtaaaatatatgatgtgaaatactaggtagttgccacatgtactttgcaagtaataatgtagtattatatccacatgattgtttggatggtgtaatttcatggtttgatatttcaaactgcttctaggtccttgtgcactacaaaacaaatgtttgtttcaccattaacttaagtagcataaattaaccggtagtttcaaactttccaacaccacttctatgccattatgtgataataataaatgtttgcttcaatatgaccttaagtaacagaacatatttatccattgttaaactgcgatcggaggttgtcaacatgcgaatgctttgtctgtatagcatgttaacctcgctctgcttggagggcttctcttgcactattttctaaaacttttctctaggtgaagctctaatgaattgagtctttctcatatgaaatgaaaggttcccttcatgtgttacaacgaaaccttggatcttattactatattgtgatgttgaatatatgtccaagaggcaatcatgatccataagaacgctaatgggtctttagggtagcttctccactgccaccaatgcctctagtcggttagaggggatggtgatgacgttgttgggccccagcatcttgaggactagatgccctgtagagcatgtggcgcccaaggtttgcgttgtagggaagatggagctcgacaacggtgaactccacatattcagcgtggaagttcacgcgagtgccgaaggcgaccggcaccttgattgagtcaattgggaggatcatcctcggggagatttcgacaaacaggcgggcttcgtctgtggactgtgggatctacatcttgttaaaggcatacatcaacaagatggtgatgccgggcctatcatcaaccatgacatgcttgaatttgatattgttgatggtgggagagacgacaagaggaaggatccctgcgcctaccatgttactagggcagccaaagtaatcgaaggagatcgaggtgccagcctatctgagggtctgccgtggaatggcgacgtgcagaagctttagggctcacctaaaagacaactcggtggtgtcgtaattaacggaaaccgtccgctctag

SEQ ID NO: 66943 - DNA, 1068 bp, Zea Mays
gtcaaccacgccgcccgtcacgaacgcgacgccgaggccgggtcaggtcttttgccttgatcaccgaagttatacatcacaccaatgcccaaatgcaaacatgaaagacgtcactgtcctcatctgcccactctgtgctaaaggtgttcgcctcaatccaagtgaagacccaaatatcacctgggatactcatgttaacactgattgtgatccatcaaattaccaaaaagtgatgaagaaaaagaaatgccctgttcctgggtgcagagagacactgacattttccaacaccatcagatgcaaagattgcaccagagaacactgcctaaagcacagatttgggcctgatcataagtgcccaggaccaagaaaagtggattctggctttccctttgtaagcatgctaaggagaagtcagaaagcggagacacgctcaaatagcagtaacaacaatggttcttcgtggtggagctccagtcttgtgaatgcagcaacgaatttcaaatcatcagccgaagctggaatgcagaagctgagcaccgtgactagccaagccttccagaaggctaaggatgggatcgccccaaatagcagcagcagcagtggtgaccttgtggagcaatgtgttcactgcccagcaagattttccaccgtgggggccttaattgaacatgttgagaaatcccaccagatcaactcacaaccaagtcatggccgagtgacgattgatgtttgcccaaaatgcagcaaggcgttccgggatcctgtgttgcttgtggagcatgttgagaaggagcatggaggaacgtcaagagtgtagtgtaaagcttcgtgtgtactcttaacctttgtaatgtgtaacttttcgttaccttttctcatttcatcaatttgattatactctacacttttgggctcaacatttgcccacaggacaagtatattacgctggattgaaggcaaagcagccattgtccatcattatagaaactgaagtaagatttgttaagaaaatgttaatatctgtcgcaactggtgaaaaaaaaggcagcagctgttcttggcctt

SEQ ID NO: 66944 - DNA, 1333 bp, Zea Mays
ctcgtccggtggactggcgttcacgtaatcacggtccacaagtctcgccgatacgcgatacggcgataccggccgtcgccgtctcatgggctccggctccgactctcacgtttccttctcccttcctgccgctacggcggtggcggcaacgactcgcgcgggccggtcctaggttctcccggagcgggtgggcgggcgggcggttcggcgggatgggcacgccggagttccccaacctgggaaagcactgcagcgtcggcgactgcaaccagatcgacttcctccccttcacctgcgaccgctgcgaccatgtcttttgccttgatcaccgaagttatacatcacaccaatgcccaaatgcaaacatgaaagacgtcactgtcctcatctgcccactctgtgctaaaggtgttcgcctcaatccaagtgaagacccaaatatcacctgggatactcatgttaacactgattgtgatccatcaaattaccaaaaagtgatgaagaaaaagaaatgccctgttcctgggtgcagagagacactgacattttccaacaccatcagatgcaaagattgcaccagagaacactgcctaaagcacagatttgggcctgatcataagtgcccaggaccaagaaaagtggattctggctttccctttgtaagcatgctaaggagaagtcagaaagcggagacacgctcaaatagcagtaacaacaatggttcttcgtggtggagctccagtcttgtgaatgcagcaacgaatttcaaatcatcagccgaagctggaatgcagaagctgagcaccgtgactagccaagccttccagaaggctaaggatgggatcgccccaaatagcagcagcagcagtggtgaccttgtggagcaatgtgttcactgcccagcaagattttccaccgtgggggccttaattgaacatgttgagaaatcccaccagatcaactcacaaccaagtcatggccgagtgacgattgatgtttgcccaaaatgcagcaaggcgttccgggatcctgtgttgcttgtggagcatgttgagaaggagcatggaggaacgtcaagagtgtagtgtaaagcttcgtgtgtactcttaacctttgtaatgtgtaacttttcgttaccttttctcatttcatcaatttgattatactctacacttttgggctcaacatttgcccacaggacaagtatattacgctggattgaaggcaaagcagccattgtccatcattatagaaactgaagtaagatttgttaagaaaatgttaatatctgtcgcaactggtgaaaaaaaaggcagcagctgttcttggcctt

SEQ ID NO: 66945 - DNA, 1154 bp, Zea Mays
cgtgcatgtcgcgaagccaggaacagaaagggaggtgctttcacgatacggattgtgccgccgtctgcgtcaaacagagcttcaccggaggcttatgcaacgggcggccgccgttcaagcagtgcttctgcactaagccatgcaagagagagagagctgatgctacactccggtcgtcaggcctctgatcatgttgtgcttgatccgcatgacagcgcgactctcgcttgtatgcctaggttgatgtgtatgtaataaataaacaaaatagtaaatgacatgtttttcttacatgaaagtcaagcgattttgcttatctgaccggcatgtgtccgcgcgaatcgatttgctctgagatggttttatttctatacatcagagagaaggagacgctcgcgtcgccccccgcgcgggcgaccgagcggacacctaatcctagccgccgcggcgccgccatcctcacctcgcctcttctcgccgcaccgctgcccgagcaggatgccggctgctcgtgcggcctgcggggaaggcggcggcggggccctctcttctcttctccggtggattggggcggacgcggctgcctggtcccccggacctcctcgtcggcgatgacgggctggcggtggaggaggatagggccaccagatccgatattccctcggctggatccggtggccgtgcgacgagaggtgtgtgatgtgcgtggggcggcaggacgccgggcagcggcggcggccggctcgggcggcaccgacggtggtcgtggccagtgcaggtgtctggcgctaggggctacttgacttcgtgctgtggctgcaggccgtggccggctgtggctgccgtggcttggttggctggggcagcgcacggacggcaggctttgtggtgaggcagttcttgcttctcggcggtgatgctgatggtgccgtggtggtgctttgggctgtgacgggcttcttccggtggagtcgatgcgggggcaagaggagcgggctgggctactggcttgggcaagaacatatggcaggtgctgagtcgggcgtaagtcttcactgacgtctatgtcaatggcgatggtggtgacacccttgtggcgttgagtcgggcgtaagtcttcactgacgtctatgtcaatagcgatggtggtgaca

SEQ ID NO: 66946 - DNA, 1368 bp, Zea Mays
attagccctagctattaacaaacaaaaattaattatatctcttccaaatggtcccaagttggcgttaagatagtggcacacatatacttacatgttgagatgatcaaaatctatactatttattaagaacgcaagggtagcctgcctccttgcgttctgccgttagacaatctcaaccgtccgttctatccttctctgatctaaaccgtccgatcccacacaacagtcccactcctcgatcctgcccaccagccccgaagccgtcgcgggtgctgctgcggaggcccaggaccgaaattgaactgcagttggtgaggtggcggcggaccgggtggcggcgggggcgggggcccagcgtggtagggcggcaccggcatcctgttgtagggcgcctgcggcggcggcgtgtacggattcatctgcgacgggtagccgccctgcggaggcggcggtgcgtacgacctgtaagacgccatcgcgcggcagctagggttcctcggaacccgagccctagcacacagacaccgcgcctgcggacactgctcgctccccttctcctccgtcgccgccaccgcagaagcctctaccacgcgcgaccagctcgccgccgcgcccgccggggccgacggcctgcacgcgctcgccgagcaggtggtgcagctcgtgctcgccgacggctccggcgccagcagcccgcgcgtcgccttcgccgacggcgtcttcgtcgactcctcgctgaagctcaagccggccttcgaggaggtccccgtgggaaagtacagggccgacacccagtccgtcgacttccagaaaagtggtcatatcaaccagaacttatcaaggaagtgtgaagcattagttgtgtcaggtttggcagaatatggtgatgaaatagatgggattgtcccagctgatatcatgaagattcagcctatcctacaatggtcgtgatagatgaggtagattcttttctcttcagaccacatgttgggcttagggccaagtaccaggcaatatgtaattattaaaagcacattatgtgccattattgtttcagaaattccatagacaacatcttcattaatattgaattttactgaattatctaccaaactggcttctaatcattagaaatatgatttacattatgatttttaccttctaatttgtgacatctctacaagtaattttcttaccagattcttcttgcaaacaagggagattgacctaaaattgcaaaacagttggtggatgtctacgcgcgcagtttaaggttccaagtgaagaagaaacagttctttcgaaacttcattactattacactgtttggtgcagttggcaccttgatctcttttactgtaatatccc

SEQ ID NO: 66947 - DNA, 1128 bp, Zea Mays
attagccctagctattaacaaacaaaaattaattatatctcttccaaatggtcccaagttggcgttaagatagtggcacacatatacttacatgttgagatgatcaaaatctatactatttattaagaacgcaagggtagcctgcctccttgcgttctgccgttagacaatctcaaccgtccgttctatccttctctgatctaaaccgtccgatcccacacaacagtcccactcctcgatcctgcccaccagccccgaagccgtcgcgggtgctgctgcggaggcccaggaccgaaattgaactgcagttggtgaggtggcggcggaccgggtggcggcgggggcgggggcccagcgtggtagggcggcaccggcatcctgttgtagggcgcctgcggcggcggcgtgtacggattcatctgcgacgggtagccgccctgcggaggcggcggtgcgtacgacctgtaagacgccatcgcgcggcagctagggttcctcggaacccgagccctagcacacagacaccgcgcctgcggacactgctcgctccccttctcctccgtcgccgccaccgcagaagcctctaccacgcgcgaccagctcgccgccgcgcccgccggggccgacggcctgcacgcgctcgccgagcaggtggtgcagctcgtgctcgccgacggctccggcgccagcagcccgcgcgtcgccttcgccgacggcgtcttcgtcgactcctcgctgaagctcaagccggccttcgaggaggtccccgtgggaaagtacagggccgacacccagtccgtcgacttccagaaaagtggtcatatcaaccagaacttatcaaggaagtgtgaagcattagttgtgtcaggtttggcagaatatggtgatgaaatagatgggattgtcccagctgatatcatgaagattcagcctatcctacaatggtcgtgatagatgagattcttcttgcaaacaagggagattgacctaaaattgcaaaacagttggtggatgtctacgcgcgcagtttaaggttccaagtgaagaagaaacagttctttcgaaacttcattactattacactgtttggtgcagttggcaccttgatctcttttactgtaatatccc

SEQ ID NO: 66948 - DNA, 1566 bp, Zea Mays
caaaaattaattatatctcttccaaatggtcccaagttggcgttaagatagtggcacacatatacttacatgttgagatgatcaaaatctatactatttattaagaacgcaagggtagcctgcctccttgcgttctgccgttagacaatctcaaccgtccgttctatccttctctgatctaaaccgtccgatcccacacaacagtcccactcctcgatcctgcccaccagccccgaagccgtcgcgggtgctgctgcggaggcccaggaccgaaattgaactgcagttggtgaggtggcggcggaccgggtggcggcgggggcgggggcccagcgtggtagggcggcaccggcatcctgttgtagggcgcctgcggcggcggcgtgtacggattcatctgcgacgggtagccgccctgcggaggcggcggtgcgtacgacctgtaagacgccatcgcgcggcagctagggttcctcggaacccgagccctagcacacagacaccgcgcctgcggacactgctcgctccccttctcctccgtcgccgccaccgcagaagcctctaccacgcgcgaccagctcgccgccgcgcccgccggggccgacggcctgcacgcgctcgccgagcaggtggtgcagctcgtgctcgccgacggctccggcgccagcagcccgcgcgtcgccttcgccgacggcgtcttcgtcgactcctcgctgaagctcaagccggccttcgaggaggtccccgtgggaaagtacagggccgacacccagtccgtcgacttccagaaaagtggtcatatcaaccagaacttatcaaggaagtgtgaagcattagttgtgtcaggtttggcagaatatggtgatgaaatagatgggattgtcccagctgatatcatgaagattcagcctatcctacaatggtcgtgatagatgaggtagattcttttctcttcagaccacatgttgggcttagggccaagtaccaggcaatatattcttcttgcaaacaagggagattgacctaaaattgcaaaacagttggtggatgtctacgcgcgcagtttaagatgttgagggcctgaaccgcatgtaaggtggtattgtggcacttcaagtttgtacaaagatggggtgatcctctagggagggtaacacattggtaaaatagtcacttacgtgtggtactgtggtggggtagtgacatattatcttgtgatctttgagcatgtggtcatgctttgtttcagtgcttggaacattgccagccatcttgttgatgtgtttcactggtaattattgttgtccagccatcacatgtaatttgggcatgacatgctattctgtgttcatgcatttgaattcacaattttaagaatgggcatgttacaatggacatggacttttgtggggatctaaatatcattctttcggtaacaaaataaacattcttatgtttgaaacactatatttctaaatcatgctacagtgcacgcgcttggctgactgcccagttagctatttgcatacaccaagcggcagtgtatatatattttgtcggtttaag

SEQ ID NO: 66949 - DNA, 1107 bp, Zea Mays
caaaaattaattatatctcttccaaatggtcccaagttggcgttaagatagtggcacacatatacttacatgttgagatgatcaaaatctatactatttattaagaacgcaagggtagcctgcctccttgcgttctgccgttagacaatctcaaccgtccgttctatccttctctgatctaaaccgtccgatcccacacaacagtcccactcctcgatcctgcccaccagccccgaagccgtcgcgggtgctgctgcggaggcccaggaccgaaattgaactgcagttggtgaggtggcggcggaccgggtggcggcgggggcgggggcccagcgtggtagggcggcaccggcatcctgttgtagggcgcctgcggcggcggcgtgtacggattcatctgcgacgggtagccgccctgcggaggcggcggtgcgtacgacctgtaagacgccatcgcgcggcagctagggttcctcggaacccgagccctagcacacagacaccgcgcctgcggacactgctcgctccccttctcctccgtcgccgccaccgcagaagcctctaccacgcgcgaccagctcgccgccgcgcccgccggggccgacggcctgcacgcgctcgccgagcaggtggtgcagctcgtgctcgccgacggctccggcgccagcagcccgcgcgtcgccttcgccgacggcgtcttcgtcgactcctcgctgaagctcaagccggccttcgaggaggtccccgtgggaaagtacagggccgacacccagtccgtcgacttccagaaaagtggtcatatcaaccagaacttatcaaggaagtgtgaagcattagttgtgtcaggtttggcagaatatggtgatgaaatagatgggattgtcccagctgatatcatgaagattcagcctatcctacaatggtcgtgatagatgagattcttcttgcaaacaagggagattgacctaaaattgcaaaacagttggtggatgtctacgcgcgcagtttaaggaggcaggagcatccttaattgaacgacagtgatcctgcagtttatgttggaaagaaattaacataggagcattgcacgtatttggttattgtttt

SEQ ID NO: 66950 - DNA, 1467 bp, Zea Mays
gttaagatagtggcacacatatacttacatgttgagatgatcaaaatctatactatttattaagaacgcaagggtagcctgcctccttgcgttctgccgttagacaatctcaaccgtccgttctatccttctctgatctaaaccgtccgatcccacacaacagtcccactcctcgatcctgcccaccagccccgaagccgtcgcgggtgctgctgcggaggcccaggaccgaaattgaactgcagttggtgaggtggcggcggaccgggtggcggcgggggcgggggcccagcgtggtagggcggcaccggcatcctgttgtagggcgcctgcggcggcggcgtgtacggattcatctgcgacgggtagccgccctgcggaggcggcggtgcgtacgacctgtaagacgccatcgcgcggcagctagggttcctcggaacccgagccctagcacacagacaccgcgcctgcggacactgctcgctccccttctcctccgtcgccgccaccgcagaagcctctaccacgcgcgaccagctcgccgccgcgcccgccggggccgacggcctgcacgcgctcgccgagcaggtggtgcagctcgtgctcgccgacggctccggcgccagcagcccgcgcgtcgccttcgccgacggcgtcttcgtcgactcctcgctgaagctcaagccggccttcgaggaggtccccgtgggaaagtacagggccgacacccagtccgtcgacttccagaaaagtggtcatatcaaccagaacttatcaaggaagtgtgaagcattagttgtgtcaggtttggcagaatatggtgatgaaatagatgggattgtcccagctgatatcatgaagattcagcctatcctacaatggtcgtgatagatgagattcttcttgcaaacaagggagattgacctaaaattgcaaaacagttggtggatgtctacgcgcgcagtttaagatgttgagggcctgaaccgcatgtaaggtggtattgtggcacttcaagtttgtacaaagatggggtgatcctctagggagggtaacacattggtaaaatagtcacttacgtgtggtactgtggtggggtagtgacatattatcttgtgatctttgagcatgtggtcatgctttgtttcagtgcttggaacattgccagccatcttgttgatgtgtttcactggtaattattgttgtccagccatcacatgtaatttgggcatgacatgctattctgtgttcatgcatttgaattcacaattttaagaatgggcatgttacaatggacatggacttttgtggggatctaaatatcattctttcggtaacaaaataaacattcttatgtttgaaacactatatttctaaatcatgctacagtgcacgcgcttggctgactgcccagttagctatttgcatacaccaagcggcagtgtatatatattttgtcggtttaag

SEQ ID NO: 66951 - DNA, 846 bp, Zea Mays
cgcgggtgctgctgcggaggcccaggaccgaaattgaactgcagttggtgaggtggcggcggaccgggtggcggcgggggcgggggcccagcgtggtagggcggcaccggcatcctgttgtagggcgcctgcggcggcggcgtgtacggattcatctgcgacgggtagccgccctgcggaggcggcggtgcgtacgacctgtaagacgccatcgcgcggcagctagggttcctcggaacccgagccctagcacacagacaccgcgcctgcggacactgctcgctccccttctcctccgtcgccgccaccgcagaagcctctaccacgcgcgaccagctcgccgccgcgcccgccggggccgacggcctgcacgcgctcgccgagcaggtggtgcagctcgtgctcgccgacggctccggcgccagcagcccgcgcgtcgccttcgccgacggcgtcttcgtcgactcctcgctgaagctcaagccggccttcgaggaggtccccgtgggaaagtacagggccgacacccagtccgtcgacttccagaaaagtggtcatatcaaccagaacttatcaaggaagtgtgaagcattagttgtgtcaggtttggcagaatatggtgatgaaatagatgggattgtcccagctgatatcatgaagattcagcctatcctacaattcttcttgcaaacaagggagattgacctaaaattgcaaaacagttggtggatgtctacgcgcgcagtttaaggttccaagtgaagaagaaacagttctttcgaaacttcattactattacactgtttggtgcagttggcaccttgatctcttttactgtaatatccc

SEQ ID NO: 66952 - DNA, 1726 bp, Zea Mays
atggggctgggggctgcgatggcactgggcgacccaccggcggactacgcatccatcgcggcggtggggctgtttgtggcactcatgtgtgtcggcatcatcgtcgggcacctgctcgaggagaaccgctggatgaacgagtccatcaccacgctcttcatcgtgttaagccaagatgagacaccattcttgtacagcctcgtgtttggtgaaggtgttgtcaatgacacaacttctgttgtgttgttcaatgcaatccagaactttgatcctggaaatatcagcggtgccaaattactgaacttcattagcagtttcctttatttgttcggctccagcaccattcttggagtagcttctggacttcttagtgcttataccattaagaagttgtactttggcagcccggtaaagtctatcgctttgagcaacaccattttagccttggtgctggtttcaagagctgcttttgttttcccactatcctttctatcaaatttgaccaaaaaaactccaaatggaaagatatcttttaggcagcagtgcgaggcattttgggagggacatcatcatgcccaacttgaagtcgtccgtgaccacaacagcgagcgcggtggagtacatggatgaagtattgaaggcgttgccgctagggatttttgaagcactaactgcattccccttctccccttctcccttcctgctgtgcgaagccgtgccccaaaccctctaccatcttatttcagttcccactctctaccatcttccaggaaaaaacactagcaatcttacatgagttccaagttttgcaggtcgttgctgtttgtgaatgtggtttggattatgacagacttcagttctgtccgacagatatgcaaaaaaagtactttgagaaacaatttgagttggctgaagcagtaaagctgcccattttcttcacatgtgtgctgctggtgaagacttctatgaaatcatgacacaaaatttgcacagattccctggtggggttacacattccttcactgactcaacagaagatcaggataggctactttcttttgagaagatgtttatcggtgttaatggttcctctctgaaaactaacggaaatcttgaggttgtacgaggcattcctgtcgagaggttgatgatggaaacagattctccatattgtgacataataaatactcatgctggaagccagtatgtaaaatctgtctggccatccaagaagaaagaaaagtatgagccagattcaacagtaaaaggtcgcaatgaaccttgtttagtcaggcaagttcttgaggtagtggcgggaagcaaagaaatttctgacatagaaggcctgagtagaactctgtaccacaacacatgcaggctcttctttcctcaggatcttgacgcgtctactaatgcgcagcttgagagtggtactgccgtccaggattgctgatgtcagagtgattttttttaaaaaatgtttccttttggttggcgtttggtttcgtacaacttccaatatgcctatgaaatgtttttggtcttataattttccctcgctgccaattttgccatgtttcatgagcctgatgacatgtcaggcaagtcctgactatgtacaagtaccctactgagactatgccctaaaatcatttagggctgagcatgtacaagtacagtttgatggctatgttgttcactacaatcaaacaacaactaagctcta

SEQ ID NO: 66953 - DNA, 2178 bp, Zea Mays
atggggctgggggctgcgatggcactgggcgacccaccggcggactacgcatccatcgcggcggtggggctgtttgtggcactcatgtgtgtcggcatcatcgtcgggcacctgctcgaggagaaccgctggatgaacgagtccatcaccacgctcttcatcgtgttaagccaagatgagacaccattcttgtacagcctcgtgtttggtgaaggtgttgtcaatgacacaacttctgttgtgttgttcaatgcaatccagaactttgatcctggaaatatcagcggtgccaaattactgaacttcattagcagtttcctttatttgttcggctccagcaccattcttggagtagcttctggacttcttagtgcttataccattaagaagttgtactttggcagcccggtaaagtctatcgctttgagcaacaccattttagccttggtgctggtttcaagagctgcttttgttttcccactatcctttctatcaaatttgaccaaaaaaactccaaatggaaagatatcttttaggcagcaggttattgtttggtgggcgggtctcatgagaggtgttgtgtctattgcgttggcttacaataaggcgtttgacttaatgtttccaaggttctgtggaagtgcgaggcattttgggaggtgtgcgaggcattttgggagggacatcatcatgcccaacttgaagtcgtccgtgaccacaacagcgagcgcggtggagtacatggatgaagtattgaaggcgttgccgctaggtgaggccaggaatgaggattcacgaacactgcaattcaattatggttcattcaaacataaggcattggataaatccttaactaaaaaggttcctaaaaatcgtttgacttcaaatactaaactaacacaatgttgctctattgtagggatttttgaagcactaactgcattccccttctccccttctcccttcctgctgtgcgaagccgtgccccaaaccctctaccatcttatttcagttcccactctctaccatcttccaggaaaaaacactagcaatcttacatgagttccaagttttgcaggtcgttgctgtttgtgaatgtggtttggattatgacagacttcagttctgtccgacagatatgcaaaaaaagtactttgagaaacaatttgagttggctgaagcagtaaagctgcccattttcttcacatgtgtgctgctggtgaagacttctatgaaatcatgacacaaaatttgcacagattccctggtggggttacacattccttcactgactcaacagaagatcaggataggctactttcttttgagaagatgtttatcggtgttaatggttcctctctgaaaactaacggaaatcttgaggttgtacgaggcattcctgtcgagaggttgatgatggaaacagattctccatattgtgacataataaatactcatgctggaagccagtatgtaaaatctgtctggccatccaagaagaaagaaaagtatgagccagattcaacagtaaaaggtcgcaatgaaccttgtttagtcaggtactttgagaaacaatttgagttggctgaagcagtaaaactgcccatgtttcttcacatgtgtgctgttggtgaagacttatgtgaaatcatgacacggaatttgcacagattccctggtgggttacccatttctttcactgactccgcagacgatcgggttaggctactttcttttgagaagaggcaagttcttgaggtagtggcgggaagcaaagaaatttctgacatagaaggcctgagtagaactctgtaccacaacacatgcaggctcttctttcctcaggatcttgacgcgtctactaatgcgcagcttgagagtggtactgccgtccaggattgctgatgtcagagtgattttttttaaaaaatgtttccttttggttggcgtttggtttcgtacaacttccaatatgcctatgaaatgtttttggtcttataattttccctcgctgccaattttgccatgtttcatgagcctgatgacatgtcaggcaagtcctgactatgtacaagtaccctactgagactatgccctaaaatcatttagggctgagcatgtacaagtacagtttgatggctatgttgttcactacaatcaaacaacaactaagctcta

SEQ ID NO: 66954 - DNA, 2317 bp, Zea Mays
atggggctgggggctgcgatggcactgggcgacccaccggcggactacgcatccatcgcggcggtggggctgtttgtggcactcatgtgtgtcggcatcatcgtcgggcacctgctcgaggagaaccgctggatgaacgagtccatcaccacgctcttcatcgtgttaagccaagatgagacaccattcttgtacagcctcgtgtttggtgaaggtgttgtcaatgacacaacttctgttgtgttgttcaatgcaatccagaactttgatcctggaaatatcagcggtgccaaattactgaacttcattagcagtttcctttatttgttcggctccagcaccattcttggagtagcttctggacttcttagtgcttataccattaagaagttgtactttggcagcccggtaaagtctatcgctttgagcaacaccattttagccttggtgctggtttcaagagctgcttttgttttcccactatcctttctatcaaatttgaccaaaaaaactccaaatggaaagatatcttttaggcagcaggttattgtttggtgggcgggtctcatgagaggtgttgtgtctattgcgttggcttacaataaggcgtttgacttaatgtttccaaggttctgtggaagtgcgaggcattttgggaggtgtgcgaggcattttgggagggacatcatcatgcccaacttgaagtcgtccgtgaccacaacagcgagcgcggtggagtacatggatgaagtattgaaggcgttgccgctaggtgaggccaggaatgaggattcacgaacactgcaattcaattatggttcattcaaacataagggatttttgaagcactaactgcattccccttctccccttctcccttcctgctgtgcgaagccgtgccccaaaccctctaccatcttatttcagttcccactctctaccatcttccaggaaaaaacactagcaatcttacatgagttccaagttttgcaggtcgttgctgtttgtgaatgtggtttggattatgacagacttcagttctgtccgacagatatgcaaaaaaagtactttgagaaacaatttgagttggctgaagcagtaaagctgcccattttcttcacatgtgtgctgctggtgaagacttctatgaaatcatgacacaaaatttgcacagattccctggtggggttacacattccttcactgactcaacagaagatcaggataggctactttcttttgagaagatgtttatcggtgttaatggttcctctctgaaaactaacggaaatcttgaggttgtacgaggcattcctgtcgagaggttgatgatggaaacagattctccatattgtgacataataaatactcatgctggaagccagtatgtaaaatctgtctggccatccaagaagaaagaaaagtatgagccagattcaacagtaaaaggtcgcaatgaaccttgtttagtcagggatttttgaagcactgactgcattcccctttctcccttcctgctgtgcgaagccgtgccccaaaccctctaccatcttatttcagtccccactctctaccatcctccagggaaaaaacactagcaatcttacatgaattccaagttttgcatgtcgttgctgttggtgaatgtggtttggattatgacagacttcagttctgtccggcagatatgcaaaagaagtactttgagaaacaatttgagttggctgaagcagtaaaactgcccatgtttcttcacatgtgtgctgttggtgaagacttatgtgaaatcatgacacggaatttgcacagattccctggtgggttacccatttctttcactgactccgcagacgatcgggttaggctactttcttttgagaagaggcaagttcttgaggtagtggcgggaagcaaagaaatttctgacatagaaggcctgagtagaactctgtaccacaacacatgcaggctcttctttcctcaggatcttgacgcgtctactaatgcgcagcttgagagtggtactgccgtccaggattgctgatgtcagagtgattttttttaaaaaatgtttccttttggttggcgtttggtttcgtacaacttccaatatgcctatgaaatgtttttggtcttataattttccctcgctgccaattttgccatgtttcatgagcctgatgacatgtcaggcaagtcctgactatgtacaagtaccctactgagactatgccctaaaatcatttagggctgagcatgtacaagtacagtttgatggctatgttgttcactacaatcaaacaacaactaagctcta

SEQ ID NO: 66955 - DNA, 2316 bp, Zea Mays
atggggctgggggctgcgatggcactgggcgacccaccggcggactacgcatccatcgcggcggtggggctgtttgtggcactcatgtgtgtcggcatcatcgtcgggcacctgctcgaggagaaccgctggatgaacgagtccatcaccacgctcttcatcgtgttaagccaagatgagacaccattcttgtacagcctcgtgtttggtgaaggtgttgtcaatgacacaacttctgttgtgttgttcaatgcaatccagaactttgatcctggaaatatcagcggtgccaaattactgaacttcattagcagtttcctttatttgttcggctccagcaccattcttggagtagcttctggacttcttagtgcttataccattaagaagttgtactttggcagcccggtaaagtctatcgctttgagcaacaccattttagccttggtgctggtttcaagagctgcttttgttttcccactatcctttctatcaaatttgaccaaaaaaactccaaatggaaagatatcttttaggcagcaggttctgtggaagtgcgaggcattttgggaggtgtgcgaggcattttgggagggacatcatcatgcccaacttgaagtcgtccgtgaccacaacagcgagcgcggtggagtacatggatgaagtattgaaggcgttgccgctaggtgaggccaggaatgaggattcacgaacactgcaattcaattatggttcattcaaacataaggcattggataaatccttaactaaaaaggttcctaaaaatcgtttgacttcaaatactaaactaacacaatgttgctctattgtagggatttttgaagcactaactgcattccccttctccccttctcccttcctgctgtgcgaagccgtgccccaaaccctctaccatcttatttcagttcccactctctaccatcttccaggaaaaaacactagcaatcttacatgagttccaagttttgcaggtcgttgctgtttgtgaatgtggtttggattatgacagacttcagttctgtccgacagatatgcaaaaaaagtactttgagaaacaatttgagttggctgaagcagtaaagctgcccattttcttcacatgtgtgctgctggtgaagacttctatgaaatcatgacacaaaatttgcacagattccctggtggggttacacattccttcactgactcaacagaagatcaggataggctactttcttttgagaagatgtttatcggtgttaatggttcctctctgaaaactaacggaaatcttgaggttgtacgaggcattcctgtcgagaggttgatgatggaaacagattctccatattgtgacataataaatactcatgctggaagccagtatgtaaaatctgtctggccatccaagaagaaagaaaagtatgagccagattcaacagtaaaaggtcgcaatgaaccttgtttagtcagggatttttgaagcactgactgcattcccctttctcccttcctgctgtgcgaagccgtgccccaaaccctctaccatcttatttcagtccccactctctaccatcctccagggaaaaaacactagcaatcttacatgaattccaagttttgcatgtcgttgctgttggtgaatgtggtttggattatgacagacttcagttctgtccggcagatatgcaaaagaagtactttgagaaacaatttgagttggctgaagcagtaaaactgcccatgtttcttcacatgtgtgctgttggtgaagacttatgtgaaatcatgacacggaatttgcacagattccctggtgggttacccatttctttcactgactccgcagacgatcgggttaggctactttcttttgagaagaggcaagttcttgaggtagtggcgggaagcaaagaaatttctgacatagaaggcctgagtagaactctgtaccacaacacatgcaggctcttctttcctcaggatcttgacgcgtctactaatgcgcagcttgagagtggtactgccgtccaggattgctgatgtcagagtgattttttttaaaaaatgtttccttttggttggcgtttggtttcgtacaacttccaatatgcctatgaaatgtttttggtcttataattttccctcgctgccaattttgccatgtttcatgagcctgatgacatgtcaggcaagtcctgactatgtacaagtaccctactgagactatgccctaaaatcatttagggctgagcatgtacaagtacagtttgatggctatgttgttcactacaatcaaacaacaactaagctcta

SEQ ID NO: 66956 - DNA, 2255 bp, Zea Mays
atggggctgggggctgcgatggcactgggcgacccaccggcggactacgcatccatcgcggcggtggggctgtttgtggcactcatgtgtgtcggcatcatcgtcgggcacctgctcgaggagaaccgctggatgaacgagtccatcaccacgctcttcatcgtgttaagccaagatgagacaccattcttgtacagcctcgtgtttggtgaaggtgttgtcaatgacacaacttctgttgtgttgttcaatgcaatccagaactttgatcctggaaatatcagcggtgccaaattactgaacttcattagcagtttcctttatttgttcggctccagcaccattcttggagtagcttctggacttcttagtgcttataccattaagaagttgtactttggcagcccggtaaagtctatcgctttgagcaacaccattttagccttggtgctggtttcaagagctgcttttgttttcccactatcctttctatcaaatttgaccaaaaaaactccaaatggaaagatatcttttaggcagcaggttattgtttggtgggcgggtctcatgagaggtgttgtgtctattgcgttggcttacaataaggcgtttgacttaatgtttccaaggttctgtggaagtgcgaggcattttgggaggtgtgcgaggcattttgggagggacatcatcatgcccaacttgaagtcgtccgtgaccacaacagcgagcgcggtggagtacatggatgaagtattgaaggcgttgccgctagggatttttgaagcactaactgcattccccttctccccttctcccttcctgctgtgcgaagccgtgccccaaaccctctaccatcttatttcagttcccactctctaccatcttccaggaaaaaacactagcaatcttacatgagttccaagttttgcaggtcgttgctgtttgtgaatgtggtttggattatgacagacttcagttctgtccgacagatatgcaaaaaaagtactttgagaaacaatttgagttggctgaagcagtaaagctgcccattttcttcacatgtgtgctgctggtgaagacttctatgaaatcatgacacaaaatttgcacagattccctggtggggttacacattccttcactgactcaacagaagatcaggataggctactttcttttgagaagatgtttatcggtgttaatggttcctctctgaaaactaacggaaatcttgaggttgtacgaggcattcctgtcgagaggttgatgatggaaacagattctccatattgtgacataataaatactcatgctggaagccagtatgtaaaatctgtctggccatccaagaagaaagaaaagtatgagccagattcaacagtaaaaggtcgcaatgaaccttgtttagtcagggatttttgaagcactgactgcattcccctttctcccttcctgctgtgcgaagccgtgccccaaaccctctaccatcttatttcagtccccactctctaccatcctccagggaaaaaacactagcaatcttacatgaattccaagttttgcatgtcgttgctgttggtgaatgtggtttggattatgacagacttcagttctgtccggcagatatgcaaaagaagtactttgagaaacaatttgagttggctgaagcagtaaaactgcccatgtttcttcacatgtgtgctgttggtgaagacttatgtgaaatcatgacacggaatttgcacagattccctggtgggttacccatttctttcactgactccgcagacgatcgggttaggctactttcttttgagaagaggcaagttcttgaggtagtggcgggaagcaaagaaatttctgacatagaaggcctgagtagaactctgtaccacaacacatgcaggctcttctttcctcaggatcttgacgcgtctactaatgcgcagcttgagagtggtactgccgtccaggattgctgatgtcagagtgattttttttaaaaaatgtttccttttggttggcgtttggtttcgtacaacttccaatatgcctatgaaatgtttttggtcttataattttccctcgctgccaattttgccatgtttcatgagcctgatgacatgtcaggcaagtcctgactatgtacaagtaccctactgagactatgccctaaaatcatttagggctgagcatgtacaagtacagtttgatggctatgttgttcactacaatcaaacaacaactaagctcta

SEQ ID NO: 66957 - DNA, 1907 bp, Zea Mays
atggggctgggggctgcgatggcactgggcgacccaccggcggactacgcatccatcgcggcggtggggctgtttgtggcactcatgtgtgtcggcatcatcgtcgggcacctgctcgaggagaaccgctggatgaacgagtccatcaccacgctcttcatcgtgttaagccaagatgagacaccattcttgtacagcctcgtgtttggtgaaggtgttgtcaatgacacaacttctgttgtgttgttcaatgcaatccagaactttgatcctggaaatatcagcggtgccaaattactgaacttcattagcagtttcctttatttgttcggctccagcaccattcttggagtagcttctggacttcttagtgcttataccattaagaagttgtactttggcagcccggtaaagtctatcgctttgagcaacaccattttagccttggtgctggtttcaagagctgcttttgttttcccactatcctttctatcaaatttgaccaaaaaaactccaaatggaaagatatcttttaggcagcaggttattgtttggtgggcgggtctcatgagaggtgttgtgtctattgcgttggcttacaataaggcgtttgacttaatgtttccaaggttctgtggaagtgcgaggcattttgggaggtgtgcgaggcattttgggagggacatcatcatgcccaacttgaagtcgtccgtgaccacaacagcgagcgcggtggagtacatggatgaagtattgaaggcgttgccgctaggtgaggccaggaatgaggattcacgaacactgcaattcaattatggttcattcaaacataagggatttttgaagcactaactgcattccccttctccccttctcccttcctgctgtgcgaagccgtgccccaaaccctctaccatcttatttcagttcccactctctaccatcttccaggaaaaaacactagcaatcttacatgagttccaagttttgcaggtcgttgctgtttgtgaatgtggtttggattatgacagacttcagttctgtccgacagatatgcaaaaaaagtactttgagaaacaatttgagttggctgaagcagtaaagctgcccattttcttcacatgtgtgctgctggtgaagacttctatgaaatcatgacacaaaatttgcacagattccctggtggggttacacattccttcactgactcaacagaagatcaggataggctactttcttttgagaagatgtttatcggtgttaatggttcctctctgaaaactaacggaaatcttgaggttgtacgaggcattcctgtcgagaggttgatgatggaaacagattctccatattgtgacataataaatactcatgctggaagccagtatgtaaaatctgtctggccatccaagaagaaagaaaagtatgagccagattcaacagtaaaaggtcgcaatgaaccttgtttagtcaggcaagttcttgaggtagtggcgggaagcaaagaaatttctgacatagaaggcctgagtagaactctgtaccacaacacatgcaggctcttctttcctcaggatcttgacgcgtctactaatgcgcagcttgagagtggtactgccgtccaggattgctgatgtcagagtgattttttttaaaaaatgtttccttttggttggcgtttggtttcgtacaacttccaatatgcctatgaaatgtttttggtcttataattttccctcgctgccaattttgccatgtttcatgagcctgatgacatgtcaggcaagtcctgactatgtacaagtaccctactgagactatgccctaaaatcatttagggctgagcatgtacaagtacagtttgatggctatgttgttcactacaatcaaacaacaactaagctcta

SEQ ID NO: 66958 - DNA, 1845 bp, Zea Mays
atggggctgggggctgcgatggcactgggcgacccaccggcggactacgcatccatcgcggcggtggggctgtttgtggcactcatgtgtgtcggcatcatcgtcgggcacctgctcgaggagaaccgctggatgaacgagtccatcaccacgctcttcatcgtgttaagccaagatgagacaccattcttgtacagcctcgtgtttggtgaaggtgttgtcaatgacacaacttctgttgtgttgttcaatgcaatccagaactttgatcctggaaatatcagcggtgccaaattactgaacttcattagcagtttcctttatttgttcggctccagcaccattcttggagtagcttctggacttcttagtgcttataccattaagaagttgtactttggcagcccggtaaagtctatcgctttgagcaacaccattttagccttggtgctggtttcaagagctgcttttgttttcccactatcctttctatcaaatttgaccaaaaaaactccaaatggaaagatatcttttaggcagcaggttattgtttggtgggcgggtctcatgagaggtgttgtgtctattgcgttggcttacaataaggcgtttgacttaatgtttccaaggttctgtggaagtgcgaggcattttgggaggtgtgcgaggcattttgggagggacatcatcatgcccaacttgaagtcgtccgtgaccacaacagcgagcgcggtggagtacatggatgaagtattgaaggcgttgccgctagggatttttgaagcactaactgcattccccttctccccttctcccttcctgctgtgcgaagccgtgccccaaaccctctaccatcttatttcagttcccactctctaccatcttccaggaaaaaacactagcaatcttacatgagttccaagttttgcaggtcgttgctgtttgtgaatgtggtttggattatgacagacttcagttctgtccgacagatatgcaaaaaaagtactttgagaaacaatttgagttggctgaagcagtaaagctgcccattttcttcacatgtgtgctgctggtgaagacttctatgaaatcatgacacaaaatttgcacagattccctggtggggttacacattccttcactgactcaacagaagatcaggataggctactttcttttgagaagatgtttatcggtgttaatggttcctctctgaaaactaacggaaatcttgaggttgtacgaggcattcctgtcgagaggttgatgatggaaacagattctccatattgtgacataataaatactcatgctggaagccagtatgtaaaatctgtctggccatccaagaagaaagaaaagtatgagccagattcaacagtaaaaggtcgcaatgaaccttgtttagtcaggcaagttcttgaggtagtggcgggaagcaaagaaatttctgacatagaaggcctgagtagaactctgtaccacaacacatgcaggctcttctttcctcaggatcttgacgcgtctactaatgcgcagcttgagagtggtactgccgtccaggattgctgatgtcagagtgattttttttaaaaaatgtttccttttggttggcgtttggtttcgtacaacttccaatatgcctatgaaatgtttttggtcttataattttccctcgctgccaattttgccatgtttcatgagcctgatgacatgtcaggcaagtcctgactatgtacaagtaccctactgagactatgccctaaaatcatttagggctgagcatgtacaagtacagtttgatggctatgttgttcactacaatcaaacaacaactaagctcta

SEQ ID NO: 66959 - DNA, 1083 bp, Zea Mays
aaagttcaagggtcacaaccaagttctgtggaagtgcgaggcattttgggaggtgtgcgaggcattttgggagggacatcatcatgcccaacttgaagtcgtccgtgaccacaacagcgagcgcggtggagtacatggatgaagtattgaaggcgttgccgctaggtgaggccaggaatgaggattcacgaacactgcaattcaattatggttcattcaaacataagggatttttgaagcactaactgcattccccttctccccttctcccttcctgctgtgcgaagccgtgccccaaaccctctaccatcttatttcagttcccactctctaccatcttccaggaaaaaacactagcaatcttacatgagttccaagttttgcaggtcgttgctgtttgtgaatgtggtttggattatgacagacttcagttctgtccgacagatatgcaaaaaaagtactttgagaaacaatttgagttggctgaagcagtaaagctgcccattttcttcacatgtgtgctgctggtgaagacttctatgaaatcatgacacaaaatttgcacagattccctggtggggttacacattccttcactgactcaacagaagatcaggataggctactttcttttgagaagatgtttatcggcaagttcttgaggtagtggcgggaagcaaagaaatttctgacatagaaggcctgagtagaactctgtaccacaacacatgcaggctcttctttcctcaggatcttgacgcgtctactaatgcgcagcttgagagtggtactgccgtccaggattgctgatgtcagagtgattttttttaaaaaatgtttccttttggttggcgtttggtttcgtacaacttccaatatgcctatgaaatgtttttggtcttataattttccctcgctgccaattttgccatgtttcatgagcctgatgacatgtcaggcaagtcctgactatgtacaagtaccctactgagactatgccctaaaatcatttagggctgagcatgtacaagtacagtttgatggctatgttgttcactacaatcaaacaacaactaagctcta

SEQ ID NO: 66960 - DNA, 914 bp, Zea Mays
ttcaagggtcacaaccaagtgaggccaggaatgaggattcacgaacactgcaattcaattatggttcattcaaacataaggcattggataaatccttaactaaaaaggttcctaaaaatcgtttgacttcaaatactaaactaacacaatgttgctctattgtagggatttttgaagcactaactgcattccccttctccccttctcccttcctgctgtcgttgctgtttgtgaatgtggtttggattatgacagacttcagttctgtccgacagatatgcaaaaaaagtactttgagaaacaatttgagttggctgaagcagtaaagctgcccattttcttcacatgtgtgctgctggtgaagacttctatgaaatcatgacacaaaatttgcacagattccctggtggggttacacattccttcactgactcaacagaagatcaggataggctactttcttttgagaagatgtttatcggcaagttcttgaggtagtggcgggaagcaaagaaatttctgacatagaaggcctgagtagaactctgtaccacaacacatgcaggctcttctttcctcaggatcttgacgcgtctactaatgcgcagcttgagagtggtactgccgtccaggattgctgatgtcagagtgattttttttaaaaaatgtttccttttggttggcgtttggtttcgtacaacttccaatatgcctatgaaatgtttttggtcttataattttccctcgctgccaattttgccatgtttcatgagcctgatgacatgtcaggcaagtcctgactatgtacaagtaccctactgagactatgccctaaaatcatttagggctgagcatgtacaagtacagtttgatggctatgttgttcactacaatcaaacaacaactaagctcta

SEQ ID NO: 66961 - DNA, 2139 bp, Zea Mays
cgacgagctcgacgtggatgaacgtgtagtacaggctgagctagccgaccaaaatcaaatatggtaatataaataggaattgatgggaaaggcaggatgccttaaataaatcaagtattatgtttaggcacacctagaacaaacatcaatttcttcaaagtaaagcagaaaaactccatctaaatttgtgtgtcttcaaataaaaaagaagttgtatgacgaccaaaattactaagaaaaataaaacaataacaactaaagaaacatctaagcacctccataaagtaattataaagcctagcgatatactatcatcaatatgaaggttgcgcgagtgttttcctgatttgttttcatagtttaaagagtgttattttagacatataggagcagcaatgtatgtaaatatatacacatatatatacaattgtttacagtagtagaatagttaattatgtagatataacaacacatgctatgatgcattataagcaattaatcatcatccctaatgaaatacgttgtattacgggggatttaacaaaataaattttgtaacacaacatttagtagctttttcatcactaaaagtaaatgtaggtaatctgtagcaacaaatacaggtgggtgtaaataatttctctatattaacatggaattatgccatcttgaatcaataacatggtgtactccatagattaccttatattaagagccctgcaagaagggctgaccttgtctcacttgtacaacaaccctccttatattttaacgaatcccattgaactaacatagagaacaaagacatgattgaggtggaggctcagagcaacaaagttggaagcagtaaccttgtccaacgaaatacaacaacataacagaatagttgtacattggaattcttgattaatatgcttacaatttgagtgaagtatagctaaaaatattaatgtttatgacaccaaataagtgcacagataaaagtaagttagtgcacaaaaaaatggaattgtctcaccttgattcaatagctagcatggcgtacttcatacattaagagccctacaagaagggttcgacctccactcacgtgtacaacaaccctcctgatatttcaatgaatcccattgtatggttgagatgatgcctaagaacatcaagaattggaaaatagaattgcaacagttccaagaactaaatccttctgtggctagacgtgagaagcagtaccacatggaatgatgcccaggaacatcaagaacagggaaatagaattgcaacatagtttcaagaactaaatccttctgtggctagacgtgaacaacagtaccacatggaagcaagaatgttttcgaaaaatgtaataacagccaaaaatgactcgtcattggctggtgaaggccttggctgatagtataacgctaggctttatattgatgtagcgagaatgacggtcgcgcagccctcattcgggattcgcctgtcaccattttaataaagcattccagctctaatattgaaatgcaatatataagaactcatcatccgtaatgagtgcacgtgttgtgttcacagaaggtttaacaaaataattttttaacacaacatttagtaggttttttaatgctaaaagtaaatacagctaatctgtagcaacaattctaggtgggtttaaataaatcacagtgagaataatttctatattacaacaatttcagtaaattgagaatttgaataattttaacgcaaaaagtaagttattgtacaaaaatggaattatgtcatcttgaatgaatagcatagttcacttcataggttaggagcacctgcaagtaggcatgagttcttctcaattgtccagcaagtgcttcatgcaatgtccaaactctgaccatgatgttgtggcatactgttttcccactatgagatagtagacataagttgttaggtaaaaacaatgtgaaattgatagaactattaaaagcaagaattatccatcattcgatagcaattatttcaaagagtaaatagatgagtaaatataagatattctgttacctggaaagttactcataaacggcagcacctctcggtcgtccaaaaaattgcagaaactaaagagagagtgagatggttctg

SEQ ID NO: 66962 - DNA, 1059 bp, Zea Mays
atggctggcatctcggagatggaacaatgtctggctgagaagttcgacgggaccatcaagttgtcggatacaacactcaaggaacatccaaaaaggatgactcgactagatgaggtcaccaacaagttggtcagcatcgagaagaagcaagatgaacaagacaagtcaatgggttgtattcaggccaaattcgacatctcgatgaaatcattggcgcagatgcagcaaaaacagtctaaagagtcgggtatgatgggtcatccttccgccactgttcgcatgccgagagatggattgatgggggccaggccacctcctattggggctcctctgaatggctcttctgttggaccttccattcccaaccaaatattgattctattctgaatatggcgacaaagaatgactcttctgtttcacgatcatgtttgccgaaaatggattttccttgtttcgatggatcagatgtgagagtgtggttggatcagtgtgaatcctattttacattgtattcgattcctggttatttcagagttactgttgtttccctccatttatcaggaaaggctttgtatggggtggatcctagcactggtcttctcccagccctactacatgtagatcactccgaggcttccaatgtactgcaagagagacagtcatttttgacaatgatgaagacaatttagcccaagttcaaaacaagatgaaacaacaggctgatagacacaagacatttcgtgagtttcaggttggtgagttggtgcttctcaaattatagccttatgctcagccttcagtggttagtcgaccatgtgccaagctatcattaaagttctttgggcccttcaaagtgcctcagcgaattggccaaactgcttacaagttggatttacctgaggatgccaaaattcatccagtctttcacacgtctcaacagaagcctttgtatgtgtgtgtggattgctaggccgatgatacaggggcataaataggcgaggatgctccttgtaacagattcatgaacagaaataactgaaaaccaaataccccatacct

SEQ ID NO: 66963 - DNA, 154 bp, Zea Mays
cccaacttcttaagtacgtaaaaaagagatccttctccttcatgaccaatcagatggctaatgtacttgcaagggccttctttgtaacaacggatattgggagtgattggaaataagattctcaaagtgtgcccttgtttaatgggaactgctt

SEQ ID NO: 66964 - DNA, 711 bp, Zea Mays
catggatgaccaggaaatgaaaatggcttcctcccaacatctctaatatcgcaaaacttattttcaacaaggttctgcaggttatcaaggctatctgcaaaatacaaaagatatgagaagcaaaacaaccaaaaaaaagttttaacagcatataacttgtaaggaaatacagaacagtttgatggagaaccttttccatacacaacgagttgcatcaagttagctgagtagtgtgaatcataaaatttaataagctcaagccttgtgtccaatcctttctcctttgctttaacttcaagtgtgttccaatttcctaatcaataagaattctgaatatcagttctaaggaattgtccaatatttcaagcaagcagtgagaatcagttccaagaaattgtccattatttcaagcaagcagtgaaaataagttctaaagatttccaatatttcaagcaagcagtgaagcatatatcataaaagaactctttattacattgaaacatcatttattgttgaagcaaagagatatcatgtcaaaatgaaatttaataagctcaagccttgtgtccaattttatttctatcactatcaaaaactgaaataaaaggtttctgtaaacaaccagtatgaatgctaaaataaagagatgtcatgtcattcaaagaaatataaaattagataggaaatgagcagtgtattctaaatgtcatt

SEQ ID NO: 66965 - DNA, 841 bp, Zea Mays
atgaatggccggcgggcgcgacggcctcggtgattgccggtggacgactggtcggcgacggtcggcgtggcggccgctcggcccgtcagctcgccttctcccgatgagcctatatgggtccgcggcaaacccattcgcgcggagaatagcgtgatcgccctgatgcagaggagcgggcatcgtgccaatatatatatatactttatgtgtgtaatgccaatctctacttctctagttggcccgtgctcttccgggcccctggccactgctcgacctgtagctgtaggcatgggatgggagtactgttcttggagagagagagagagaagggcaagggcgcaaccgcgcaagcgcaaggcgcctttcggctttcgattgacctttatagccttaagcctacccacagcagtattctctctccttgtttttggaaattgagaataacgtttaccgtacttacgcaggaaatatgagaatatcaccgacagactgatacgcaagtcatgtgagacataggcccttgcaggactgagcaattatcagtgagcgcgtgggggaagttggccaaggccacaccagctgatcagcgagcagaagatcccactcggcttcctgctactactcgtaggcagctagcctgccccggctgaccggctccccgcgaaacctgtgcactgaaccactcatcattccctctggtcctggtcccccgaccgctacccccaagcgggcccacgtaggccccagcgaggtgggtctcgcgagccggaactggcatctcttcaacgcgggcgcgccgccgagccccacacaccaacaccagacaccaccacagtaagag

SEQ ID NO: 66966 - DNA, 1387 bp, Zea Mays
aggcgatctagagattcgtcattccatttatggattcccagttgttgaactttgagttagacaatgaacctggagacagagaatcgtcttgcttctttgctaattgaagaggcgcggagattgcagttagaggctgacagggaaggtgttcatgcatatcttcgaaaacctaatgttaggcatcgtccaaattcaaggtttctcacagccacagttcgtggagttcagcaagggcaaaggaactggagttggagtcaaagatgaaaagcaaaaatagcagaagtaacaatcgtgatgattttagaggagagaagcccaaaagtgatttgagaaatcatagctctggctcaaggtttgaacaagaagggaccacttatagtaattcttactcagaacgggaggatggtctcagtgatgatgagattgaaagatttcttcattcaagggcgaaacgaggacgtggggctgttggttctaggatggacgagcctggtccatatcttgattctttgtcccgacatcaggacaacggacctagtcctgacatacgtgtggaagaaaaatgggaacgccaagtacaaggtccagagaagccttcatttttgagatccaagtctcctgatagtcattggcataaggatacttcggatggaagggcatcaagctctgaaccactgagtaaaaaagagaagaaaaagaagtcggagaaaaaagataagagagacaaaaggaaggaaaaggacaggaagaaacacaaacatcgccatcaccgcaatcacaaaagccgaagacgggagtgaattgagtgatgttagctggtagctaggggtgtaggggtggtaatggatcacgatccaaatgttttttacattaagttagggtccttaattaattttagtttaaaagtgaatataaatagagtttgattttaatccaattcgattcttcaattttatagtgtaaaatttagagttcattaccacctttactggtaatagaacagaaaaatgtgcgcaacggttgtgccctaaaacgagctagcagattgtgctctgtaacttgaaacatgcattgtatggaaatctcgatattgtgtagcaatggagtatggttcttacaatacattgttgttgtgaagttgtgatgtcataaagtttgttgaagttttgtcactttgaagtagcatggttaacatctcaagaattgttgattttttccccttttgttgattgatcatctgagcctgctcttcaagcacgtgaatttgttagttggggtttataacagaataaccctgcgtagacagatcactgcacattttatgtgatcatcgtttggttacggagttgcttatcaggttccattggacgtatcataacagttgtct

SEQ ID NO: 66967 - DNA, 1375 bp, Zea Mays
tttgcctcatgtggtcatgctcttcatccccatatgcatcctctctctctccccacaccatgtgtgtgcccagattcccctaaataggtgtctcgcctctggcatcagtcccctcttccccttccttctcctcggtccctatccgctgctgcgaacagcagaagctgcggcacggaggtgcgctcttcccggcggtggagttgcagctgcagggggaagaagcgagctagagctgcagggatgataagcgccaagtccaacgccgccgtgtacccgtgcccggagtatgcggaggtcgaccccaccggccgttcagcgacgttcttggcaagggcgcgtccaagattgtgtacaaggcgttcgacgagtaccaggggatggaagtggcgtggaaccaggtgaagctgcacgacttcctgcagagccccgaggacctggagcggctctactgcgagatccacctcctcaagacgctcaagcaccgcaacatcatgaagttctacacctcctgggtcgacgtctcccgccgcaacatcaacttcatcactgagatgttcacctccggcaccctccgccagtacaggcagaaacaccggagggtgaacatgtgggcggtgaagcactggtgccggcaaatcctcagcggcctgctgtacctccacagccacaatccgcccatcatccaccgggacctcaagtgtgacaacatcttcgtgaacggcaaccagggcgaggtcaagattggcgacctcggcctcgccgccatcctccgcaagtcccacgctgtccactgcgtgggtacaccggagttcatggcaccggaggtgtatgaagaggagtacaacgagctggtggacatctactcgtttggaatgtgcgtgctcgagatggtcacctttgagtacccgtacagcgagtgtacgcacccggtccagatctacaagaaagtgatctctggtactaagccagaagctctgtacaaggtgaaagatccaatgctgaggcgctttgtcgagaagtgcctagtatcgtcatctcagagactgtcagcaagagaactgcttgaggatcccttcctacagggcgatgacgtggctgtttctttggatggtggagattatcatgtaccgaccaagtacgtacggcagccttcatatctagggcatacctatagcaatggctccatggtgagtaatggattctcagaaagcatggatgaggacgctctgagtgaagactgcgaggatgatgacatgaaaggccaagatggcattgacctgttcaacgagaatgaggatgaacctcttggcaatgtggacataacaatcaaagggagaaagagtgaggatggaggcatacgaatctctagattccg

SEQ ID NO: 66968 - DNA, 1353 bp, Zea Mays
ccacaccatgtgtgtgcccagattcccctaaataggtgtctcgcctctggcatcagtcccctcttccccttccttctcctcggtccctatccgctgctgcgaacagcagaagctgcggcacggaggtgcgctcttcccggcggtggagttgcagctgcagggggaagaagcgagctagagctgcagggatgataagcgccaagtccaacgccgccgtgtacccgtgcccggagtatgcggaggtcgaccccaccggccggtacggacggttcagcgacgttcttggcaagggcgcgtccaagattgtgtacaaggcgttcgacgagtaccaggggatggaagtggcgtggaaccaggtgaagctgcacgacttcctgcagagccccgaggacctggagcggctctactgcgagatccacctcctcaagacgctcaagcaccgcaacatcatgaagttctacacctcctgggtcgacgtctcccgccgcaacatcaacttcatcactgagatgttcacctccggcaccctccgccagtacaggcagaaacaccggagggtgaacatgtgggcggtgaagcactggtgccggcaaatcctcagcggcctgctgtacctccacagccacaatccgcccatcatccaccgggacctcaagtgtgacaacatcttcgtgaacggcaaccagggcgaggtcaagattggcgacctcggcctcgccgccatcctccgcaagtcccacgctgtccactgcgtgggtacaccggagttcatggcaccggaggtgtatgaagaggagtacaacgagctggtggacatctactcgtttggaatgtgcgtgctcgagatggtcacctttgagtacccgtacagcgagtgtacgcacccggtccagatctacaagaaagtgatctctctacctgtttgatttggtagggtactaagccagaagctctgtacaaggtgaaagatccaatgctgaggcgctttgtcgagaagtgcctagtatcgtcatctcagagactgtcagcaagagaactgcttgaggatcccttcctacagggcgatgacgtggctgtttctttggatggtggagattatcatgtaccgaccaagtacgtacggcagccttcatatctagggcatacctatagcaatggctccatggtgagtaatggattctcagaaagcatggatgaggacgctctgagtgaagactgcgaggatgatgacatgaaaggccaagatggcattgacctgttcaacgagaatgaggatgaacctcttggcaatgtggacataacaatcaaagggagaaagagtgaggatggaggcatacgaatctctagattccg

SEQ ID NO: 66969 - DNA, 3509 bp, Zea Mays
ttgagcacaccaccatttgtatatgtataaaccagagatcgccggacatgttgccatggcgccgctcgatcggacattattattattattcttattattgtcgctggatccaacagcttcccggcctgctaatctacataaatcgcttagacagttgggtgtgtactgttttcagcatctctcacaaaaaaaagtctccggttcgacctcctgcctctgctgctcgcatggccagcctcgtgcaccaggcgtccatgccggcgatggcgccgccgccgccgccgtgcgacgacgagttagtcccgcagggcttcagctgcttcggccgctcgctgtcgcgggcgtcgtcgtcgagccgcctggagtacagggcgctgcagggcgaggagaagcgtaacgccgcgcaggacgcgcggtcggcgcgcgccaagctgcgctggaaggcggtggcgcacgagctcatggccaagggcggcggcggcggcggcggcggcgcgcggcggaggaagcagcagctgggggccttcagctacgactcccggagctacgcgctcaacttcgaccagggcgccgacgagtagcagcagcgtgctgagctcgctagctgctgcgggcggcgggcctgctcctgcttgcggccggctgaccctacgcgcggtgcggatcggagcccgaaacagcgggggttgcacgtgcgtgcggtgcgacccgaaggagcagccacgagtgaccgcccagcgagggaacaatggcgatctaatctactacccaaggaagaagcatgggttttactgtgtaaagatctactgctccgtagtagaaatcaagtccggtcattattgctcttttcttttcttttctttttttcattcagatggcacgaccatgtttgggcgattcgtcatggaatgttcgcctcctcagagcagtttcatcaaatgttcaaatgtgagccaggttgcttcaaggacaaaatgaacttgtttctatgaacaacacataaatattgaaatattaattaatcagacggaaattgagattaactaacgaggtcttcaaatatgcctagctgttacagcaccttggaaaatgagcatgcaacttgcgccttgaaaaaactaaccattcacatagccagtgacatccttcttaccagtcgaacatgtcagctttgccttaattattagtggttttttttctcagttttgcccttttgttctatagcactggaggggtaaaactgagaaaaaaaacacgactaaaggtaaaactgagcacacaaccaaaatcgagggcagcaccataaaaaacccaaaatttggcatcgatcttgatcaatgttaattgggtttaaatctagaattctgctcagtacaagcaaatcatctaaatggagagactcttgagctttggccacgagctttacgacatcagcaacaaaccaaacaaaaggacacttcgtgagagaacacgtcggtggctcggtgccagcatcgacggagccccaccagacaccgcagtaccgcaccgcactgcccatggacgcacacgcacgcctcccggcgcgcccaccccgcccgcgtgcgcgtgcgcgtgcccctgtccgcctcccgtttgccgcctccaccgcaacgcggcgcgcggggtggtggtgccctcgcgatcctcgtgtcgatcccagcggcaggggtgcctgtgcctttgcttctcctggccgttgcccgcgcctcgcggtcgcgcacctgaaccggagccccgcgtcaaatctagggttgcatccgcgccgccccctcctcccgagactcccagcggctggaaccagaacgagggtgacaggcgacgaaagctgcgagggacgccccctcgtcgaatgcactggcgaccgttccgtcgaggagcagccggagcacgcaggagttgagggaaaagctttgaaaatgtcatccaccgtgccgaagtcatcaaatatcttctggcatgattgtccagttggcaagactgatcgccagaagctactcaagcagaaaggttgtgttgtctggattacaggccttagtggttcaggtaaaagtaccttggcatgtacattaggccgtgagctccacacaagagggaagcttgcatatgtccttgacggtgataacttaagacatggtctgaacaaggatcttggcttcaaagctgaagaccgtgctgaaaatataaggagagttggtgaagtagcaaagttatttgcagatgcgggccttgtatgtattgcaagtttgatatctccatataggagagaccgtgaatcttgccgtgcattgttgtctgatagtagcttcattgaagttttcttgaacatgtccttggaattatgtgaagcaagagatccaaagggcctctataagcttgctcgtgcaggaaaaataaagggttttacaggaatagatgacccttatgaagcaccactgaattgtgagattgagatcaaagaggtagatggtgtatgccctccgcctgctgagatggcagggcaagttgttacttaccttgaggagaaaggcttcctgcacgagtaggctgaatccaagcaacatctggggaagatttcagtaagactagcgcagaataagtcaaaggcgctggcagttacggtatagcagttgcatagattggcctcaatgccttagtattttctttccgtacttcctctgccacaggctccatgcaatttcattcagatgagcctggatggttcctaatttctttgacctctagagtagattacttgtaatgcaactctgataaccacttggggcagtatcgatgtggcaatcgcaatcctcacggcagtcaccctcgcccgcacacataaaattcccgcgcccaggtgacaccgcgcgcggcaacgcgacacaacccgacgaagccaaaccgagcaagcaaattaaagcaagcatccgaccaacccgtgcgcgcggcgcgaggaagctcagccaacgtgatggtgttcagcgcctcgttcatggcggcggcggcgcgcgtgccggcggaactgtgccagcggcccccgcgcccggggcagcggcgggtgagcgcggacgacgtcctgcgcgctctgtacctgcccccggcgcggcccccggcgcgggagctcgggcgcctggggacttcctcttcggctttttctgcctgccgctgccggagtacggccgcggcggagggtgggtggcactggcacgggtgcccgacgcggtgctatacacctaccggaggtctctgtcggtcacctcgtcgtcctcatccttctcctcgtcgatgtcctcgtcggaggacgactgattgctgacaaggaacagtaaatacacgttgaggaatgcgccttgcttgtactgtattttttttcgtttgtgcaggagaatcgattagatgtgacttgtacgcccaattcctttgtgacctctgtatatgtccaattattgagtaaatttcagtggcggtcatcgaactcgtcacgagttctc

SEQ ID NO: 66970 - DNA, 3519 bp, Zea Mays
ttgagcacaccaccatttgtatatgtataaaccagagatcgccggacatgttgccatggcgccgctcgatcggacattattattattattcttattattgtcgctggatccaacagcttcccggcctgctaatctacataaatcgcttagacagttgggtgtgtactgttttcagcatctctcacaaaaaaaagtctccggttcgacctcctgcctctgctgctcgcatggccagcctcgtgcaccaggcgtccatgccggcgatggcgccgccgccgccgccgtgcgacgacgagttagtcccgcagggcttcagctgcttcggccgctcgctgtcgcgggcgtcgtcgtcgagccgcctggagtacagggcgctgcagggcgaggagaagcgtaacgccgcgcaggacgcgcggtcggcgcgcgccaagctgcgctggaaggcggtggcgcacgagctcatggccaagggcggcggcggcggcggcggcggcgcgcggcggaggaagcagcagctgggggccttcagctacgactcccggagctacgcgctcaacttcgaccagggcgccgacgagtagcagcagcgtgctgagctcgctagctgctgcgggcggcgggcctgctcctgcttgcggccggctgaccctacgcgcggtgcggatcggagcccgaaacagcgggggttgcacgtgcgtgcggtgcgacccgaaggagcagccacgagtgaccgcccagcgagggaacaatggcgatctaatctactacccaaggaagaagcatgggttttactgtgtaaagatctactgctccgtagtagaaatcaagtccggtcattattgctcttttcttttcttttctttttttcattcagatggcacgaccatgtttgggcgattcgtcatggaatgttcgcctcctcagagcagtttcatcaaatgttcaaatgtgagccaggttgcttcaaggacaaaatgaacttgtttctatgaacaacacataaatattgaaatattaattaatcagacggaaattgagattaactaacgaggtcttcaaatatgcctagctgttacagcaccttggaaaatgagcatgcaacttgcgccttgaaaaaactaaccattcacatagccagtgacatccttcttaccagtcgaacatgtcagctttgccttaattattagtggttttttttctcagttttgcccttttgttctatagcactggaggggtaaaactgagaaaaaaaacacgactaaaggtaaaactgagcacacaaccaaaatcgagggcagcaccataaaaaacccaaaatttggcatcgatcttgatcaatgttaattgggtttaaatctagaattctgctcagtacaagcaaatcatctaaatggagagactcttgagctttggccacgagctttacgacatcagcaacaaaccaaacaaaaggacacttcgtgagagaacacgtcggtggctcggtgccagcatcgacggagccccaccagacaccgcagtaccgcaccgcactgcccatggacgcacacgcacgcctcccggcgcgcccaccccgcccgcgtgcgcgtgcgcgtgcccctgtccgcctcccgtttgccgcctccaccgcaacgcggcgcgcggggtggtggtgccctcgcgatcctcgtgtcgatcccagcggcaggggtgcctgtgcctttgcttctcctggccgttgcccgcgcctcgcggtcgcgcacctgaaccggagccccgcgtcaaatctagggttgcatccgcgccgccccctcctcccgagactcccagcggctggaaccagaacgagggtgacaggcgacgaaagctgcgagggacgccccctcgtcgaatgcactggcgaccgttccgtcgaggagcagccggagcacgcaggaggttagtttagttgagggaaaagctttgaaaatgtcatccaccgtgccgaagtcatcaaatatcttctggcatgattgtccagttggcaagactgatcgccagaagctactcaagcagaaaggttgtgttgtctggattacaggccttagtggttcaggtaaaagtaccttggcatgtacattaggccgtgagctccacacaagagggaagcttgcatatgtccttgacggtgataacttaagacatggtctgaacaaggatcttggcttcaaagctgaagaccgtgctgaaaatataaggagagttggtgaagtagcaaagttatttgcagatgcgggccttgtatgtattgcaagtttgatatctccatataggagagaccgtgaatcttgccgtgcattgttgtctgatagtagcttcattgaagttttcttgaacatgtccttggaattatgtgaagcaagagatccaaagggcctctataagcttgctcgtgcaggaaaaataaagggttttacaggaatagatgacccttatgaagcaccactgaattgtgagattgagatcaaagaggtagatggtgtatgccctccgcctgctgagatggcagggcaagttgttacttaccttgaggagaaaggcttcctgcacgagtaggctgaatccaagcaacatctggggaagatttcagtaagactagcgcagaataagtcaaaggcgctggcagttacggtatagcagttgcatagattggcctcaatgccttagtattttctttccgtacttcctctgccacaggctccatgcaatttcattcagatgagcctggatggttcctaatttctttgacctctagagtagattacttgtaatgcaactctgataaccacttggggcagtatcgatgtggcaatcgcaatcctcacggcagtcaccctcgcccgcacacataaaattcccgcgcccaggtgacaccgcgcgcggcaacgcgacacaacccgacgaagccaaaccgagcaagcaaattaaagcaagcatccgaccaacccgtgcgcgcggcgcgaggaagctcagccaacgtgatggtgttcagcgcctcgttcatggcggcggcggcgcgcgtgccggcggaactgtgccagcggcccccgcgcccggggcagcggcgggtgagcgcggacgacgtcctgcgcgctctgtacctgcccccggcgcggcccccggcgcgggagctcgggcgcctggggacttcctcttcggctttttctgcctgccgctgccggagtacggccgcggcggagggtgggtggcactggcacgggtgcccgacgcggtgctatacacctaccggaggtctctgtcggtcacctcgtcgtcctcatccttctcctcgtcgatgtcctcgtcggaggacgactgattgctgacaaggaacagtaaatacacgttgaggaatgcgccttgcttgtactgtattttttttcgtttgtgcaggagaatcgattagatgtgacttgtacgcccaattcctttgtgacctctgtatatgtccaattattgagtaaatttcagtggcggtcatcgaactcgtcacgagttctc

SEQ ID NO: 66971 - DNA, 1485 bp, Zea Mays
ctgctctgttctagatgttcacggatttcctaatattaatgtaaaagtaccttggcatgtacattaggccgtgagctccacacaagagggaagcttgcatatgtccttgacggtgataacttaagacatggtctgaacaaggatcttggcttcaaagctgaagaccgtgctgaaaatataaggagagttggtgaagtagcaaagttatttgcagatgcgggccttgtatgtattgcaagtttgatatctccatataggagagaccgtgaatcttgccgtgcattgttgtctgatagtagcttcattgaagttttcttgaacatgtccttggaattatgtgaagcaagagatccaaagggcctctataagcttgctcgtgcaggaaaaataaagggttttacaggaatagatgacccttatgaagcaccactgaattgtgagattgagatcaaagaggtagatggtgtatgccctccgcctgctgagatggcagggcaagttgttacttaccttgaggagaaaggcttcctgcacgagtaggctgaatccaagcaacatctggggaagatttcagtaagactagcgcagaataagtcaaaggcgctggcagttacggtatagcagttgcatagattggcctcaatgccttagtattttctttccgtacttcctctgccacaggctccatgcaatttcattcagatgagcctggatggttcctaatttctttgacctctagagtagattacttgtaatgcaactctgataaccacttggggcagtatcgatgtggcaatcgcaatcctcacggcagtcaccctcgcccgcacacataaaattcccgcgcccaggtgacaccgcgcgcggcaacgcgacacaacccgacgaagccaaaccgagcaagcaaattaaagcaagcatccgaccaacccgtgcgcgcggcgcgaggaagctcagccaacgtgatggtgttcagcgcctcgttcatggcggcggcggcgcgcgtgccggcggaactgtgccagcggcccccgcgcccggggcagcggcgggtgagcgcggacgacgtcctgcgcgctctgtacctgcccccggcgcggcccccggcgcgggagctcgggcgcctggggacttcctcttcggctttttctgcctgccgctgccggagtacggccgcggcggagggtgggtggcactggcacgggtgcccgacgcggtgctatacacctaccggaggtctctgtcggtcacctcgtcgtcctcatccttctcctcgtcgatgtcctcgtcggaggacgactgattgctgacaaggaacagtaaatacacgttgaggaatgcgccttgcttgtactgtattttttttcgtttgtgcaggagaatcgattagatgtgacttgtacgcccaattcctttgtgacctctgtatatgtccaattattgagtaaatttcagtggcggtcatcgaactcgtcacgagttctc

SEQ ID NO: 66972 - DNA, 1826 bp, Zea Mays
tcaacctctccttcccgaagcaaccccaccgttccacccccttttctgccttcctttccccgtgcaacaaacgcaaacgcgacctaacgaatcgaatcaaattcgccgtccacctcgtcggcgtcggcgcaccggcctcgagcccagccccccgtccgagtccgatcagccaccagagatgcagcacgggagcggcgactacgcctcctccgccccctccggccactactaccagcaccagtacgcggcccccggctcgaacccctatccaatcgccacggacgccacggcgccgggggcagtgtcggggggctacgcccccgcgccgtcctactctctcggcggcggctaccctgaccagccgccctccgccccggtctactcgcaggcaccctctgccccggcctactcgcaggcaccctccgctccggcctacacgcagccgccgccccagccccagcacgcccccggatactcgccttacaacaccaatctcaacacctacccgacagaggcgtattatacctacacgccgccgtccacccagaccgcggccccaccgcctgcggaggccaactccccggcgctgccctacgacgccccgtactacgggggtgggtaccagccgccggccgcggggtacgacaacgatgattacctgaacgagggtgcctacgcttacagcgccggcggtggctcggagccgtacggggcgcgcggcacggcccctgcgcggtcgggatccgcgctgtttgatgactatgggcggtctatcagtgccccatctgatgactatgggcggtcgatcagtgccccatctggatgggaggagcagcagccgtggggcagtggcggcggtggcggaggtagtgggagctatggggtgatcgcaaaggcccttccaaaggcggaaacgcgtgaggatgcgagtggtggtgcacagaagtttcgggttaagctgctgccagagggtgctgggaactctactgacgtgctttgccagattggtctagatggaattcgcatgcttgatccgagtacaagcaggaccctgaggatttatccactcgattcactgacaagatgggaggttttggatgcaactatatttgcattctgggcgaagacatcagtggatattgaaccaaagagaattaggctgaagtcaagcagttatacttcaaatactatgcttgacactgtaacagcagcaacagtgcagtttaaggagataggtgcagatgcaagaagcagaggagcaatagaaactggcaaacccttggtacaatcaaatgagaaaaagaaaggttttgattggatgtttacaaaacctgttgatgaagtgaaagaccattgggtcccagatgaggttgccaagaaatgccactcgtgcgctgttgattttagccctttcaatcgcaggcatcattgtcggaactgtggtgaaatcttttgtgacaaatgcagccagggaaggattgctctgacggctgaggataatgctccacttgtccgagtttgtgatagatgcatggctgaggtcactcaaaggcttagcattgctaaggatgttgccaacagatctgcaactgttcaaagtcatgaagatcttgcaagaaaactgaagggtaaaagtaggctctaaagcaccaaagaggtcggtacaagcagtgccaaatttctctgatgatggttgattatattgctgttataatgctcgttgtattgaaagatattatgatgtttccagacgtttaactaatttacctgcaagtttcatgtcattttgattcaagaactaaattagtcaagttacaattgagaag

SEQ ID NO: 66973 - DNA, 2593 bp, Zea Mays
tcaacctctccttcccgaagcaaccccaccgttccacccccttttctgccttcctttccccgtgcaacaaacgcaaacgcgacctaacgaatcgaatcaaattcgccgtccacctcgtcggcgtcggcgcaccggcctcgagcccagccccccgtccgagtccgatcagccaccagagatgcagcacgggagcggcgactacgcctcctccgccccctccggccactactaccagcaccagtacgcggcccccggctcgaacccctatccaatcgccacggacgccacggcgccgggggcagtgtcggggggctacgcccccgcgccgtcctactctctcggcggcggctaccctgaccagccgccctccgccccggtctactcgcaggcaccctctgccccggcctactcgcaggcaccctccgctccggcctacacgcagccgccgccccagccccagcacgcccccggatactcgccttacaacaccaatctcaacacctacccgacagaggcgtattatacctacacgccgccgtccacccagaccgcggccccaccgcctgcggaggccaactccccggcgctgccctacgacgccccgtactacgggggtgggtaccagccgccggccgcggggtacgacaacgatgattacctgaacgagggtgcctacgcttacagcgccggcggtggctcggagccgtacggggcgcgcggcacggcccctgcgcggtcgggatccgcgctgtttgatgactatgggcggtctatcagtgccccatctgatgactatgggcggtcgatcagtgccccatctggatgggaggagcagcagccgtggggcagtggcggcggtggcggaggtagtgggagctatggggtgatcgcaaaggcccttccaaaggcggaaacgcgtgaggatgcgagtggtggtgcacagaagtttcgggttaagctgctgccagagggtgctgggaactctactgacgtgctttgccagattggtctagatggaattcgcatgcttgatccgagtacaagcaggaccctgaggatttatccactcgattcactgacaagatgggaggttttggatgcaactatatttgcattctgggcgaagacatcagtggatattgaaccaaagagaattaggctgaagtcaagcagttatacttcaaatactatgcttgacactgtaacagcagcaacagtgcagtttaaggagataggtgcagatgcaagaagcagaggagcaatagaaactggcaaacccttggtacaatcaaatgagaaaaagaaaggttttgattggatgtttacaaaacctgttgatgaagtgaaagaccattgggtatgctgagctgtattatgcattgacaacttttaacttaatatgctttgactaattatattttggtttaacataatatgcattggctactttttaatgttcttgaaaccattttggtttaagctatttcatcacctatattgcttgcatgttattttttataagaacatctacttccctgctacggctggatggatatagttggctatctgcattttctagcctttcattgaatatttttcatttgtgcttcagttctatcatttatatgttaatatgtcagtgttattgatcttattccaagttcttgacaacatttgttatatcgtatcgcccttcataatcttatgattatttttcttcacttgtctcttactctcttatgtttaattttcttcacttgtaatttttttaagtttctgcatttcatttaattttgtacccttataggtcccagatgaggttgccaagaaatgccactcgtgcgctgttgattttagccctttcaatcgcaggccagggaaggattgctctgacggctgaggataatgctccacttgtccgagtttgtgatagatgcatggctgaggtcactcaaaggcttagcattgctaaggatgttgccaacagatctgcaactgttcaaagtcatgaagatcttgcaagaaaactgaaggaggaaatggagaaaaaccgcaagtcatcagcatctggtggtggtgcgcctggtaccagaatgagggaagtcgcgtgccctacctgcacagtccatcttcaggttcaggttcccacatctggctcagagacagtggagtgtggagtgtgccagcatgccttccttgtcagcgccaattgatacaccggggagaagatgcatatgctaaagaaattattctgttgacgattattcctttttttattatgctgtatacataataggtgtgtgttctgtcaggccgtacatgtttccttgattgtgttggtgatcacggttaggatatgttacttttttccctgtacatgggtggattccaattcgggagtattgcggtgctgggtgtatgcacagaatattataccattagattatacttggtagagattgaagactatgctcacgcacgcgtgtcacgtccgcattatgcatgcttgaagttttatcatgcttcttctttagtagtacctttgtgccccttcaaagccaaaaaggggctctcttttgaagcaaatttcgta

SEQ ID NO: 66974 - DNA, 2448 bp, Zea Mays
ccacctccccctatcctcccctactatgatgacgcgacgccacagagcgcaggccgggccgggagcgagcggcgcgccagccaaagcaaagcaaaaacgacacaccaacgggcggatttttaagtccgccttcccccgtctcctctcctctctgtctccctcgtgccctcgccctccttttttttagtttacccgccgtcccgcgcgccgccgtttcggttgctcggctagagggactagggagtgccagcgagtccatggcagcggcgagggcgtgcatcgtcgcgctggcgctggtggcggcgctcttcgtggccggatcggcggcggcagcggcggggaatgccggaggccggccgcagctgtcgctcaggcagcggcgccggcagctgctgcggcagcggcaggtgcgcagccacctcaagaggctcaacaaggcgccgctcgccaccatcgagagtccagacggagacatcatagactgcgtgcatatctccaaccagcccgccttggatcatcctttcctcaagaaccacaccgtccagatgcggcctgcataccacccggaaggtctgtacgacgacgagtccaaggttgcatcgcagcggaacgcgcagacgatcacccagatgtggcatcagaacggcaggtgccccgagggcacgataccgatcaggcggaccaaggaggaggacgtgctgagggccagctccgtcaggaggtatggcaagaagaagcgcaggagtgcccccaaccccatgtcggttgaccctgacatgctcaacgagagcgggcaccagcacgccatagcgtacgtggagggggacaagtactacggcgccaaggctaccatcaatgtgtggcagccgaagatcgagcaggccaatgagttcagcctgtcccagctctggatcctgggaggctccttcggccaggacctcaacagcatcgaagcaggatggcaggtgaggaaggaagggggagaaggctatagctctattcaatgcaagcttccattcctgttcatcttcttccatgcatgctccaataatttctcctctgcatgcgcgtcaataattcctctcctctctcctgtgctgtgcgcttgctgcaataatgacacgagagctgctgatggcggaagagccattagtaagaggagctaggctagattctgtatcatgagctgtactactactactagctatctgtaatggttagcccagacctgtatggggacaacaacactaggctcttcacctactggactagcgatgcctaccaggcaacaggatgctacaacctgctgtgctcggggttcatccagataaacaaccagatcgccatgggcgccagcatcttccctatctccaactacggcggctcccagtatgacatcaacatcttggtctggaaggaccccaaggagggcaactggtggctgcagttcggcaacgactacgtcctggggtactggccgtcgttcctcttctcgtacctggcggacagcgcctccatgatcgagtggggcggcgaggtggtgaactcggagcccgacggcagccacaccagcacgcagatgggcagcggccacttccccgaggaagggttcggcaaggccagctacttcaggaacgtccaggtggtggactccaccaacaacctcaagccgcccaggggcgtcggcaccttcaccgagcagtccagctgctacgacgtgcaggacggcagcaacgccgactggggcacctacttctactacggcgggcccgggaagaactcaaactgtccatagcccaagactgactgagctgagccgccgcctatcacactcactaccagagccgcctaaccttaacacacctcagctgtatcattcatgcatccggtcaattagtttatactgcctcagatttttaacttttttttttgttttcgttttgtttcgctctttcttgcttctacctaccccctagtttactgactcgtaccctaggtgagtgagcgtgtgtgttgttgacatgtgagattgttctctctctctctctgcctcagagagagtgagatgaaggagagatgtcggtcgtctggttctagggaagagaggaggactgtggcccgttttctgaagagaaaaacaaggcctcatggttgctgtgccttgtgcctgtcaaataattttgtttgtttcatcccatgctggactggactgctaatcctttgttttctgttatgaaaagtgggcaatcgagtgcttagctgttgggtagacgtgcaaagatgccaacttttccgtgcgcccgccgagtctgtctgttgcccacttgtgtcacctggaaaagtgcgtgtgcgggtgatcattttatatgtaaatgtgtttgttattaatattattatagcagcgtgtggtgctggtgctggtgctgctactgtaataagctggtggag

SEQ ID NO: 66975 - DNA, 2294 bp, Zea Mays
cctccccctatcctcccctactatgatgacgcgacgccacagagcgcaggccgggccgggagcgagcggcgcgccagccaaagcaaagcaaaaacgacacaccaacgggcggatttttaagtccgccttcccccgtctcctctcctctctgtctccctcgtgccctcgccctccttttttttagtttacccgccgtcccgcgcgccgccgtttcggttgctcggctagagggactagggagtgccagcgagtccatggcagcggcgagggcgtgcatcgtcgcgctggcgctggtggcggcgctcttcgtggccggatcggcggcggcagcggcggggaatgccggaggccggccgcagctgtcgctcaggcagcggcgccggcagctgctgcggcagcggcaggtgcgcagccacctcaagaggctcaacaaggcgccgctcgccaccatcgagagtccagacggagacatcatagactgcgtgcatatctccaaccagcccgccttggatcatcctttcctcaagaaccacaccgtccagatgcggcctgcataccacccggaaggtctgtacgacgacgagtccaaggttgcatcgcagcggaacgcgcagacgatcacccagatgtggcatcagaacggcaggtgccccgagggcacgataccgatcaggcggaccaaggaggaggacgtgctgagggccagctccgtcaggaggtatggcaagaagaagcgcaggagtgcccccaaccccatgtcggttgaccctgacatgctcaacgagagcgggcaccagcacgccatagcgtacgtggagggggacaagtactacggcgccaaggctaccatcaatgtgtggcagccgaagatcgagcaggccaatgagttcagcctgtcccagctctggatcctgggaggctccttcggccaggacctcaacagcatcgaagcaggatggcaggttagcccagacctgtatggggacaacaacactaggctcttcacctactggactagcgatgcctaccaggcaacaggatgctacaacctgctgtgctcggggttcatccagataaacaaccagatcgccatgggcgccagcatcttccctatctccaactacggcggctcccagtatgacatcaacatcttggtctggaagtctgtttgtggacgcactcgcggtcgcggagtgacggttgggcccccacccatgcacgggcaagatctgtccgcggatgcaacaaccactgatgataatggaccccaaggagggcaactggtggctgcagttcggcaacgactacgtcctggggtactggccgtcgttcctcttctcgtacctggcggacagcgcctccatgatcgagtggggcggcgaggtggtgaactcggagcccgacggcagccacaccagcacgcagatgggcagcggccacttccccgaggaagggttcggcaaggccagctacttcaggaacgtccaggtggtggactccaccaacaacctcaagccgcccaggggcgtcggcaccttcaccgagcagtccagctgctacgacgtgcaggacggcagcaacgccgactggggcacctacttctactacggcgggcccgggaagaactcaaactgtccatagcccaagactgactgagctgagccgccgcctatcacactcactaccagagccgcctaaccttaacacacctcagctgtatcattcatgcatccggtcaattagtttatactgcctcagatttttaacttttttttttgttttcgttttgtttcgctctttcttgcttctacctaccccctagtttactgactcgtaccctaggtgagtgagcgtgtgtgttgttgacatgtgagattgttctctctctctctctgcctcagagagagtgagatgaaggagagatgtcggtcgtctggttctagggaagagaggaggactgtggcccgttttctgaagagaaaaacaaggcctcatggttgctgtgccttgtgcctgtcaaataattttgtttgtttcatcccatgctggactggactgctaatcctttgttttctgttatgaaaagtgggcaatcgagtgcttagctgttgggtagacgtgcaaagatgccaacttttccgtgcgcccgccgagtctgtctgttgcccacttgtgtcacctggaaaagtgcgtgtgcgggtgatcattttatatgtaaatgtgtttgttattaatattattatagcagcgtgtggtgctggtgctggtgctgctactgtaataagctggtggag

SEQ ID NO: 66976 - DNA, 2678 bp, Zea Mays
cgggagcgagcggcgcgccagccaaagcaaagcaaaaacgacacaccaacgggcggatttttaagtccgccttcccccgtctcctctcctctctgtctccctcgtgccctcgccctccttttttttagtttacccgccgtcccgcgcgccgccgtttcggttgctcggctagagggactagggagtgccagcgagtccatggcagcggcgagggcgtgcatcgtcgcgctggcgctggtggcggcgctcttcgtggccggatcggcggcggcagcggcggggaatgccggaggccggccgcagctgtcgctcaggcagcggcgccggcagctgctgcggcagcggcaggtgcgcagccacctcaagaggctcaacaaggcgccgctcgccaccatcgagagtccagacggagacatcatagactgcgtgcatatctccaaccagcccgccttggatcatcctttcctcaagaaccacaccgtccagatgcggcctgcataccacccggaaggtctgtacgacgacgagtccaaggttgcatcgcagcggaacgcgcagacgatcacccagatgtggcatcagaacggcaggtgccccgagggcacgataccgatcaggcggaccaaggaggaggacgtgctgagggccagctccgtcaggaggtatggcaagaagaagcgcaggagtgcccccaaccccatgtcggttgaccctgacatgctcaacgagagcgggcaccagcacgccatagcgtacgtggagggggacaagtactacggcgccaaggctaccatcaatgtgtggcagccgaagatcgagcaggccaatgagttcagcctgtcccagctctggatcctgggaggctccttcggccaggacctcaacagcatcgaagcaggatggcaggtgaggaaggaagggggagaaggctatagctctattcaatgcaagcttccattcctgttcatcttcttccatgcatgctccaataatttctcctctgcatgcgcgtcaataattcctctcctctctcctgtgctgtgcgcttgctgcaataatgacacgagagctgctgatggcggaagagccattagtaagaggagctaggctagattctgtatcatgagctgtactactactactagctatctgtaatggttagcccagacctgtatggggacaacaacactaggctcttcacctactggactagcgatgcctaccaggcaacaggatgctacaacctgctgtgctcggggttcatccagataaacaaccagatcgccatgggcgccagcatcttccctatctccaactacggcggctcccagtatgacatcaacatcttggtctggaaggtaaactccaaatagagctctcacatgccgagcaagcatgctagaaatcaaactcgtggtggtggtgggggtgggtggggccggagaatccgtgcccacctgtctcttggttccttttttttctcaagggttttttcaggctcgcttcagtcaagggctcacaactgtagctctggccccctcccccagtctgtttgtggacgcactcgcggtcgcggagtgacggttgggcccccacccatgcacgggcaagatctgtccgcggatgcaacaaccactgatgataatggaccccaaggagggcaactggtggctgcagttcggcaacgactacgtcctggggtactggccgtcgttcctcttctcgtacctggcggacagcgcctccatgatcgagtggggcggcgaggtggtgaactcggagcccgacggcagccacaccagcacgcagatgggcagcggccacttccccgaggaagggttcggcaaggccagctacttcaggaacgtccaggtggtggactccaccaacaacctcaagccgcccaggggcgtcggcaccttcaccgagcagtccagctgctacgacgtgcaggacggcagcaacgccgactggggcacctacttctactacggcgggcccgggaagaactcaaactgtccatagcccaagactgactgagctgagccgccgcctatcacactcactaccagagccgcctaaccttaacacacctcagctgtatcattcatgcatccggtcaattagtttatactgcctcagatttttaacttttttttttgttttcgttttgtttcgctctttcttgcttctacctaccccctagtttactgactcgtaccctaggtgagtgagcgtgtgtgttgttgacatgtgagattgttctctctctctctctgcctcagagagagtgagatgaaggagagatgtcggtcgtctggttctagggaagagaggaggactgtggcccgttttctgaagagaaaaacaaggcctcatggttgctgtgccttgtgcctgtcaaataattttgtttgtttcatcccatgctggactggactgctaatcctttgttttctgttatgaaaagtgggcaatcgagtgcttagctgttgggtagacgtgcaaagatgccaacttttccgtgcgcccgccgagtctgtctgttgcccacttgtgtcacctggaaaagtgcgtgtgcgggtgatcattttatatgtaaatgtgtttgttattaatattattatagcagcgtgtggtgctggtgctggtgctgctactgtaataagctggtggag

SEQ ID NO: 66977 - DNA, 3711 bp, Zea Mays
gccagaacccgtaaacccggcgggcccggttctgagggcgaagcgcaccggcacacgcggtgacgtggaaggcgaatcggtatcctcccgggcccggcagccggctcctgccgtcatattctctccccttctccgaccgatccccacctcacacgatactttccccctccactagggttccccgtccgttccccctcggccgcatcagctgtttgaggcggcaaccaagggccgcggaagcatctgtgtcgagccatggataaggggatcttcaccaacgatggctccttcatggagaggttcaagcagatgcagcaggaggcgcaggagaagaaggccgctgctgcctctgcctcatcggctcccaagcatgcgaaccccaagcaggggtttgctgttgcggcaaacaagaggccattcgagctgaagaacgctgctccggtagcctcagctggtaagctggcctttagtctcaagaaggccaaggtcgccgttgcacctgtgtttgcagccgacgaggaggatgaggatgctgtggatgttgagagggaggagcccgccaaacgccagaagtctgtgcaagctgatgctcctgcggcagctgccgcgtccggggctgttggtaattatttatatttattaatttcttgctgttttactgttagcttgtttagtgaaggcgttctatgggttgtagtttccaattttccatcgcatgattaggtttaaacatgtgataaggcttctaattcagtaaccgagacagaacatcagtgatatattaccttatagcttttcatgcaattagtgttttttcatcgaattcagtcacggatttagattatctcattgaatttgacgcaaatcatttcacacgcatgcgacataccttagtatttttactattgaagtgagttctaatttctgatatctgttcccaaagtattacagctggtgcagatgattgcattatcagtttctatgtagagtttttttattccatttatttgatggtgttgtcctggaagtattgcgattctgaacacatttgataatgaaactaagtaataactatatggtttgaatttaattttcttacatactgattattgaaatctctaaaggaccgtttggatggtcggtaatatttgagttctttatggttactaaaatataccataacatttaaagcttcaaggtgtttcgatacaacgatgtagttttacatccaattaccatgttattttgagttcttgaagaaaacctattcaaaactcattttccccatttttttttaaaaatcaaagcacacctcacattacctttggcaccattgtgagttatgaagcattggcctgtctaatttcatgcgaaagggcctccagctgagttggttaggtggtctgattagcactccttaggtcctgagtttagctccccgtgggagcaaatttcagtacgattttaaaaatcccctcgtctgtctcacgccaaagcacaagtctagtgcttggccctggtcgtggttgttcagcgaggcaggggttcggggggttttctcgacttgtatgaggtattcttagtacaatgtccaaggctgtctcacttccgcaggttgagttttttttttattttcatgcactagcagtacacattcctaatgtatatacttgtattgtgtacattcgttttcgattgtccacagggtacttaagcccttttcgattttccatatataaactattgctatgtatcaaagctagtagtatctatatatatgtctagctttattatttttcttctggtgtttgattatatagtatgatgtatatttgatcacaaaggaaaaaaacactaagccaaaaccacaaaatatgttattgttttttctatgtattattatattgtaaaaacagtgttctttttcacaacctatgtcatttcattactcgtgtattgaaactatgggtttgaaatgttctaatgtccagacattccataaccataataatattgaattcatgcatttatactagtgacaatgaatcttgcaatgcattttagcggtggaatttgtcaacatcgtttaaatttttagaaataaccattgaaattgcttgctgttgcaccaaggtgctgtgaacttttttgtttttgttttatgcatacatttttggtttacaaaagaaacatctccctctcatcatctgcatccattattagtcactattgtcaccagaaagtcgtgaaggttgtcttttttttatgactgcagcttatagttaactaaattgacattgctgggaaggatgtgattgagggagttggaggctctactgcagtaatttgcattgccttgtcatgcactagatattaatcagttctttaagtgacatgcagccccacccccaccaaatgatatgacagtgagacaagtcgctgacaaactggcaagctttgttgccaaaaacgggagacagtttgagaatatcacacgacagaggaatcctggagatacaccattcaagtttctatttgacaaaaactgtccagactacaaatattatgagtttcagcttgctgaagaggaaagggctcttgctcagtcaaaggaggctgaagcatcgaaagctaactctggcactgcaagcttcaaggcaccaggtggtacttatagaagctcatttgaacagaagtctaactatcagacacctgcatcagctttgtacggggcatatgagggtagttcttcccaaggaagctcttctagttatggtgatcatacagctccaccatcagatcctgtagcattgatggaattctatgcaaagaaggctgcactggaagaacggaagaggccaccaaggcagtcgaaagatgaaatgccgccacctccttctcttcaaggtcctcctaagaagggacaccacatgggtgatttcattcctcaagaagaacttgaaaagtttatggcacggtgtaatgatgctgcagcacaaaaggctaccaaagaagccgctgagaaggctaagattcaggcggacaatattgggcacaaacttttatctaagatgggttggagggaaggtgagggtcttgggagcgagagaagaggccgtgcagatcccgttatggctggagatgtgaagaaggatcatcttggtgttggggcagtccagcctggtgaggtcacatctgaagatgacatctatgagcaatacaagaagcggatgatgcttggataccgctataggccaaaccctctgaacaatccaaggaaatcatactactgatgtgggggagttcgtctgaggggagataaatgtcaagaagttcgttattcagcatatttcttggaatgccacagatgcaaggcttccgggggttctacaaagctttgttctttgtgtagtgtgtttatctttgtgggtttaaatgtctgttcaaacgtgtatcatgtttcagactgttgtattgctttcttggatcacccttttttctgatctcatttcagttacaagttggaaccataaggtacaaaatttgtgttgggaggggttatattttagaatggagtgtgaataactatagctagcataaggctatctccagcagattagccatcctcacatctaacagtacagtctatagtgcaaaatattgtaaaacagtgttttagttgaccatacggtgaattgttggacacggtct

SEQ ID NO: 66978 - DNA, 3701 bp, Zea Mays
ggcgggcccggttctgagggcgaagcgcaccggcacacgcggtgacgtggaaggcgaatcggtatcctcccgggcccggcagccggctcctgccgtcatattctctccccttctccgaccgatccccacctcacacgatactttccccctccactagggttccccgtccgttccccctcggccgcatcagaattgtagctgtttgaggcggcaaccaagggccgcggaagcatctgtgtcgagccatggataaggggatcttcaccaacgatggctccttcatggagaggttcaagcagatgcagcaggaggcgcaggagaagaaggccgctgctgcctctgcctcatcggctcccaagcatgcgaaccccaagcaggggtttgctgttgcggcaaacaagaggccattcgagctgaagaacgctgctccggtagcctcagctggtaagctggcctttagtctcaagaaggccaaggtcgccgttgcacctgtgtttgcagccgacgaggaggatgaggatgctgtggatgttgagagggaggagcccgccaaacgccagaagtctgtgcaagctgatgctcctgcggcagctgccgcgtccggggctgttggtaattatttatatttattaatttcttgctgttttactgttagcttgtttagtgaaggcgttctatgggttgtagtttccaattttccatcgcatgattaggtttaaacatgtgataaggcttctaattcagtaaccgagacagaacatcagtgatatattaccttatagcttttcatgcaattagtgttttttcatcgaattcagtcacggatttagattatctcattgaatttgacgcaaatcatttcacacgcatgcgacataccttagtatttttactattgaagtgagttctaatttctgatatctgttcccaaagtattacagctggtgcagatgattgcattatcagtttctatgtagagtttttttattccatttatttgatggtgttgtcctggaagtattgcgattctgaacacatttgataatgaaactaagtaataactatatggtttgaatttaattttcttacatactgattattgaaatctctaaaggaccgtttggatggtcggtaatatttgagttctttatggttactaaaatataccataacatttaaagcttcaaggtgtttcgatacaacgatgtagttttacatccaattaccatgttattttgagttcttgaagaaaacctattcaaaactcattttccccatttttttttaaaaatcaaagcacacctcacattacctttggcaccattgtgagttatgaagcattggcctgtctaatttcatgcgaaagggcctccagctgagttggttaggtggtctgattagcactccttaggtcctgagtttagctccccgtgggagcaaatttcagtacgattttaaaaatcccctcgtctgtctcacgccaaagcacaagtctagtgcttggccctggtcgtggttgttcagcgaggcaggggttcggggggttttctcgacttgtatgaggtattcttagtacaatgtccaaggctgtctcacttccgcaggttgagttttttttttattttcatgcactagcagtacacattcctaatgtatatacttgtattgtgtacattcgttttcgattgtccacagggtacttaagcccttttcgattttccatatataaactattgctatgtatcaaagctagtagtatctatatatatgtctagctttattatttttcttctggtgtttgattatatagtatgatgtatatttgatcacaaaggaaaaaaacactaagccaaaaccacaaaatatgttattgttttttctatgtattattatattgtaaaaacagtgttctttttcacaacctatgtcatttcattactcgtgtattgaaactatgggtttgaaatgttctaatgtccagacattccataaccataataatattgaattcatgcatttatactagtgacaatgaatcttgcaatgcattttagcggtggaatttgtcaacatcgtttaaatttttagaaataaccattgaaattgcttgctgttgcaccaaggtgctgtgaacttttttgtttttgttttatgcatacatttttggtttacaaaagaaacatctccctctcatcatctgcatccattattagtcactattgtcaccagaaagtcgtgaaggttgtcttttttttatgactgcagcttatagttaactaaattgacattgctgggaaggatgtgattgagggagttggaggctctactgcagtaatttgcattgccttgtcatgcactagatattaatcagttctttaagtgacatgcagccccacccccaccaaatgatatgacagtgagacaagtcgctgacaaactggcaagctttgttgccaaaaacgggagacagtttgagaatatcacacgacagaggaatcctggagatacaccattcaagtttctatttgacaaaaactgtccagactacaaatattatgagtttcagcttgctgaagaggaaagggctcttgctcagtcaaaggaggctgaagcatcgaaagctaactctggcactgcaagcttcaaggcaccaggtggtacttatagaagctcatttgaacagaagtctaactatcagacacctgcatcagctttgtacggggcatatgagggtagttcttcccaaggaagctcttctagttatggtgatcatacagctccaccatcagatcctgtagcattgatggaattctatgcaaagaaggctgcactggaagaacggaagaggccaccaaggcagtcgaaagatgaaatgccgccacctccttctcttcaaggtcctcctaagaagggacaccacatgggtgatttcattcctcaagaagaacttgaaaagtttatggcacggtgtaatgatgctgcagcacaaaaggctaccaaagaagccgctgagaaggctaagattcaggcggacaatattgggcacaaacttttatctaagatgggttggagggaaggtgagggtcttgggagcgagagaagaggccgtgcagatcccgttatggctggagatgtgaagaaggatcatcttggtgttggggcagtccagcctggtgaggtcacatctgaagatgacatctatgagcaatacaagaagcggatgatgcttggataccgctataggccaaaccctctgaacaatccaaggaaatcatactactgatgtgggggagttcgtctgaggggagataaatgtcaagaagttcgttattcagcatatttcttggaatgccacagatgcaaggcttccgggggttctacaaagctttgttctttgtgtagtgtgtttatctttgtgggtttaaatgtctgttcaaacgtgtatcatgtttcagactgttgtattgctttcttggatcacccttttttctgatctcatttcagttacaagttggaaccataaggtacaaaatttgtgttgggaggggttatattttagaatggagtgtgaataactatagctagcataaggctatctccagcagattagccatcctcacatctaacagtacagtctatagtgcaaaatattgtaaaacagtgttttagttgaccatacggtgaattgttggacacggtct

SEQ ID NO: 66979 - DNA, 3835 bp, Zea Mays
ccggttctgagggcgaagcgcaccggcacacgcggtgacgtggaaggcgaatcggtatcctcccgggcccggcagccggctcctgccgtcatattctctccccttctccgaccgatccccacctcacacgatactttccccctccactagggttccccgtccgttccccctcggccgcatcagatctccgcggcggagtttcgtaccgtatttgtctttgcaacattcgagttgattattttggaggagtcgctctctagggttgattgagcgctgttgttttttttgtgcgacgacggtggtgtgttgattggatgttgaaagaattgtagctgtttgaggcggcaaccaagggccgcggaagcatctgtgtcgagccatggataaggggatcttcaccaacgatggctccttcatggagaggttcaagcagatgcagcaggaggcgcaggagaagaaggccgctgctgcctctgcctcatcggctcccaagcatgcgaaccccaagcaggggtttgctgttgcggcaaacaagaggccattcgagctgaagaacgctgctccggtagcctcagctggtaagctggcctttagtctcaagaaggccaaggtcgccgttgcacctgtgtttgcagccgacgaggaggatgaggatgctgtggatgttgagagggaggagcccgccaaacgccagaagtctgtgcaagctgatgctcctgcggcagctgccgcgtccggggctgttggtaattatttatatttattaatttcttgctgttttactgttagcttgtttagtgaaggcgttctatgggttgtagtttccaattttccatcgcatgattaggtttaaacatgtgataaggcttctaattcagtaaccgagacagaacatcagtgatatattaccttatagcttttcatgcaattagtgttttttcatcgaattcagtcacggatttagattatctcattgaatttgacgcaaatcatttcacacgcatgcgacataccttagtatttttactattgaagtgagttctaatttctgatatctgttcccaaagtattacagctggtgcagatgattgcattatcagtttctatgtagagtttttttattccatttatttgatggtgttgtcctggaagtattgcgattctgaacacatttgataatgaaactaagtaataactatatggtttgaatttaattttcttacatactgattattgaaatctctaaaggaccgtttggatggtcggtaatatttgagttctttatggttactaaaatataccataacatttaaagcttcaaggtgtttcgatacaacgatgtagttttacatccaattaccatgttattttgagttcttgaagaaaacctattcaaaactcattttccccatttttttttaaaaatcaaagcacacctcacattacctttggcaccattgtgagttatgaagcattggcctgtctaatttcatgcgaaagggcctccagctgagttggttaggtggtctgattagcactccttaggtcctgagtttagctccccgtgggagcaaatttcagtacgattttaaaaatcccctcgtctgtctcacgccaaagcacaagtctagtgcttggccctggtcgtggttgttcagcgaggcaggggttcggggggttttctcgacttgtatgaggtattcttagtacaatgtccaaggctgtctcacttccgcaggttgagttttttttttattttcatgcactagcagtacacattcctaatgtatatacttgtattgtgtacattcgttttcgattgtccacagggtacttaagcccttttcgattttccatatataaactattgctatgtatcaaagctagtagtatctatatatatgtctagctttattatttttcttctggtgtttgattatatagtatgatgtatatttgatcacaaaggaaaaaaacactaagccaaaaccacaaaatatgttattgttttttctatgtattattatattgtaaaaacagtgttctttttcacaacctatgtcatttcattactcgtgtattgaaactatgggtttgaaatgttctaatgtccagacattccataaccataataatattgaattcatgcatttatactagtgacaatgaatcttgcaatgcattttagcggtggaatttgtcaacatcgtttaaatttttagaaataaccattgaaattgcttgctgttgcaccaaggtgctgtgaacttttttgtttttgttttatgcatacatttttggtttacaaaagaaacatctccctctcatcatctgcatccattattagtcactattgtcaccagaaagtcgtgaaggttgtcttttttttatgactgcagcttatagttaactaaattgacattgctgggaaggatgtgattgagggagttggaggctctactgcagtaatttgcattgccttgtcatgcactagatattaatcagttctttaagtgacatgcagccccacccccaccaaatgatatgacagtgagacaagtcgctgacaaactggcaagctttgttgccaaaaacgggagacagtttgagaatatcacacgacagaggaatcctggagatacaccattcaagtttctatttgacaaaaactgtccagactacaaatattatgagtttcagcttgctgaagaggaaagggctcttgctcagtcaaaggaggctgaagcatcgaaagctaactctggcactgcaagcttcaaggcaccaggtggtacttatagaagctcatttgaacagaagtctaactatcagacacctgcatcagctttgtacggggcatatgagggtagttcttcccaaggaagctcttctagttatggtgatcatacagctccaccatcagatcctgtagcattgatggaattctatgcaaagaaggctgcactggaagaacggaagaggccaccaaggcagtcgaaagatgaaatgccgccacctccttctcttcaaggtcctcctaagaagggacaccacatgggtgatttcattcctcaagaagaacttgaaaagtttatggcacggtgtaatgatgctgcagcacaaaaggctaccaaagaagccgctgagaaggctaagattcaggcggacaatattgggcacaaacttttatctaagatgggttggagggaaggtgagggtcttgggagcgagagaagaggccgtgcagatcccgttatggctggagatgtgaagaaggatcatcttggtgttggggcagtccagcctggtgaggtcacatctgaagatgacatctatgagcaatacaagaagcggatgatgcttggataccgctataggccaaaccctctgaacaatccaaggaaatcatactactgatgtgggggagttcgtctgaggggagataaatgtcaagaagttcgttattcagcatatttcttggaatgccacagatgcaaggcttccgggggttctacaaagctttgttctttgtgtagtgtgtttatctttgtgggtttaaatgtctgttcaaacgtgtatcatgtttcagactgttgtattgctttcttggatcacccttttttctgatctcatttcagttacaagttggaaccataaggtacaaaatttgtgttgggaggggttatattttagaatggagtgtgaataactatagctagcataaggctatctccagcagattagccatcctcacatctaacagtacagtctatagtgcaaaatattgtaaaacagtgttttagttgaccatacggtgaattgttggacacggtct

SEQ ID NO: 66980 - DNA, 1578 bp, Zea Mays
ggaaggcgaatcggtatcctcccgggcccggcagccggctcctgccgtcatattctctccccttctccgaccgatccccacctcacacgatactttccccctccactagggttccccgtccgttccccctcggccgcatcagcttatagttaactaaattgacattgctgggaaggatgtgattgagggagttggaggctctactgcagtaatttgcattgccttgtcatgcactagatattaatcagttctttaagtgacatgcagccccacccccaccaaatgatatgacagtgagacaagtcgctgacaaactggcaagctttgttgccaaaaacgggagacagtttgagaatatcacacgacagaggaatcctggagatacaccattcaagtttctatttgacaaaaactgtccagactacaaatattatgagtttcagcttgctgaagaggaaagggctcttgctcagtcaaaggaggctgaagcatcgaaagctaactctggcactgcaagcttcaaggcaccaggtggtacttatagaagctcatttgaacagaagtctaactatcagacacctgcatcagctttgtacggggcatatgagggtagttcttcccaaggaagctcttctagttatggtgatcatacagctccaccatcagatcctgtagcattgatggaattctatgcaaagaaggctgcactggaagaacggaagaggccaccaaggcagtcgaaagatgaaatgccgccacctccttctcttcaaggtcctcctaagaagggacaccacatgggtgatttcattcctcaagaagaacttgaaaagtttatggcacggtgtaatgatgctgcagcacaaaaggctaccaaagaagccgctgagaaggctaagattcaggcggacaatattgggcacaaacttttatctaagatgggttggagggaaggtgagggtcttgggagcgagagaagaggccgtgcagatcccgttatggctggagatgtgaagaaggatcatcttggtgttggggcagtccagcctggtgaggtcacatctgaagatgacatctatgagcaatacaagaagcggatgatgcttggataccgctataggccaaaccctctgaacaatccaaggaaatcatactactgatgtgggggagttcgtctgaggggagataaatgtcaagaagttcgttattcagcatatttcttggaatgccacagatgcaaggcttccgggggttctacaaagctttgttctttgtgtagtgtgtttatctttgtgggtttaaatgtctgttcaaacgtgtatcatgtttcagactgttgtattgctttcttggatcacccttttttctgatctcatttcagttacaagttggaaccataaggtacaaaatttgtgttgggaggggttatattttagaatggagtgtgaataactatagctagcataaggctatctccagcagattagccatcctcacatctaacagtacagtctatagtgcaaaatattgtaaaacagtgttttagttgaccatacggtgaattgttggacacggtct

SEQ ID NO: 66981 - DNA, 1941 bp, Zea Mays
attctctccccttctccgaccgatccccacctcacacgatactttccccctccactagggttccccgtccgttccccctcggccgcatcagctgtttgaggcggcaaccaagggccgcggaagcatctgtgtcgagccatggataaggggatcttcaccaacgatggctccttcatggagaggttcaagcagatgcagcaggaggcgcaggagaagaaggccgctgctgcctctgcctcatcggctcccaagcatgcgaaccccaagcaggggtttgctgttgcggcaaacaagaggccattcgagctgaagaacgctgctccggtagcctcagctggtaagctggcctttagtctcaagaaggccaaggtcgccgttgcacctgtgtttgcagccgacgaggaggatgaggatgctgtggatgttgagagggaggagcccgccaaacgccagaagtctgtgcaagctgatgctcctgcggcagctgccgcgtccggggctgttgcttatagttaactaaattgacattgctgggaaggatgtgattgagggagttggaggctctactgcagtaatttgcattgccttgtcatgcactagatattaatcagttctttaagtgacatgcagccccacccccaccaaatgatatgacagtgagacaagtcgctgacaaactggcaagctttgttgccaaaaacgggagacagtttgagaatatcacacgacagaggaatcctggagatacaccattcaagtttctatttgacaaaaactgtccagactacaaatattatgagtttcagcttgctgaagaggaaagggctcttgctcagtcaaaggaggctgaagcatcgaaagctaactctggcactgcaagcttcaaggcaccaggtggtacttatagaagctcatttgaacagaagtctaactatcagacacctgcatcagctttgtacggggcatatgagggtagttcttcccaaggaagctcttctagttatggtgatcatacagctccaccatcagatcctgtagcattgatggaattctatgcaaagaaggctgcactggaagaacggaagaggccaccaaggcagtcgaaagatgaaatgccgccacctccttctcttcaaggtcctcctaagaagggacaccacatgggtgatttcattcctcaagaagaacttgaaaagtttatggcacggtgtaatgatgctgcagcacaaaaggctaccaaagaagccgctgagaaggctaagattcaggcggacaatattgggcacaaacttttatctaagatgggttggagggaaggtgagggtcttgggagcgagagaagaggccgtgcagatcccgttatggctggagatgtgaagaaggatcatcttggtgttggggcagtccagcctggtgaggtcacatctgaagatgacatctatgagcaatacaagaagcggatgatgcttggataccgctataggccaaaccctctgaacaatccaaggaaatcatactactgatgtgggggagttcgtctgaggggagataaatgtcaagaagttcgttattcagcatatttcttggaatgccacagatgcaaggcttccgggggttctacaaagctttgttctttgtgtagtgtgtttatctttgtgggtttaaatgtctgttcaaacgtgtatcatgtttcagactgttgtattgctttcttggatcacccttttttctgatctcatttcagttacaagttggaaccataaggtacaaaatttgtgttgggaggggttatattttagaatggagtgtgaataactatagctagcataaggctatctccagcagattagccatcctcacatctaacagtacagtctatagtgcaaaatattgtaaaacagtgttttagttgaccatacggtgaattgttggacacggtct

SEQ ID NO: 66982 - DNA, 1389 bp, Zea Mays
ctccgaccgatccccacctcacacgatactttccccctccactagggttccccgtccgttccccctcggccgcatcagccccacccccaccaaatgatatgacagtgagacaagtcgctgacaaactggcaagctttgttgccaaaaacgggagacagtttgagaatatcacacgacagaggaatcctggagatacaccattcaagtttctatttgacaaaaactgtccagactacaaatattatgagtttcagcttgctgaagaggaaagggctcttgctcagtcaaaggaggctgaagcatcgaaagctaactctggcactgcaagcttcaaggcaccaggtggtacttatagaagctcatttgaacagaagtctaactatcagacacctgcatcagctttgtacggggcatatgagggtagttcttcccaaggaagctcttctagttatggtgatcatacagctccaccatcagatcctgtagcattgatggaattctatgcaaagaaggctgcactggaagaacggaagaggccaccaaggcagtcgaaagatgaaatgccgccacctccttctcttcaaggtcctcctaagaagggacaccacatgggtgatttcattcctcaagaagaacttgaaaagtttatggcacggtgtaatgatgctgcagcacaaaaggctaccaaagaagccgctgagaaggctaagattcaggcggacaatattgggcacaaacttttatctaagatgggttggagggaaggtgagggtcttgggagcgagagaagaggccgtgcagatcccgttatggctggagatgtgaagaaggatcatcttggtgttggggcagtccagcctggtgaggtcacatctgaagatgacatctatgagcaatacaagaagcggatgatgcttggataccgctataggccaaaccctctgaacaatccaaggaaatcatactactgatgtgggggagttcgtctgaggggagataaatgtcaagaagttcgttattcagcatatttcttggaatgccacagatgcaaggcttccgggggttctacaaagctttgttctttgtgtagtgtgtttatctttgtgggtttaaatgtctgttcaaacgtgtatcatgtttcagactgttgtattgctttcttggatcacccttttttctgatctcatttcagttacaagttggaaccataaggtacaaaatttgtgttgggaggggttatattttagaatggagtgtgaataactatagctagcataaggctatctccagcagattagccatcctcacatctaacagtacagtctatagtgcaaaatattgtaaaacagtgttttagttgaccatacggtgaattgttggacacggtct

SEQ ID NO: 66983 - DNA, 1883 bp, Zea Mays
ctcacacgatactttccccctccactagggttccccgtccgttccccctcggccgcatcagaattgtagctgtttgaggcggcaaccaagggccgcggaagcatctgtgtcgagccatggataaggggatcttcaccaacgatggctccttcatggagaggttcaagcagatgcagcaggaggcgcaggagaagaaggccgctgctgcctctgcctcatcggctcccaagcatgcgaaccccaagcaggggtttgctgttgcggcaaacaagaggccattcgagctgaagaacgctgctccggtagcctcagctggtaagctggcctttagtctcaagaaggccaaggtcgccgttgcacctgtgtttgcagccgacgaggaggatgaggatgctgtggatgttgagagggaggagcccgccaaacgccagaagtctgtgcaagctgatgctcctgcggcagctgccgcgtccggggctgttgccccacccccaccaaatgatatgacagtgagacaagtcgctgacaaactggcaagctttgttgccaaaaacgggagacagtttgagaatatcacacgacagaggaatcctggagatacaccattcaagtttctatttgacaaaaactgtccagactacaaatattatgagtttcagcttgctgaagaggaaagggctcttgctcagtcaaaggaggctgaagcatcgaaagctaactctggcactgcaagcttcaaggcaccaggtggtacttatagaagctcatttgaacagaagtctaactatcagacacctgcatcagctttgtacggggcatatgagggtagttcttcccaaggaagctcttctagttatggtgatcatacagctccaccatcagatcctgtagcattgatggaattctatgcaaagaaggctgcactggaagaacggaagaggccaccaaggcagtcgaaagatgaaatgccgccacctccttctcttcaaggtcctcctaagaagggacaccacatgggtgatttcattcctcaagaagaacttgaaaagtttatggcacggtgtaatgatgctgcagcacaaaaggctaccaaagaagccgctgagaaggctaagattcaggcggacaatattgggcacaaacttttatctaagatgggttggagggaaggtgagggtcttgggagcgagagaagaggccgtgcagatcccgttatggctggagatgtgaagaaggatcatcttggtgttggggcagtccagcctggtgaggtcacatctgaagatgacatctatgagcaatacaagaagcggatgatgcttggataccgctataggccaaaccctctgaacaatccaaggaaatcatactactgatgtgggggagttcgtctgaggggagatgtaaggcgctgctttgctgcaattttgctcacagaactaatggttaggggatatcactaacagcattgaaagtttttgttcatcaacagaaatgtcaagaagttcgttattcagcatatttcttggaatgccacagatgcaaggcttccgggggttctacaaagctttgttctttgtgtagtgtgtttatctttgtgggtttaaatgtctgttcaaacgtgtatcatgtttcagactgttgtattgctttcttggatcacccttttttctgatctcatttcagttacaagttggaaccataaggtacaaaatttgtgttgggaggggttatattttagaatggagtgtgaataactatagctagcataaggctatctccagcagattagccatcctcacatctaacagtacagtctatagtgcaaaatattgtaaaacagtgttttagttgaccatacggtgaattgttggacacggtct

SEQ ID NO: 66984 - DNA, 2159 bp, Zea Mays
ctcacacgatactttccccctccactagggttccccgtccgttccccctcggccgcatcaggtaaattactggtctatccgccccgcattcgatctgatcccgtgattcaagcccttgtgcatcgatccgggactcctccacctgcagatctccgcggcggagtttcgtaccgtatttgtctttgcaacattcgagttgattattttggaggagtcgctctctagggttgattgagcgctgttgttttttttgtgcgacgacggtggtgtgttgattggatgttgaaagaattgtagctgtttgaggcggcaaccaagggccgcggaagcatctgtgtcgagccatggataaggggatcttcaccaacgatggctccttcatggagaggttcaagcagatgcagcaggaggcgcaggagaagaaggccgctgctgcctctgcctcatcggctcccaagcatgcgaaccccaagcaggggtttgctgttgcggcaaacaagaggccattcgagctgaagaacgctgctccggtagcctcagctggtaagctggcctttagtctcaagaaggccaaggtcgccgttgcacctgtgtttgcagccgacgaggaggatgaggatgctgtggatgttgagagggaggagcccgccaaacgccagaagtctgtgcaagctgatgctcctgcggcagctgccgcgtccggggctgttgccccacccccaccaaatgatatgacagtgagacaagtcgctgacaaactggcaagctttgttgccaaaaacgggagacagtttgagaatatcacacgacagaggaatcctggagatacaccattcaagtttctatttgacaaaaactgtccagactacaaatattatgagtttcagcttgctgaagaggaaagggctcttgctcagtcaaaggaggctgaagcatcgaaagctaactctggcactgcaagcttcaaggcaccaggtggtacttatagaagctcatttgaacagaagtctaactatcagacacctgcatcagctttgtacggggcatatgagggtgatcatacagctccaccatcagatcctgtagcattgatggaattctatgcaaagaaggctgcactggaagaacggaagaggccaccaaggcagtcgaaagatgaaatgccgccacctccttctcttcaaggtacatacacaacattattctccttgttgaaagaatgtagaagcttcaatgtttattccagcacaactaattcctgtgcaggtcctcctaagaagggacaccacatgggtgatttcattcctcaagaagaacttgaaaagtttatggcacggtgtaatgatgctgcagcacaaaaggctaccaaagaagccgctgagaaggctaagattcaggcggacaatattgggcacaaacttttatctaagatgggttggagggaaggtgagggtcttgggagcgagagaagaggccgtgcagatcccgttatggctggagatgtgaagaaggatcatcttggtgttggggcagtccagcctggtgaggtcacatctgaagatgacatctatgagcaatacaagaagcggatgatgcttggataccgctataggccaaaccctctgaacaatccaaggaaatcatactactgatgtgggggagttcgtctgaggggagatgtaaggcgctgctttgctgcaattttgctcacagaactaatggttaggggatatcactaacagcattgaaagtttttgttcatcaacagaaatgtcaagaagttcgttattcagcatatttcttggaatgccacagatgcaaggcttccgggggttctacaaagctttgttctttgtgtagtgtgtttatctttgtgggtttaaatgtctgttcaaacgtgtatcatgtttcagactgttgtattgctttcttggatcacccttttttctgatctcatttcagttacaagttggaaccataaggtacaaaatttgtgttgggaggggttatattttagaatggagtgtgaataactatagctagcataaggctatctccagcagattagccatcctcacatctaacagtacagtctatagtgcaaaatattgtaaaacagtgttttagttgaccatacggtgaattgttggacacggtct

SEQ ID NO: 66985 - DNA, 1919 bp, Zea Mays
ctcacacgatactttccccctccactagggttccccgtccgttccccctcggccgcatcagaattgtagctgtttgaggcggcaaccaagggccgcggaagcatctgtgtcgagccatggataaggggatcttcaccaacgatggctccttcatggagaggttcaagcagatgcagcaggaggcgcaggagaagaaggccgctgctgcctctgcctcatcggctcccaagcatgcgaaccccaagcaggggtttgctgttgcggcaaacaagaggccattcgagctgaagaacgctgctccggtagcctcagctggtaagctggcctttagtctcaagaaggccaaggtcgccgttgcacctgtgtttgcagccgacgaggaggatgaggatgctgtggatgttgagagggaggagcccgccaaacgccagaagtctgtgcaagctgatgctcctgcggcagctgccgcgtccggggctgttgcttatagttaactaaattgacattgctgggaaggatgtgattgagggagttggaggctctactgcagtaatttgcattgccttgtcatgcactagatattaatcagttctttaagtgacatgcagccccacccccaccaaatgatatgacagtgagacaagtcgctgacaaactggcaagctttgttgccaaaaacgggagacagtttgagaatatcacacgacagaggaatcctggagatacaccattcaagtttctatttgacaaaaactgtccagactacaaatattatgagtttcagcttgctgaagaggaaagggctcttgctcagtcaaaggaggctgaagcatcgaaagctaactctggcactgcaagcttcaaggcaccaggtggtacttatagaagctcatttgaacagaagtctaactatcagacacctgcatcagctttgtacggggcatatgagggtagttcttcccaaggaagctcttctagttatggtgatcatacagctccaccatcagatcctgtagcattgatggaattctatgcaaagaaggctgcactggaagaacggaagaggccaccaaggcagtcgaaagatgaaatgccgccacctccttctcttcaaggtcctcctaagaagggacaccacatgggtgatttcattcctcaagaagaacttgaaaagtttatggcacggtgtaatgatgctgcagcacaaaaggctaccaaagaagccgctgagaaggctaagattcaggcggacaatattgggcacaaacttttatctaagatgggttggagggaaggtgagggtcttgggagcgagagaagaggccgtgcagatcccgttatggctggagatgtgaagaaggatcatcttggtgttggggcagtccagcctggtgaggtcacatctgaagatgacatctatgagcaatacaagaagcggatgatgcttggataccgctataggccaaaccctctgaacaatccaaggaaatcatactactgatgtgggggagttcgtctgaggggagataaatgtcaagaagttcgttattcagcatatttcttggaatgccacagatgcaaggcttccgggggttctacaaagctttgttctttgtgtagtgtgtttatctttgtgggtttaaatgtctgttcaaacgtgtatcatgtttcagactgttgtattgctttcttggatcacccttttttctgatctcatttcagttacaagttggaaccataaggtacaaaatttgtgttgggaggggttatattttagaatggagtgtgaataactatagctagcataaggctatctccagcagattagccatcctcacatctaacagtacagtctatagtgcaaaatattgtaaaacagtgttttagttgaccatacggtgaattgttggacacggtct

SEQ ID NO: 66986 - DNA, 3560 bp, Zea Mays
ctcacacgatactttccccctccactagggttccccgtccgttccccctcggccgcatcagaattgtagctgtttgaggcggcaaccaagggccgcggaagcatctgtgtcgagccatggataaggggatcttcaccaacgatggctccttcatggagaggttcaagcagatgcagcaggaggcgcaggagaagaaggccgctgctgcctctgcctcatcggctcccaagcatgcgaaccccaagcaggggtttgctgttgcggcaaacaagaggccattcgagctgaagaacgctgctccggtagcctcagctggtaagctggcctttagtctcaagaaggccaaggtcgccgttgcacctgtgtttgcagccgacgaggaggatgaggatgctgtggatgttgagagggaggagcccgccaaacgccagaagtctgtgcaagctgatgctcctgcggcagctgccgcgtccggggctgttggtaattatttatatttattaatttcttgctgttttactgttagcttgtttagtgaaggcgttctatgggttgtagtttccaattttccatcgcatgattaggtttaaacatgtgataaggcttctaattcagtaaccgagacagaacatcagtgatatattaccttatagcttttcatgcaattagtgttttttcatcgaattcagtcacggatttagattatctcattgaatttgacgcaaatcatttcacacgcatgcgacataccttagtatttttactattgaagtgagttctaatttctgatatctgttcccaaagtattacagctggtgcagatgattgcattatcagtttctatgtagagtttttttattccatttatttgatggtgttgtcctggaagtattgcgattctgaacacatttgataatgaaactaagtaataactatatggtttgaatttaattttcttacatactgattattgaaatctctaaaggaccgtttggatggtcggtaatatttgagttctttatggttactaaaatataccataacatttaaagcttcaaggtgtttcgatacaacgatgtagttttacatccaattaccatgttattttgagttcttgaagaaaacctattcaaaactcattttccccatttttttttaaaaatcaaagcacacctcacattacctttggcaccattgtgagttatgaagcattggcctgtctaatttcatgcgaaagggcctccagctgagttggttaggtggtctgattagcactccttaggtcctgagtttagctccccgtgggagcaaatttcagtacgattttaaaaatcccctcgtctgtctcacgccaaagcacaagtctagtgcttggccctggtcgtggttgttcagcgaggcaggggttcggggggttttctcgacttgtatgaggtattcttagtacaatgtccaaggctgtctcacttccgcaggttgagttttttttttattttcatgcactagcagtacacattcctaatgtatatacttgtattgtgtacattcgttttcgattgtccacagggtacttaagcccttttcgattttccatatataaactattgctatgtatcaaagctagtagtatctatatatatgtctagctttattatttttcttctggtgtttgattatatagtatgatgtatatttgatcacaaaggaaaaaaacactaagccaaaaccacaaaatatgttattgttttttctatgtattattatattgtaaaaacagtgttctttttcacaacctatgtcatttcattactcgtgtattgaaactatgggtttgaaatgttctaatgtccagacattccataaccataataatattgaattcatgcatttatactagtgacaatgaatcttgcaatgcattttagcggtggaatttgtcaacatcgtttaaatttttagaaataaccattgaaattgcttgctgttgcaccaaggtgctgtgaacttttttgtttttgttttatgcatacatttttggtttacaaaagaaacatctccctctcatcatctgcatccattattagtcactattgtcaccagaaagtcgtgaaggttgtcttttttttatgactgcagcttatagttaactaaattgacattgctgggaaggatgtgattgagggagttggaggctctactgcagtaatttgcattgccttgtcatgcactagatattaatcagttctttaagtgacatgcagccccacccccaccaaatgatatgacagtgagacaagtcgctgacaaactggcaagctttgttgccaaaaacgggagacagtttgagaatatcacacgacagaggaatcctggagatacaccattcaagtttctatttgacaaaaactgtccagactacaaatattatgagtttcagcttgctgaagaggaaagggctcttgctcagtcaaaggaggctgaagcatcgaaagctaactctggcactgcaagcttcaaggcaccaggtggtacttatagaagctcatttgaacagaagtctaactatcagacacctgcatcagctttgtacggggcatatgagggtagttcttcccaaggaagctcttctagttatgctccaccatcagatcctgtagcattgatggaattctatgcaaagaaggctgcactggaagaacggaagaggccaccaaggcagtcgaaagatgaaatgccgccacctccttctcttcaaggtcctcctaagaagggacaccacatgggtgatttcattcctcaagaagaacttgaaaagtttatggcacggtgtaatgatgctgcagcacaaaaggctaccaaagaagccgctgagaaggctaagattcaggcggacaatattgggcacaaacttttatctaagatgggttggagggaaggtgagggtcttgggagcgagagaagaggccgtgcagatcccgttatggctggagatgtgaagaaggatcatcttggtgttggggcagtccagcctggtgaggtcacatctgaagatgacatctatgagcaatacaagaagcggatgatgcttggataccgctataggccaaaccctctgaacaatccaaggaaatcatactactgatgtgggggagttcgtctgaggggagataaatgtcaagaagttcgttattcagcatatttcttggaatgccacagatgcaaggcttccgggggttctacaaagctttgttctttgtgtagtgtgtttatctttgtgggtttaaatgtctgttcaaacgtgtatcatgtttcagactgttgtattgctttcttggatcacccttttttctgatctcatttcagttacaagttggaaccataaggtacaaaatttgtgttgggaggggttatattttagaatggagtgtgaataactatagctagcataaggctatctccagcagattagccatcctcacatctaacagtacagtctatagtgcaaaatattgtaaaacagtgttttagttgaccatacggtgaattgttggacacggtct

SEQ ID NO: 66987 - DNA, 1645 bp, Zea Mays
ccacgaagtagcgttggctgttgcaaaagcaaccgtttcaagtttcctccctagtgcacccaggaaatcgccagcacctcccctgttccctctctgtctctggctctctctcctctccgcccctttttatcgcccgatctcacacattttggaaagaggagagagagggagagattagaggggagcgccctgcccaagcaaagagaaaccgcggcgcgagaagagggaggaagggcagacgggcgagcaggatgagagagatcatcagcatccacatcggccaggccgggatccaggtcggcaacgcctgctgggagctctactgcctcgagcacggcatcgagcccgatggcaccatgcccagtgatacctcggttggcgtcgcacatgatgccttcaacacgttcttcagcgagaccggttctggcaagcatgtgccgagggccatcttcgtcgaccttgaacccactgtcattgatgaggttcgcactggctcgtaccgccaactcttccacccagagcagctcatctcgggcaaggaagacgcagctaacaactttgcccgtggccactacactgttgggaaggagattgtcgatctatgcctggaccgtgtgcgcaagcttgcagacaactgcactgggctgcagggattcttggtgttcaatgctgttggtggtgggactggctctggacttgggtcacttttattggagcgcctttcagttgattatggcaagaaatccaagcttggtttcaccatttatccttccccacaggtgtcaacagctgttgtagagccatacaacagtgtcctctccacccactccttgcttgagcacactgatgttgcagtcctcctggacaacgaggctatctatgacatatgcaggaggtcccttgacatcgaaagctctctgttcctgaaatcaccaatgccgtctttgagccctcaagcatgatggccaagtgtgacccaaggcatgggaagtacatggcttgctgcttgatgtaccgtggtgatgttgttcccaaggatgtcaatgctgcagtcgcaaccatcaagaccaagagaactgtccagtttgtggactggtgccccaccggattcaagtgtggcatcaactaccagccaccgtctgttgtccctggaggcgacctggcaaaggtccagcgtgccgtgtgtatgatcagcaacaacactgccgttgctgaggtgttctcgcgcatcgatcacaagttcgaccttatgtacgccaagcgggcgttcgttcactggtacgtcggtgagggtatggaagagggtgagttctccgaggcccgtgaggacttggctgctcttgagaaggactatgaggaagtcggcgcagagggtgcagatgacgagggtgacgagggcgatgactattgagtagccggttaataattagttcgctggtgcttaatggttgagttattttgagtatactctgtatgggtccactccattgcgtgctgctgctgtgtgtttccattttgtattttgtgataaattgttcgtagccccctattggccatgattgttgttcatatcatcctgttttgatttgcaatgctattcatcgaagttcgatgtagtatatttcattctgttgcaaaaaaaaaa

SEQ ID NO: 66988 - DNA, 2042 bp, Zea Mays
atggccgaggagctcccactgtcccgcacgcgcgcgcccgttgcgttgcttctccgtctccccgaattctccctccgtctcggccgtcggcactcatctactgtccagtgtccacacaccaacgcgcgcgcggcgcggcggtatggcttgcgcggccgctcccagccccctccccggcgtccccgctcgccgcagcaccacggcgccctgcgtggtcttcgccgtgggcccccacccgccgcgattctacagaccttttaaaccctccacgggaggcgcgccacgctccagcctgcgcgtcgtggcctctagctccaaggcggacccagtagaggagagactcccagtcgcgccgctcgcggatgttctagtttcggccaacgcctcctcgcccagtccgccggtggagcctcagccccaacacatggaaatggaggggctacaacattcgctaccagcacgctgggacagcaggccctgcattggttctggttcatgggtttggggcaaacagtgaccattggcggaaaaatatgtctgttctagccatggcacacagggtatatgctatagatctaattggttatggctattctgataagcctaacccacgtgagatcgaagagaacttttatacttttgagacatggggagaacagctgaattcattttgtgctgaagttgtccagagtgaagttttcttcatatgcaattcaattggaggagttgttggtctgcaggcagctgttatggaacctaaaacatgtaagggaattgttttattggatatttcactaaggatgcttcatatcaaaaagcagccatggtttggaaagcctttcatcaaatcttttcaaagtctcctaaggaacactattgttgggaagctattttttaatgctgttgctacaccagaatctgtgaaaaatattctttgccagtgctatcatgacacatctgcagtgacagatgagctagttcagattattctacagcctggtcttgatcctggagcagtggatgtattccttgagttcatctgctactctggaggacctctacctgaagagttgcttccattggtgaagtgtccagttttggtagcatggggggagaaggacccatgggagcctgttgagcttggaagagcctatgcatcttttgatacagttgaagattttgttgtcttgccagatgttggacactgccctcaggatgaagcacctgagcttgttaatccacttgtcgaatcatttgtccagcgccatacttagcacatgggcgagcatctttcagggccctgcctgaggcagggcgggaggagcggccgacctgggcccccatctcccaggggcctaccgtacacaaagttcaataggaatataggatagaaacggatattatttactataccaatatatttttgagtttgttaggagaatggattgctgtcccaatatatttgttgtttatcggatattatttactataccaataactgtggcatcagctgaaaggagcttctcaaagcttaagttattgaagaattatttaaggtctacaatgtctcaagaaaggttaaacgaactagcaactttatgtattgagaagaaattattagatgatgtcaatattgaagccatcattgaggattttgcatctagaaatgttagaagatatttttaagttgatctctacaatatatttgaggtaataatcttacttctattttttactgctcaagtctttctgtggtacatcaaatataattagttgatatatataatagtaaaaaatagtttttatggtgttgagacctctatttataatcttgtcccgggcccctcaaaagtcaggaacggccctggcatctttctatgtttattaatgccctttcccagcagggcctcgtgctggaaaatgtgaacgtaaggttatgttatttacaaatgggtcctgttatagctacttacttgcatctgagagccgggggcaaacatcatttgacagattataatttgattataagagatcatgaagaa

SEQ ID NO: 66989 - DNA, 2608 bp, Zea Mays
gatcccatacattgccacttgtcggggaggagagtccggagctgagacggcgagctgcctagctccgttcctgctctatatctcagctcctccgttctgtcctgtggccccgagctgagctgccaaggatacgtacgtacgtacgtcttgagggaggctgccggtcgccctcttctctcgtcgacctcgtcggggttatgcggaggagcaggtcgtgcttgtcctgcgtgcccatggggacggcggcgctgcccattgagaaccacttcgtcgctccggctgcgctaccgtcggtgcccgcctcagaggacggaggatttggcaagggcagcatagaccttggaggcctagaggtgcgccaggtcaccacgtttgccaaggtctggtccaccacacagggcggccaagacggcctcggcgccaccttcttcaagccctcgccggtgcccgccggcttctccgtgctcggccactacgcgcagcccaacaaccggcctctcttcggccacgtcctcgtcggccgggacacgtctggcgccggcggtgcgctcctcgccgcgccagtggactacgccctcgtctggtccagcccggacggcgccggccacttctggctccccacggctcccgagggctacaaggccgtcggcgtggtggtcacggccgcggcggacaagccttcacccgacgaggtccggtgcgtccgcgccgacttcaccgacgcgtgcgaggccgaggactcggtgtggagcagcgacaaggacggcttcagcgcgtccaccctgaggccggcggtccgcggcatcgaagcccgcggcgtgcacgctggcacgttcctcgcccagagcagcgcgacgccggcggcggcggcgggcgtgtcaacgacgctggcgtgtctgaagaacaacagcgcgagctacacgtcctccatgcccgacctggcccagctgaactccctcctggcggcctacgcgccgcacgtgtacctgcacccgaacgagccctacttcccgtcgtcggtggcgtggttcttcgagaacggcgcgctgatgtaccagaagggcagcagccagaccccgacgccggtggccgccgacgggtcgaacctcccgcagggcggcggcaacgacggcgggtactggctcgacctgccggcggacgggaaccagcgggagaaggccaagaggggagacctcgccggcgcgaaggtgtacgtgcaggcgaagccgatgctcggcgggacggtggccgacctcgcggtgtggatcttctacccgttcaacgggccggcgcgcgccaaggtcggcctcatcccgtcgatcccgctcggcgagatcggcgagcacgtcggcgactgggagcacgtgacgctgcgcgtcagcaacttctccggcgagctcctccggatgtacttctcgcagcacagcgcgggcacctgggtggacgcgtcgcggctggagtacctcgacggcggggacggcggcgggagcaggccggtggcatacgcgtcgctgcacgggcacgcgttctacccgaacgcggggacggtgctgcaggggaactcgggcctgggcatcgggatccggaacgactgcgccagagggagcaggctggacaccggcgcggggcggtgcgaggtggtgtcggcggagtacctcggcgtcaaggagccggcgtggctcgggttcgagcgcgagtggggcccgcgggatgagtacgacatcgggcgcgagatcaaccgcgccgctaggctcttgccacgttcggtgagggagcggctagccaagctggtggagaaggtgctcgtcggggagggcccgacggggcccaagatgcatggtaactggagaaacgacgagagggaagcctgataaaggcttcgtatccttaactgtacgattcgtgaggtatatacggatcagacggtttgcgattgaaaggatagcgtgctcattagaggagctaaaaggattggttgtgtcattgtgtgtgtgcgtgcctgcgtggcagtgtatttccatctcagctgtatgtaggcaacgactgctatgcaagcagtccttctgtgcaagcgtgcaagcaaatcatctcatccattagatcatgatccaaccgtaggtcatatttaacacttaaaccctttcaccaccagctcaataatctttataaaaaaaatcctaacaaaccatggttgtatctatggttggatcgtaatctaattgataaaatggtttgtttgcacgcttgcacagaaggactatttgcataacagtcgttgccgctgtatgtattcgataatgtgtagcattgtttggtttgctgtttactgctttgtatgcgttgcggaatctcccgcccctaccgatgcttaactaagtacctacaaatgtattttccaaattcatatccttaaccgtacgattcgtgaggtatatacggatcagacggtttgcgattgaaaggatagcgtgctcattagaggaggaggtaaaaggattggttgtgtcattgtgtgtgcgtgcctgcgtggcagtgtatttccatctcagctgtatgtattcgataatgtgtagcattgtttggtttgctgttcactgctttatatgcc

SEQ ID NO: 66990 - DNA, 2128 bp, Zea Mays
gaagactggaacctgcacactgcacactgcacaccgcccaacctcacactagctaccgcctaccgctggcgctaccacgccgccagtccagtccaacgatcaaaagctcccgtctctcctgcttactacacctttcccaccttttttccctgttaaaaaatatccgccgcgtcccctccaggcctccagggaactatcggatctcgctgagctcgtcaatcaccgcatttctttactaatcgccccttctcgaagagattaatctttagaagcgcttaaccatgaagtgttttgagttgagcttccaagaaacagagggaagctagagagcctcgaaaggatcctcggattctctacgggctgccatgggagaggggagatagcttcccttttccaatcaccctctcactggagttgcggcagccgtccagtcttcagtcccccagtgtgtgctcctacccattgtcggcggcggccgccgccgcgcttttcttgagagtttctgagaagtgtcccagctcacagctaatcatatccttgggcacaagaatatgtcgtccaagagactacatggcgtgtttacccttcttatgctcatggttttcaatgtttcaggggcatttgttggtatcactattggcaatgacatgtcaaacataccaccagcaacagatatagtgtctatcctcaaagcaaaaaagattcagcatgttcgcctgcttgattcagaccatcaaatgttgaatgcccttgcaaatactggaatagaagtgatggttggggttccaaatgatcagctacttcgtgtgggccaatctcgttccacagctgctgattggattaataagaatgtcggtgcttacattccggcgactaacatcacatatattgctgtgggtaatgaggtccttactaccattcccaatgcagcacttgtactcgtacctgcactgcaattcctccagtcagcactgttggctgcgaacctcaatactcaagtgaaaatttcaagtcctcattcaatggatgtgatctcaaaggcctttccaccctctgctgcgactttcaatttgacatggagctcaataatgtctcaatatcttcagtttctcaagaatacgggatcttcgtttatgctgaatgcccaaccatactatggctatgtcggagggcaaggcgtatttcccttggagtatgcactattccgctcacttaatccgaacagtcaaatctcagatcctaacaccaatctcttttataccaatatgtttgatgctataattgatgctacctacaactcaattcaagcaatgaattttacgggcattcctgttttagtcacagcttctggttggccatggcgtggtgggccaagtgagaaggctgctactgttgataatgctttggcctataatacaaacctcatacatcatgtactgaacaattctggtactcccagccaaccgaataatcagccaagcacctacatctttgaacttttcaatgaggataatcggtcagggcctgtatcagagcaaaattgggggattatgtttcccaatgcaaccactatatattctctatcatttgaggacgtggccacagctattcctgaatcaccagctttgcgtggggtgttttgtgtggcaaattcaagtgcatcccatagtgcactgaagcatagtttggattgggcatgtggccctggttctgcaaactgcagtgcagttcaacctgggcaaccatgctatgcatcagatgatattgtagctgttgcttcttatgctttcaacgattattaccatagaacacagtctagtggtggtacatgcaacttcaatggcaccgcgatgataacatcgactgatccaattgctcttaatgtcaacgctaggtggcatttcaaaagataaaaatttagccctggtatgcttcatgggcccaagaccttttatccgcaagatttaacctaaccattagctgcagtaactgtttgatttgtgttttgcgttgactatacttctgtattgttatttaaggcgacaattctacacccttagctagcagcactcaatctataagcctaggggtggtaatgggctctaaattttacactataaaatttaag

SEQ ID NO: 66991 - DNA, 3694 bp, Zea Mays
cctaccgctggcgctaccacgccgccagtccagtccaacgatcaaaagctcccgtctctcctgcttactacacctttcccaccttttttccctgttaaaaaatatccgccgcgtcccctccaggcctccagggaactatcggatctcgctgagctcgtcaatcaccgcatttctttactaatcgccccttctcgaagagattaatctttagaagcgcttaaccatgaagtgttttgagttgagcttccaagaaacagagggaagctagagagcctcgaaaggatcctcggattctctacgggctgccatgggagaggggagatagcttcccttttccaatcaccctctcactggagttgcggcagccgtccagtcttcagtcccccagtgtgtgctcctacccattgtcggcggcggccgccgccgcggttcgtcctctcgctcctgctccgcagccacctagcgagttcctctgtgcgcgtatttggtaagagaggacgaatgaatgactcttctttgaggtcaacaatcaggtggcgatcttatttcctagttgattttgttcctttttcttgtactgttgcttatattacgacgccgctgtttgttgcgtccttttggagctttgtgatctttcctcttgtgactttctaccaactggcattttggctgacaaacgaaaaacgatagatagatgtggtgtccttaaagccttgctcgctgctctctcgagagtaaaaaaatcctaggtgttcttctgtcttcgctcttgttctctgatgcttctagttataagggcacttcataattctctgttattctgtccgtagtggttttgttagtgagatttaggattcactggatttcgatgtcatgaaatagcggcagtagaaattgggaatctttgatcccctggcattcgtgcaatttggaggtgccagactgccaagtgcctgctcattggttcactttctccatttattagctgccaagaaattttaacacgacgaattaccaattactgtaatgagcctgcaagattggataaaccacctcggaatgcctgcaagctgctgtggaagagtggagagagcttccccttttccattatccttccacagacaaaaaaatctattctccaattctccagttcgtccatacagttcacttctaaagtcatgtgcggccccgtggttcatcttctcccccgcggcccctcctcgctcctgctcggttgctctgcggcagtttctagtgctactccgtgtccgtctgtagcgagttcctctttagaaaggggtggcatttcagctaacaaacatatacgaagtgttcttgaaattctgcttgctgtttggtagaggggggaaatatctagctgttcatccttgttttacctgacgcttctagtttgaaggggatttcactgttctctgttattctggccatggccatttttattttttggctttattgaaattcaatggattgttcatgaacatgtggcactagaatttgggaaaattttgcctgtgattgtctgaattttagaggtgccttatcgattcaatttcttcatttattagcggcaaagggatgattttggctgacattttcagatacttgttacttcacgctgaagatcaggggaaatctctaagcttgttttctagtgtcataattaaagtgtgctctacaaaaatgtttgaatgtattgcctgcattcacactatcgatatgtttcttagctcaagtgttttggagagatacagtttactcataagttaaagagtttcctttgctctatatagtggtttctgcttttgtttattgaatgaaatagttaacccaactttgatattttcagcttttcttgagagtttctgagaagtgtcccagctcacagctaatcatatccttgggcacaagaatatgtcgtccaagagactacatggcgtgtttacccttcttatgctcatggttttcaatgtttcaggggcatttgttggtatcactattggcaatgacatgtcaaacataccaccagcaacagatatagtgtctatcctcaaagcaaaaaagattcagcatgttcgcctgcttgattcagaccatcaaatgttgaatgcccttgcaaatactggaatagaagtgatggttggggttccaaatgatcagctacttcgtgtgggccaatctcgttccacagctgctgattggattaataagaatgtcggtgcttacattccggcgactaacatcacatatattgctgtgggtaatgaggtccttactaccattcccaatgcagcacttgtactcgtacctgcactgcaattcctccagtcagcactgttggctgcgaacctcaatactcaagtgaaaatttcaagtcctcattcaatggatgtgatctcaaaggcctttccaccctctgctgcgactttcaatttgacatggagctcaataatgtctcaatatcttcagtttctcaagaatacgggatcttcgtttatgctgaatgcccaaccatactatggctatgtcggagggcaaggcgtatttcccttggagtatgcactattccgctcacttaatccgaacagtcaaatctcagatcctaacaccaatctcttttataccaatatgtttgatgctataattgatgctacctacaactcaattcaagcaatgaattttacgggcattcctgttttagtcacagcttctggttggccatggcgtggtgggccaagtgagaaggctgctactgttgataatgctttggcctataatacaaacctcatacatcatgtactgaacaattctggtactcccagccaaccgaataatcagccaagcacctacatctttgaacttttcaatgaggataatcggtcagggcctgtatcagagcaaaattgggggattatgtttcccaatgcaaccactatatattctctatcatttgaggacgtggccacagctattcctgaatcaccagctttgcgtggggtgttttgtgtggcaaattcaagtgcatcccatagtgcactgaagcatagtttggattgggcatgtggccctggttctgcaaactgcagtgcagttcaacctgggcaaccatgctatgcatcagatgatattgtagctgttgcttcttatgctttcaacgattattaccatagaacacagtctagtggtggtacatgcaacttcaatggcaccgcgatgataacatcgactgatccaagccatggttcatgcattttcagtggaagcgctggcgccaacggcagcaacggtggaacagcatccgggcctgtaagcccggacagttttgcttcaaaatcccagtcgtgctggctgactcacctagtagccacattgctgccaattctatttgtagtgatgtaaatcattgtaatcatgtcgcattttggatgagatgcccgcaatttatcgtggatcttgtcattagatacagtagtgactagcgagccatttgttctgctgtattcaggtagatgccatgtaaccttatcccagaatttcttgccctaggaatcagtacttcgtcaaatcatcaattttgaacgccaacttggaaaattgagctgtgacaagccgagaactctctgaaatattggaagttccaaatgatttgtactgcatagtatttagtttctcagct

SEQ ID NO: 66992 - DNA, 2275 bp, Zea Mays
gatcaaaagctcccgtctctcctgcttactacacctttcccaccttttttccctgttaaaaaatatccgccgcgtcccctccaggcctccagggaactatcggatctcgctgagctcgtcaatcaccgcatttctttactaatcgccccttctcgaagagattaatctttagaagcgcttaaccatgaagtgttttgagttgagcttccaagaaacagagggaagctagagagcctcgaaaggatcctcggattctctacgggctgccatgggagaggggagatagcttcccttttccaatcaccctctcactggagttgcggcagccgtccagtcttcagtcccccagtgtgtgctcctacccattgtcggcggcggccgccgccgcggttcgtcctctcgctcctgctccgcagccacctagcgagttcctctgtgcgcgtatttgcttttcttgagagtttctgagaagtgtcccagctcacagctaatcatatccttgggcacaagaatatgtcgtccaagagactacatggcgtgtttacccttcttatgctcatggttttcaatgtttcaggggcatttgttggtatcactattggcaatgacatgtcaaacataccaccagcaacagatatagtgtctatcctcaaagcaaaaaagattcagcatgttcgcctgcttgattcagaccatcaaatgttgaatgcccttgcaaatactggaatagaagtgatggttggggttccaaatgatcagctacttcgtgtgggccaatctcgttccacagctgctgattggattaataagaatgtcggtgcttacattccggcgactaacatcacatatattgctgtgggtaatgaggtccttactaccattcccaatgcagcacttgtactcgtacctgcactgcaattcctccagtcagcactgttggctgcgaacctcaatactcaagtgaaaatttcaagtcctcattcaatggatgtgatctcaaaggcctttccaccctctgctgcgactttcaatttgacatggagctcaataatgtctcaatatcttcagtttctcaagaatacgggatcttcgtttatgctgaatgcccaaccatactatggctatgtcggagggcaaggcgtatttcccttggagtatgcactattccgctcacttaatccgaacagtcaaatctcagatcctaacaccaatctcttttataccaatatgtttgatgctataattgatgctacctacaactcaattcaagcaatgaattttacgggcattcctgttttagtcacagcttctggttggccatggcgtggtgggccaagtgagaaggctgctactgttgataatgctttggcctataatacaaacctcatacatcatgtactgaacaattctggtactcccagccaaccgaataatcagccaagcacctacatctttgaacttttcaatgaggataatcggtcagggcctgtatcagagcaaaattgggggattatgtttcccaatgcaaccactatatattctctatcatttgaggacgtggccacagctattcctgaatcaccagctttgcgtggggtgttttgtgtggcaaattcaagtgcatcccatagtgcactgaagcatagtttggattgggcatgtggccctggttctgcaaactgcagtgcagttcaacctgggcaaccatgctatgcatcagatgatattgtagctgttgcttcttatgctttcaacgattattaccatagaacacagtctagtggtggtacatgcaacttcaatggcaccgcgatgataacatcgactgatccaagccatggttcatgcattttcagtggaagcgctggcgccaacggcagcaacggtggaacagcatccgggcctgtaagcccggacagttttgcttcaaaatcccagtcgtgctggctgactcacctagtagccacattgctgccaattctatttgtagtgatgtaaatcattgtaatcatgtcgcattttggatgagatgcccgcaatttatcgtggatcttgtcattagatacagtagtgactagcgagccatttgttctgctgtattcaggtagatgccatgtaaccttatcccagaatttcttgccctaggaatcagtacttcgtcaaatcatcaattttgaacgccaacttggaaaattgagctgtgacaagccgagaactctctgaaatattggaagttccaaatgatttgtactgcatagtatttagtttctcagct

SEQ ID NO: 66993 - DNA, 2070 bp, Zea Mays
gatcaaaagctcccgtctctcctgcttactacacctttcccaccttttttccctgttaaaaaatatccgccgcgtcccctccaggcctccagggaactatcggatctcgctgagctcgtcaatcaccgcatttctttactaatcgccccttctcgaagagattaatctttagaagcgcttaaccatgaagtgttttgagttgagcttccaagaaacagagggaagctagagagcctcgaaaggatcctcggattctctacgggctgccatgggagaggggagatagcttcccttttccaatcaccctctcactggagttgcggcagccgtccagtcttcagtcccccagtgtgtgctcctacccattgtcggcggcggccgccgccgcgcttttcttgagagtttctgagaagtgtcccagctcacagctaatcatatccttgggcacaagaatatgtcgtccaagagactacatggcgtgtttacccttcttatgctcatggttttcaatgtttcaggggcatttgttggtatcactattggcaatgacatgtcaaacataccaccagcaacagatatagtgtctatcctcaaagcaaaaaagattcagcatgttcgcctgcttgattcagaccatcaaatgttgaatgcccttgcaaatactggaatagaagtgatggttggggttccaaatgatcagctacttcgtgtgggccaatctcgttccacagctgctgattggattaataagaatgtcggtgcttacattccggcgactaacatcacatatattgctgtgggtaatgaggtccttactaccattcccaatgcagcacttgtactcgtacctgcactgcaattcctccagtcagcactgttggctgcgaacctcaatactcaagtgaaaatttcaagtcctcattcaatggatgtgatctcaaaggcctttccaccctctgctgcgactttcaatttgacatggagctcaataatgtctcaatatcttcagtttctcaagaatacgggatcttcgtttatgctgaatgcccaaccatactatggctatgtcggagggcaaggcgtatttcccttggatcacagcttctggttggccatggcgtggtgggccaagtgagaaggctgctactgttgataatgctttggcctataatacaaacctcatacatcatgtactgaacaattctggtactcccagccaaccgaataatcagccaagcacctacatctttgaacttttcaatgaggataatcggtcagggcctgtatcagagcaaaattgggggattatgtttcccaatgcaaccactatatattctctatcatttgaggacgtggccacagctattcctgaatcaccagctttgcgtggggtgttttgtgtggcaaattcaagtgcatcccatagtgcactgaagcatagtttggattgggcatgtggccctggttctgcaaactgcagtgcagttcaacctgggcaaccatgctatgcatcagatgatattgtagctgttgcttcttatgctttcaacgattattaccatagaacacagtctagtggtggtacatgcaacttcaatggcaccgcgatgataacatcgactgatccaagccatggttcatgcattttcagtggaagcgctggcgccaacggcagcaacggtggaacagcatccgggcctgtaagcccggacagttttgcttcaaaatcccagtcgtgctggctgactcacctagtagccacattgctgccaattctatttgtagtgatgtaaatcattgtaatcatgtcgcattttggatgagatgcccgcaatttatcgtggatcttgtcattagatacagtagtgactagcgagccatttgttctgctgtattcaggtagatgccatgtaaccttatcccagaatttcttgccctaggaatcagtacttcgtcaaatcatcaattttgaacgccaacttggaaaattgagctgtgacaagccgagaactctctgaaatattggaagttccaaatgatttgtactgcatagtatttagtttctcagct

SEQ ID NO: 66994 - DNA, 1966 bp, Zea Mays
cgtccttttggagctttgtgatctttcctcttgtgactttctaccaactggcattttggctgacaaacgaaaaacgatagatagatgtggtgtccttaaagccttgctcgctgctctctcgagagtaaaaaaatcctagcttttcttgagagtttctgagaagtgtcccagctcacagctaatcatatccttgggcacaagaatatgtcgtccaagagactacatggcgtgtttacccttcttatgctcatggttttcaatgtttcaggggcatttgttggtatcactattggcaatgacatgtcaaacataccaccagcaacagatatagtgtctatcctcaaagcaaaaaagattcagcatgttcgcctgcttgattcagaccatcaaatgttgaatgcccttgcaaatactggaatagaagtgatggttggggttccaaatgatcagctacttcgtgtgggccaatctcgttccacagctgctgattggattaataagaatgtcggtgcttacattccggcgactaacatcacatatattgctgtgggtaatgaggtccttactaccattcccaatgcagcacttgtactcgtacctgcactgcaattcctccagtcagcactgttggctgcgaacctcaatactcaagtgaaaatttcaagtcctcattcaatggatgtgatctcaaaggcctttccaccctctgctgcgactttcaatttgacatggagctcaataatgtctcaatatcttcagtttctcaagaatacgggatcttcgtttatgctgaatgcccaaccatactatggctatgtcggagggcaaggcgtatttcccttggagtatgcactattccgctcacttaatccgaacagtcaaatctcagatcctaacaccaatctcttttataccaatatgtttgatgctataattgatgctacctacaactcaattcaagcaatgaattttacgggcattcctgttttagtcacagcttctggttggccatggcgtggtgggccaagtgagaaggctgctactgttgataatgctttggcctataatacaaacctcatacatcatgtactgaacaattctggtactcccagccaaccgaataatcagccaagcacctacatctttgaacttttcaatgaggataatcggtcagggcctgtatcagagcaaaattgggggattatgtttcccaatgcaaccactatatattctctatcatttgaggacgtggccacagctattcctgaatcaccagctttgcgtggggtgttttgtgtggcaaattcaagtgcatcccatagtgcactgaagcatagtttggattgggcatgtggccctggttctgcaaactgcagtgcagttcaacctgggcaaccatgctatgcatcagatgatattgtagctgttgcttcttatgctttcaacgattattaccatagaacacagtctagtggtggtacatgcaacttcaatggcaccgcgatgataacatcgactgatccaagccatggttcatgcattttcagtggaagcgctggcgccaacggcagcaacggtggaacagcatccgggcctgtaagcccggacagttttgcttcaaaatcccagtcgtgctggctgactcacctagtagccacattgctgccaattctatttgtagtgatgtaaatcattgtaatcatgtcgcattttggatgagatgcccgcaatttatcgtggatcttgtcattagatacagtagtgactagcgagccatttgttctgctgtattcaggtagatgccatgtaaccttatcccagaatttcttgccctaggaatcagtacttcgtcaaatcatcaattttgaacgccaacttggaaaattgagctgtgacaagccgagaactctctgaaatattggaagttccaaatgatttgtactgcatagtatttagtttctcagct

SEQ ID NO: 66995 - DNA, 1189 bp, Zea Mays
gcaagcggtgagacaactccctcgggaggcagcgaggacctccttgacggcgcccctcgacggcgtaccggcggttccacctccatttggcggcgcgcggggggctgcacctcctttgggcggcgtgcgcgaacaagagccgcagcctctcccgcttgtctttgggagggaacgctggcaacctcatcttctttcgacgctagatttggacagtaaagtcccgcagtgacttgccagttgccactgccagagcggtcaccgaatctgaggtctgagcccagcgggccgcggcggctatgtcctcatcctcctccttccccaactcccgcttccccttcgcagccggcgccggggcctccggcggaagcgggagcagcgtgcggccgtggggttcgagcggcgggacatcggtgtcttcatctgggaaacggatacagaaggagctgctggacctcaacgcctccgactgctccgcggggcccaagggcgacaacctctaccactggctctccactatcatcgggccccaaggatcgccgtatgaaggagggatatttttccttgacatagtgtttcctcctgattatcccttcaaacctcccatggtaacattcaaaacgaggatttaccactgcaatattgattccactggtaaagtgcatttggacattctgaaggatggctggagtccagctttcactatttctaagactccccgcttatgatgagcatttcacgtcagtatctgactgatagagctaaacacgatgaaatagcagctgagtggacaatgagatttgcaagataggggatctatttgtatctaagcatggttgacattgtaaaaaaacaactcttaatgtggcctgagatggtgaatgttggcaacggagccatgtttggtttggtgtgacgtgacataaatgtgtactttatgcttgagtattatttaactgctccttttaggtgaagaataatcttttagattttgtacttatgccaagttgtacaagcatctattcagaacctgctatctgagtttatttcttgaaatgatttctattgaaactggcatcaggtcctggttgatgatgtcagtttcatatactgaaaggaaataacataaatcagggaatgtttagaaaccaacaacctttagcgttacagctatagaaatgttcgattagtt

SEQ ID NO: 66996 - DNA, 2692 bp, Zea Mays
gcaagcggtgagacaactccctcgggaggcagcgaggacctccttgacggcgcccctcgacggcgtaccggcggttccacctccatttggcggcgcgcggggggctgcacctcctttgggcggcgtgcgcgaacaagagccgcagcctctcccgcttgtctttgggagggaacgctggcaacctcatcttctttcgacgctagatttggacagtaaagtcccgcagtgacttgccagttgccactgccagagcggtcaccgaatctgagccggcgccggggcctccggcggaagcgggagcagcgtgcggccgtggggttcgagcggcgggacatcggtgtcttcatctgggaaacggatacagaaggagctgctggacctcaacgcctccgactgctccgcggggcccaagggcgacaacctctaccactggctctccactatcatcgggccccaaggatcgccgtatgaaggagggatatttttccttgacatagtgtttcctcctgattatcccttcaaacctcccatggtaacattcaaaacgaggatttaccactgcaatattgattccactggtaaagtgcatttggacattctgaaggatggctggagtccagctttcactatttctaaggtgttattggccatcaaagacatcatcagcaatccagatccatactccccgcttatgatgagcatttcacgtcagtatctgactgatagagctaaacacgatgaaatagcagctgagtggacaatgagatttgcaagataggggatctatttgtatctaagcatggttgacattgtaaaaaaacaactcttaatgtggcctgagatggtgaatgttggcaacggagccatgtttggtttggtgtgacgtgacataaatgtgtactttatgcttgagtattatttaactgctccttttaggtgaagaataatcttttagattttgtacttatgccaagttgtacaagcatctattcagaacctgctatctgagtttatttcttgaaatgatttctattgaaactggcatcaggtcctggttgatgatgtcagtttcatatactgaaaggaaataacataaatcagggaatgtttagaaaccaacaacctttagcgttacagctatagaaatgttcgattagttttctacagtcaaagtatgtaaagcatgacattcatatctttcgcttgaaaccaaatcctgcgggttatcattcgggtgttgttgttggacaaggcttcagttacacaggggtgatagagctgccacgacaggcactctgatcttacaaatgaccaaactggacttcacctctgaagttgacggctcactagttcactgattcccagtacggactgctgagttgatcacatctggggaccttataactccacccagagaagatgcaaaatccacaccttacttctggtgcactggtggtcttctcagaccatagacaatggccaccgaactagatgtgagcaagtctcgccgcttcgacattgccatgtcgaggcgaacccggcgatcgacaagcctggtagcctgctttcaagatcagtatacaccatccctggcacagcatcgccaccaagagctgaaggcgtttctgcaatgccaggatgaagagctgaaggcactccagcgatgcgaggatgcagagcacaagacactgtgtttgaatgaagacgaggagctgaagattccacaagtaccaatgcagtatgaagatgacaagcaagagacgccagagcaatatgaagatgggcaggagaaggagtcgcagcaatatccagaccaagagcaggagataccagattcatgtcaagacgatgagaagacaccgaaccagtatctagacgaagggaagatgctagagcagtatcaagatgaagatgatgagctgccatcacaataccaagaccatgagctggtgacacagaagctacctgaggaagatgaggggactgcatcagagcgattccaagacgaggagaggaaggaacttcatcagcaccaagaggcagatgagcagacgtcacagtctgaggacgaggaggagcccaagtctcagcaggaacgccatgacgtcgagcagaaggcaccgaagcaattccaagtcttgaagaaggtagccgcgccaccacgtcctgtggagaacgtgccccggttctccctccaggagcttatacggcagaagcagcagcttccaaccggcgaggcgatggctaccagcaaggtaggcggccgtggggagagtgtcctcgctgaccatatggtttcaggagcaggtgcagcagccgcagagggcacggcactggcgatggtgataaagcgacccgagggagggaagaagcccatgggcatgatacgccggtgcgtcaaggccctgaaccagatgatcaaggccaagcacgggtccaagaagaacctgcatttctagtgttcaacagagtttcttagtagattgcacatctctgaataatgcacgcgcagttggggagaaccacaattttgggcatggtgcagggtgtgaaagatctggcgagaaactttttacgctctggtctatactgtcttcctatagcaataaactgtggaacttttaatagctgaagatcacaaatctgctactcctatgcgagaagatggtctactcagtgatgctctacgcga

SEQ ID NO: 66997 - DNA, 1373 bp, Zea Mays
accctccacgtcagcgcgatccggcgcgccagagccaaacgagcagattctcccgcgccgcgtggcacgaggcggccgcgcccgctatcccctcgcggataaagccggacccactccggcgcgcgcgcaccacgagatccccacacagctcccacgctcaccgacgccacagcttgtgcgcgcgcaatggcactcgtgtccgcctcctcgtcctccaccaccgccgtcgcggcgctccccaggaatgggcagcagcgggcgtcgtcgtcgttgttctcctcctcctcctcttcctccttcctcgtcggcaagacgctgctgaggcaggccgaggcagcccggccgtcgttcgccgtgcgcgccgcggcggattccgacaggccgatctggttccccggcagcacccctccgccgtggctcgacggcagccttcccggcgacttcggctttgatccctggggcctcggatctgacccggagagcctgcggtggaacgtgcaggcggagctggtgcactgccggtgggcgatgctcggcgcggcgggtatcttcatcccggagttcctgaccaagatcggcgtcctcaacacgcccttctggtacaccgccggcgagcagcagtacttcaccgacaccaccaccctcttcatcatcaagcccggaagcgtcaacaccgatcccatcttccccagcaacaagctcaccggcaccgacgtcgggtaccctggtggcctgtggtttgacccgctcggctggggctccggctcgccggagaagatcaaggagctgcgcaccaaggagatcaagaacggacgcctcgccatgctcgccgtcatgggcgcttggttccaggccgagtacaccggcaccggccccatcgacaacctcttcgcccacctcgccgaccctggccacgccaccatcttccaggccttcacccccaaatgaggagctctgatgaacttggcagttcgaggagtgctaccacacatgcatgcattgttaggtttgatggccgatatggaactttttctttttgttgggggcggactactgggtagactgtcaacgatgatgatgatgatgatgaaatgttcgtggtgcgatgcatggtgtacttgtactatgttgtaactaatgtaaaaatgcgatggtcgttagatgctatgtcctcttaattaaggcggacctacatgcaagtaaggatgcaaataagggtattcagtatttaattgaatactcattattttttgcaaaaaaatatgtatacatgtatatgttactagccagttgttcatactttgctaccattgttatatatcatataaataggtattgaaatatttgtttaaatataattattgtttatttct

SEQ ID NO: 66998 - DNA, 646 bp, Zea Mays
ctccatctcagcgtcgtcgccagaaacgcttcgccgccgattcgcctgggtccataaaaggcttggctctcccatccgtcgtcgcccccatcgcgttgtccctagagaggaagcaaaggcacatgaccgccgtcttcgggtgggacaacgagtccgtcctcctcgatgcgatggtcgttgaggccaccctcatctgtgagtcccatcgcaagaggcgggcctccacctgctccaacgatgacggcatcggatccaacaccaaatatggagatacggttgacagcctgcagcagggctcctctcttccacgctgcgaaggtgtacttagcaatggtgcaaatcatgcccatccacgagatcttggcctcaacgccgattgagaagatgacgttgcaaatatttcagacttgtagagccctcgagcacctccatctcttgttcagttgcttatattagtcatctgttccctatgtttaaatttgatagtagattgaggcaacatataaacttcaggtcaagataagaagagacaaaggaagaacagtcaaatgagaaaccttttcagtcagtatagaatgacatcttttttctttcagttcaggttcagagacacatgcataccaccaaggagccaccttcctccaat

SEQ ID NO: 66999 - DNA, 2059 bp, Zea Mays
cttgcctgcctgtcctccaagctcaagcgacgtttttggtgttaattctgtaatcttgtcaacttcagttaatggttaatatgagggacattgagacatcaaacgacggacaattggacgagcccttagggcgagtgtccataatctcttatggttctgggcatatgctcaatgacatcacatcaagttgttggtttacctatttgctggtgttcttgacggatgtgggactcagtccaggcgatgctgctattgtcatgctttctggacaattggcggatggcttcacaacaatctttgttggggaattgatggatcgctttgggcatttcaaactgtggcatgcaggaggatctattttagtggcaatttccttctcgtctgtttttggtagctgtgttccttgcaaacttatgggaactaattcatctactttggagactgttggatacagcacatttgccactatttttaatgttggttgggcagttactcaagtcgctcatatgtctatggtaaactgcatgtcatcaaatccaactagccgggtttcacttgtaagctgtcgtaatgccttcacgatggttgcaaatcttagcctgtatggcattgctttgttgatatttactatattgcagtcagtgaacgtaatgtttcagtatcgttggattgcttatgtgtccatttccattggatcttgctttgttgtcatcttcttggttggaaccaaagagccaggatcaattcggcactgtgtagataagagtctttccagaatttcatggacctactggttcaagaaagtattgtactaccaagttgctctagtctatactctgactagactggtgactaatgtttcacaggcatttcttgctttctatgtaatcaatgatttagaaatgagtcaatcctccaaagcattggtacctgctattatctacatctgcagtttgatagtatctgtaatattacaggagactagatggtcaagttggcgtcttaagctttacttttcagctggagcagtgctttggatattgtcaggtcttggaattgtttttctaccgagcagaatgcacaacctcatgtatgctatttcaatcataataggagctgcgaatgcacttatgacagtgacaagtattagcatggaaggtgttttagtaggagaagatctaaatggttgtgcttttgtgtatggctcattaagttttgttgacaaagtttcatgtggagtagttctgtatattcttgagtcctatcaaggaagtacagagatcagatcaaatttaggaacagcatttggctattcaattacaagacttggcttgggcttagttccagctgtctgttcgctgctttcatcaatagtggcttataccatggacctccctgaccctgatactcggcggagacctttggtggagccccttctagtataacttcactggtgacctgttacagtttcatcctgaacatttacattaattgctcgatagaatgacactgctgctggagcctgaagatactactgacattataggcaaaggagcaatcgggtacctctggtcaattctctttgacttcatatgtatagtctgaataaattgtggtggaaaacatgtactcagaaacgttgagtagggattagaatttataagtagcataggggcaagaagattagtattgatcatactgcgcttacgagccattctgcaatccaatgtaaatataacttaagcttcattgttcagtacaacgcattgcctgtacggtactacctccattctcaaatatttactacctccattctcaaattagtaaaatgcaatagagaagcatgtagatactttcagttttcaagcaactaatgcaaaaccagagaaacattaccagctctaggcaataaaaaccatggatttaggtgatcattgtaaatttaatgctgatgctttattagatctgacccaaaaagtacaaatgaagatgatgatcaaaatgacaactcttcaaatatgctaatatttgccggtgtacaccaaggaattcaaaagag

SEQ ID NO: 67000 - DNA, 2423 bp, Zea Mays
cgacgtttttggtatgttttttgtcgccgtcaccccgtgccggggccggggccggggctgcctgggcaccggtcggtaggcagatcggggtgacggccgtgacgtgacgcgcgccgccccgccacctcaagtcggcgattgtaaattctgaaaaaaatgcttggcctcccacccgagcgggctccgctcggacctcggagcacccaccacatcactgtacttttttatatttctcctccacgattgcgttgcgtccccgccgctgctccctccgcgctccgctcttcctcccgtcctccgctgcacccctaccttgcctgcctgcctgccctccaagcgacgttccttgtgtccccgactccccgtcgccttcctcgggctgggtcccgactcccgagatatagttgcggcggggtttccttcttcgaaaaagttctgaactagaggagccgcgcggcgcgggcgggcagaaaaccggagaccctcgccggcgcaggtgttaattctgtaatcttgtcaacttcagttaatggttaatatgagggacattgagacatcaaacgacggacaattggacgagcccttagggcgagtgtccataatctcttatggttctgggcatatgctcaatgacatcacatcaagttgttggtttacctatttgctggtgttcttgacggatgtgggactcagtccaggcgatgctgctattgtcatgctttctggacaattggcggatggcttcacaacaatctttgttggggaattgatggatcgctttgggcatttcaaactgtggcatgcaggaggatctattttagtggcaatttccttctcgtctgtttttggtagctgtgttccttgcaaacttatgggaactaattcatctactttggagactgttggatacagcacatttgccactatttttaatgttggttgggcagttactcaagtcgctcatatgtctatggtaaactgcatgtcatcaaatccaactagccgggtttcacttgtaagctgtcgtaatgccttcacgatggttgcaaatcttagcctgtatggcattgctttgttgatatttactatattgcagtcagtgaacgtaatgtttcagtatcgttggattgcttatgtgtccatttccattggatcttgctttgttgtcatcttcttggttggaaccaaagagccaggatcaattcggcactgtgtagataagagtctttccagaatttcatggacctactggttcaagaaagtattgtactaccaagttgctctagtctatactctgactagactggtgactaatgtttcacaggcatttcttgctttctatgtaatcaatgatttagaaatgagtcaatcctccaaagcattgctggagcagtgctttggatattgtcaggtcttggaattgtttttctaccgagcagaatgcacaacctcatgtatgctatttcaatcataataggagctgcgaatgcacttatgacagtgacaagtattagcatggaaggtgttttagtaggagaagatctaaatggttgtgcttttgtgtatggctcattaagttttgttgacaaagtttcatgtggagtagttctgtatattcttgagtcctatcaaggaagtacagagatcagatcaaatttaggaacagcatttggctattcaattacaagacttggcttgggcttagttccagctgtctgttcgctgctttcatcaatagtggcttataccatggacctccctgaccctgatactcggcggagacctttggtggagccccttctagtataacttcactggtgacctgttacagtttcatcctgaacatttacattaattgctcgatagaatgacactgctgctggagcctgaagatactactgacattataggcaaaggagcaatcgggtacctctggtcaattctctttgacttcatatgtatagtctgaataaattgtggtggaaaacatgtactcagaaacgttgagtagggattagaatttataagtagcataggggcaagaagattagtattgatcatactgcgcttacgagccattctgcaatccaatgtaaatataacttaagcttcattgttcagtacaacgcattgcctgtacggtactacctccattctcaaatatttactacctccattctcaaattagtaaaatgcaatagagaagcatgtagatactttcagttttcaagcaactaatgcaaaaccagagaaacattaccagctctaggcaataaaaaccatggatttaggtgatcattgtaaatttaatgctgatgctttattagatctgacccaaaaagtacaaatgaagatgatgatcaaaatgacaactcttcaaatatgctaatatttgccggtgtacaccaaggaattcaaaagag

SEQ ID NO: 67001 - DNA, 2310 bp, Zea Mays
cgacgtttttggtatgttttttgtcgccgtcaccccgtgccggggccggggccggggctgcctgggcaccggtcggtaggcagatcggggtgacggccgtgacgtgacgcgcgccgccccgccacctcaagtcggcgattgtaaattctgaaaaaaatgcttggcctcccacccgagcgggctccgctcggacctcggagcacccaccacatcactgtacttttttatatttctcctccacgattgcgttgcgtccccgccgctgctccctccgcgctccgctcttcctcccgtcctccgctgcacccctaccttgcctgcctgcctgccctccaagcgacgttccttgtgtccccgactccccgtcgccttcctcgggctgggtcccgactcccgagatatagttgcggcggggtttccttcttcgaaaaagttctgaactagaggagccgcgcggcgcgggcgggcagaaaaccggagaccctcgccggcgcaggtgttaattctgtaatcttgtcaacttcagttaatggttaatatgagggacattgagacatcaaacgacggacaattggacgagcccttagggcgagtgtccataatctcttatggttctgggcatatgctcaatgacatcacatcaagttgttggtttacctatttgctggtgttcttgacggatgtgggactcagtccaggcgatgctgctattgtcatgctttctggacaattggcggatggcttcacaacaatctttgttggggaattgatggatcgctttgggcatttcaaactgtggcatgcaggaggatctattttagtggcaatttccttctcgtctgtttttggtagctgtgttccttgcaaacttatgggaactaattcatctactttggagactgttggatacagcacatttgccactatttttaatgttggttgggcagttactcaagtcgctcatatgtctatggtaaactgcatgtcatcaaatccaactagccgggtttcacttgtaagctgtcgtaatgccttcacgatggttgcaaatcttagcctgtatggcattgctttgttgatatttactatattgcagtcagtgaacgtaatgtttcaggcatttcttgctttctatgtaatcaatgatttagaaatgagtcaatcctccaaagcattggtacctgctattatctacatctgcagtttgatagtatctgtaatattacaggagactagatggtcaagttggcgtcttaagctttacttttcagctggagcagtgctttggatattgtcaggtcttggaattgtttttctaccgagcagaatgcacaacctcatgtatgctatttcaatcataataggagctgcgaatgcacttatgacagtgacaagtattagcatggaaggtgttttagtaggagaagatctaaatggttgtgcttttgtgtatggctcattaagttttgttgacaaagtttcatgtggagtagttctgtatattcttgagtcctatcaaggaagtacagagatcagatcaaatttaggaacagcatttggctattcaattacaagacttggcttgggcttagttccagctgtctgttcgctgctttcatcaatagtggcttataccatggacctccctgaccctgatactcggcggagacctttggtggagccccttctagtataacttcactggtgacctgttacagtttcatcctgaacatttacattaattgctcgatagaatgacactgctgctggagcctgaagatactactgacattataggcaaaggagcaatcgggtacctctggtcaattctctttgacttcatatgtatagtctgaataaattgtggtggaaaacatgtactcagaaacgttgagtagggattagaatttataagtagcataggggcaagaagattagtattgatcatactgcgcttacgagccattctgcaatccaatgtaaatataacttaagcttcattgttcagtacaacgcattgcctgtacggtactacctccattctcaaatatttactacctccattctcaaattagtaaaatgcaatagagaagcatgtagatactttcagttttcaagcaactaatgcaaaaccagagaaacattaccagctctaggcaataaaaaccatggatttaggtgatcattgtaaatttaatgctgatgctttattagatctgacccaaaaagtacaaatgaagatgatgatcaaaatgacaactcttcaaatatgctaatatttgccggtgtacaccaaggaattcaaaagag

SEQ ID NO: 67002 - DNA, 2339 bp, Zea Mays
cgacgtttttggtatgttttttgtcgccgtcaccccgtgccggggccggggccggggctgcctgggcaccggtcggtaggcagatcggggtgacggccgtgacgtgacgcgcgccgccccgccacctcaagtcggcgattgtaaattctgaaaaaaatgcttggcctcccacccgagcgggctccgctcggacctcggagcacccaccacatcactgtacttttttatatttctcctccacgattgcgttgcgtccccgccgctgctccctccgcgctccgctcttcctcccgtcctccgctgcacccctaccttgcctgcctgcctgccctccaagcgacgttccttgtgtccccgactccccgtcgccttcctcgggctgggtcccgactcccgagatatagttgcggcggggtttccttcttcgaaaaagttctgaactagaggagccgcgcggcgcgggcgggcagaaaaccggagaccctcgccggcgcaggtgttaattctgtaatcttgtcaacttcagttaatggttaatatgagggacattgagacatcaaacgacggacaattggacgagcccttagggcgagtgtccataatctcttatggttctgggcatatgctcaatgacatcacatcaagttgttggtttacctatttgctggtgttcttgacggatgtgggactcagtccaggcgatgctgctattgtcatgctttctggacaattggcggatggcttcacaacaatctttgttggggaattgatggatcgctttgggcatttcaaactgtggcatgcaggaggatctattttagtggcaatttccttctcgtctgtttttggtagctgtgttccttgcaaacttatgggaactaattcatctactttggagactgttggatacagcacatttgccactatttttaatgttggttgggcagttactcaagtcgctcatatgtctatggtaaactgcatgtcatcaaatccaactagccgggtttcacttgtaagctgtcgtaatgccttcacgatggttgcaaatcttagcctgtatggcattgctttgttgatatttactatattgcagtcagtgaacgtaatgtttcagtatcgttggattgcttatgtgtccatttccattggatcttgctttgttgtcatcttcttggttggaaccaaagagccagggcatttcttgctttctatgtaatcaatgatttagaaatgagtcaatcctccaaagcattggagactagatggtcaagttggcgtcttaagctttacttttcagctggagcagtgctttggatattgtcaggtcttggaattgtttttctaccgagcagaatgcacaacctcatgtatgctatttcaatcataataggagctgcgaatgcacttatgacagtgacaagtattagcatggaaggtgttttagtaggagaagatctaaatggttgtgcttttgtgtatggctcattaagttttgttgacaaagtttcatgtggagtagttctgtatattcttgagtcctatcaaggaagtacagagatcagatcaaatttaggaacagcatttggctattcaattacaagacttggcttgggcttagttccagctgtctgttcgctgctttcatcaatagtggcttataccatggacctccctgaccctgatactcggcggagacctttggtggagccccttctagtataacttcactggtgacctgttacagtttcatcctgaacatttacattaattgctcgatagaatgacactgctgctggagcctgaagatactactgacattataggcaaaggagcaatcgggtacctctggtcaattctctttgacttcatatgtatagtctgaataaattgtggtggaaaacatgtactcagaaacgttgagtagggattagaatttataagtagcataggggcaagaagattagtattgatcatactgcgcttacgagccattctgcaatccaatgtaaatataacttaagcttcattgttcagtacaacgcattgcctgtacggtactacctccattctcaaatatttactacctccattctcaaattagtaaaatgcaatagagaagcatgtagatactttcagttttcaagcaactaatgcaaaaccagagaaacattaccagctctaggcaataaaaaccatggatttaggtgatcattgtaaatttaatgctgatgctttattagatctgacccaaaaagtacaaatgaagatgatgatcaaaatgacaactcttcaaatatgctaatatttgccggtgtacaccaaggaattcaaaagag

SEQ ID NO: 67003 - DNA, 2193 bp, Zea Mays
aaaggttacaccagaggaggctccataaagttctggaatgagtgggagggcggggcccgtaggtgctgggtaaatggtcatgtattcgatttgggcgatcgacttaaagcctggttgaccagctgaccttatgcagtggctttgtactttcccagtcgccaattcgccatcggtgttaattctgtaatcttgtcaacttcagttaatggttaatatgagggacattgagacatcaaacgacggacaattggacgagcccttagggcgagtgtccataatctcttatggttctgggcatatgctcaatgacatcacatcaagttgttggtttacctatttgctggtgttcttgacggatgtgggactcagtccaggcgatgctgctattgtcatgctttctggacaattggcggatggcttcacaacaatctttgttggggaattgatggatcgctttgggcatttcaaactgtggcatgcaggaggatctattttagtggcaatttccttctcgtctgtttttggtagctgtgttccttgcaaacttatgggaactaattcatctactttggagactgttggatacagcacatttgccactatttttaatgttggttgggcagttactcaagtcgctcatatgtctatggtaaactgcatgtcatcaaatccaactagccgggtttcacttgtaagctgtcgtaatgccttcacgatggttgcaaatcttagcctgtatggcattgctttgttgatatttactatattgcagtcagtgaacgtaatgtttcagtatcgttggattgcttatgtgtccatttccattggatcttgctttgttgtcatcttcttggttggaaccaaagagccaggatcaattcggcactgtgtagataagagtctttccagaatttcatggacctactggttcaagaaagtattgtactaccaagttgctctagtctatactctgactagactggtgactaatgtttcacaggcatttcttgctttctatgtaatcaatgatttagaaatgagtcaatcctccaaagcattggtacctgctattatctacatctgcagtttgatagtatctgtaatattacaggagactagatggtcaagttggcgtcttaagctttacttttcagctggagcagtgctttggatattgtcaggtcttggaattgtttttctaccgagcagaatgcacaacctcatgtatgctatttcaatcataataggagctgcgaatgcacttatgacagtgacaagtattagcatggaaggtgttttagtaggagaagatctaaatggttgtgcttttgtgtatggctcattaagttttgttgacaaagtttcatgtggagtagttctgtatattcttgagtcctatcaaggaagtacagagatcagatcaaatttaggaacagcatttggctattcaattacaagacttggcttgggcttagttccagctgtctgttcgctgctttcatcaatagtggcttataccatggacctccctgaccctgatactcggcggagacctttggtggagccccttctagtataacttcactggtgacctgttacagtttcatcctgaacatttacattaattgctcgatagaatgacactgctgctggagcctgaagatactactgacattataggcaaaggagcaatcgggtacctctggtcaattctctttgacttcatatgtatagtctgaataaattgtggtggaaaacatgtactcagaaacgttgagtagggattagaatttataagtagcataggggcaagaagattagtattgatcatactgcgcttacgagccattctgcaatccaatgtaaatataacttaagcttcattgttcagtacaacgcattgcctgtacggtactacctccattctcaaatatttactacctccattctcaaattagtaaaatgcaatagagaagcatgtagatactttcagttttcaagcaactaatgcaaaaccagagaaacattaccagctctaggcaataaaaaccatggatttaggtgatcattgtaaatttaatgctgatgctttattagatctgacccaaaaagtacaaatgaagatgatgatcaaaatgacaactcttcaaatatgctaatatttgccggtgtacaccaaggaattcaaaagag

SEQ ID NO: 67004 - DNA, 2279 bp, Zea Mays
atgtattcgatttgggcgatcgacttaaagcctggttgaccagctgaccttatgcagtggctttgtactttcccagtcgccaattcgccatcggtgttaattctgtaatcttgtcaacttcagttaatggttaatatgagggacattgagacatcaaacgacggacaattggacgagcccttagggcgagtgtccataatctcttatggttctgggcatatgctcaatgacatcacatcaagttgttggtttacctatttgctggtgttcttgacggatgtgggactcagtccagggttttgagtaatattgagatgctgacagattggaagtaaaagcttcaggattatttcagacgctttactttataattcacctttgcagcgatgctgctattgtcatgctttctggacaattggcggatggcttcacaacaatctttgttggggaattgatggatcgctttgggcatttcaaactgtggcatgcaggaggatctattttagtggcaatttccttctcgtctgtttttggtagctgtgttccttgcaaacttatgggaactaattcatctactttggagactgttggatacagcacatttgccactatttttaatgttggttgggcagttactcaagtcgctcatatgtaatggcttttctttctctacttctctccatgcttttctatggtttcagcattacatttatggatatcttttatatgctcctaaggtctatggtaaactgcatgtcatcaaatccaactagccgggtttcacttgtaagctgtcgtaatgccttcacgatggttgcaaatcttagcctgtatggcattgctttgttgatatttactatattgcagtcagtgaacgtaatgtttcagtatcgttggattgcttatgtgtccatttccattggatcttgctttgttgtcatcttcttggttggaaccaaagagccaggatcaattcggcactgtgtagataagagtctttccagaatttcatggacctactggttcaagaaagtattgtactaccaagttgctctagtctatactctgactagactggtgactaatgtttcacaggcatttcttgctttctatgtaatcaatgatttagaaatgagtcaatcctccaaagcattggtacctgctattatctacatctgcagtttgatagtatctgtaatattacaggagactagatggtcaagttggcgtcttaagctttacttttcagctggagcagtgctttggatattgtcaggtcttggaattgtttttctaccgagcagaatgcacaacctcatgtatgctatttcaatcataataggagctgcgaatgcacttatgacagtgacaagtattagcatggaaggtgttttagtaggagaagatctaaatggttgtgcttttgtgtatggctcattaagttttgttgacaaagtttcatgtggagtagttctgtatattcttgagtcctatcaagagatcagatcaaatttaggaacagcatttggctattcaattacaagacttggcttgggcttagttccagctgtctgttcgctgctttcatcaatagtggcttataccatggacctccctgaccctgatactcggcggagacctttggtggagccccttctagtataacttcactggtgacctgttacagtttcatcctgaacatttacattaattgctcgatagaatgacactgctgctggagcctgaagatactactgacattataggcaaaggagcaatcgggtacctctggtcaattctctttgacttcatatgtatagtctgaataaattgtggtggaaaacatgtactcagaaacgttgagtagggattagaatttataagtagcataggggcaagaagattagtattgatcatactgcgcttacgagccattctgcaatccaatgtaaatataacttaagcttcattgttcagtacaacgcattgcctgtacggtactacctccattctcaaatatttactacctccattctcaaattagtaaaatgcaatagagaagcatgtagatactttcagttttcaagcaactaatgcaaaaccagagaaacattaccagctctaggcaataaaaaccatggatttaggtgatcattgtaaatttaatgctgatgctttattagatctgacccaaaaagtacaaatgaagatgatgatcaaaatgacaactcttcaaatatgctaatatttgccggtgtacaccaaggaattcaaaagag

SEQ ID NO: 67005 - DNA, 3141 bp, Zea Mays
ttttttttgaagaggaaaaaaagcagaacagagagagagagagagagagagagagaggtgggaagggaaaaggaaaaggaaaagaaaaaaaagaaatccaccgcccgctgcgccgccgcgcgctgcacacacggtcctccctccctccgagcgctgccggattcagcgaagcaggccagtggctgggacggaggaacgcgagatagatcgagcgccggcgatgccgccaccgcacccgacggacgcggaggcggggcccgagcaggtggcgccgacggaggcggtgcccttggcggctgcggcgccggcgccggtcaagaagaagcggaaccttcccgggacgccagatccggacgccgaggtgatcgcgctctcgccggggacgctgctggccacgaaccgcttcgtgtgcgaggtgtgcggcaagggcttccagcgggaccagaacctgcagctgcaccgccgcggccacaacctgccctggcgcctgcggcagcgcgggcccggcgcggccccgccgcgccgccgggtgtacgtgtgccccgagcccggctgcgtgcaccactccccgacccgagccctcggggacctcaccgggatcaagaagcacttctgccgcaagcacggggagaagcgctgggcgtgcccgcgctgcggcaagcgatacgccgtgcaggccgacctcaaggcgcacgccaagacctgcggcacccgcgagtacagatgcgactgcggcacgctcttcaccagacgggacagcttcgtgacgcatcgcgccttctgcggcgctctcggggaggagaccggcagggcactggcgccaccggcgccgccatcccctcggccgcctgatttggaggctgaggagaacgttgacaacgacaaggaggaggaggagaatgaggattctgcattggccgaggtggaggtgcctcagcgtgtggaggtggcggtgccagaggagccagagccagagccacagcgcattccatctccaccgccattgccacaggagccaccgtgccgtccgtctccacctccattgccgcaggagcaaccgcgccgggtgtccccgcctccgttgccaaaggagccaccgtgccaccatccgactccacctccactgccaaaggagccacagcggcttccgtttcctccggagcagcaggcagttgtggcattggtgccaaatgtggatgagccagaggtggctgctgtgggaactgtggctgccaaattagaggatgaaaccgatcaagatgagactacctgtttccaggaagctgatcaatacaaggatgccgagctcgaggtctccaatctgctggacaaggacaccccgatgcttccttgcttcctcccctcgccctcagaagccattggcaccgatggaagcagcacaacctgcggcgcgggcggcagcgtttccaattccatcgtgccatctacaaccaccaacaccttcgccggtctgttcgcgtccgccacaacgagcaccacttcccagagcagatctctgcgcgacctcatcggtgtggatcccaccttcctttgccttgcgatcggagcgccctctctgttcccgcagacaagcgcaagcaactcaggcaccttcgctccgcccccggcgccacacatgtccgcgacagcgctcctgcagaaggcaacagaggctggagcgacgcaatcgagctcatcgttcttgaaggagtttgggctcgcttcttcgtcatcatcacctcgaccaaagcagcagcaaccccatggaagggttgctgaaaccagcacggacccatggcagtacaggaacagtaatcagcaaatggagatggagcgccaccagagccatcaacggagggagatggagtccagttcgcaaccgtggcagcacccccgcattacccagcagatggagatggagcgccaccaccagcggagtcatcaacagagggagatggagtccagttcgcaaccgtggcagcacccccgcagtacccagcagatggagatggagcgccaccaccagcggagtcatcaacagagggagatggagtccagttcgcaaccgtggcagcacccccgcagtacccagcagatggagatggagcgccaccaccagcggaaccatcggcaaagggagacggagtccagctcgcaacaatggcaccaccaccaccaccacccgaatgaccagatgatggggctggagagctaccggagtaaccagcaaatggagatggatcccagttcgcagcaacggtgggcgcagcaccagaggagcaaccagcagcagcagatggagatgatggagcggcaccacctgagtaaccagcaaatccggagtacccagcaaatggagaggagggcgatggtatccgggggtggtctgggccttggcctcgcatacgaaagtggaaacccaggcttgcccttgcccgacctgatgacgggaccatcgccactgttgggtcctaagcctgcgacgctggacttccttgggctcggcatcggagggaccatgggcggctccacggccagccgcggcctcccggcattgatggttggaagagagctggacatggggccttcggcacaggtgcctcctgctgctgctgcggcgccgtgggaggacgcaaagaggaagaccaacggccgcacgatcctgtgactgtgaggttttctcccccccttttttctctctctgtaatgcctcggcttgcctgcccattctttcagtcgcagctgtgcttttggtggagctagtagaagaagctcggtcggtaacatgcggacctgtacatagctagctcgatgcatctcatcccggttctggaaaaaaaaaactccgcccccgaattgaagctgttattattatagccacaattcgatcccggcaggatggaacctgacctccgatgccccgtcgctttcagatccggtgaggcaacagggttagtagccgtcgtcgtgtgcggtggtaactcggtactgctttcggaaagatccgagattaggacagcgatggaaaggcgttttcactgttactgtcgatgccgctgctaggtcggcacgggttactttactttacctaacctgccgccggtctgcaagcttcatcgggagtactttggagaagctata

SEQ ID NO: 67006 - DNA, 1730 bp, Zea Mays
gctaggtctttctaaggtccactgacaaaaccctggctcgttccccgctctacgggcctaaacctcacctcgccggcggccaaaaatcgaagcaccgaaccagcggctgcggcggcggcggtgcggcaagtgttgaccatggcggagctaaagcggttgtcggagagccgtgacctgacgcggattgagcgcatcggcgcgcactcccacatccgggggctagggttggactcgtccatggaggcgcgcgatacctcggagggcatggtcgggcagctccacgcgcgccgcgcctcggggctcatactccagctcatccgccagggcaagatcgccggccgcgctgtgctccttgcgggccagcccggcactggcaagaccgcgctcgccatgggtatcgccaagtcgcttggtgcggagacgcccttcgcctccgtcgctgcctcggagctcttctcgctcgacctctccaagacggaggcgctgacgcaggccttccgccgcgccataggcgtccgcatcaaggaggaggccgagatcattgagggcgaggtcgtggagatctcaatcgaccgccctttgtcggcctctggcgttggcggcagctcagttgctccttctggtgcaactgccgctggtaagtcaggggcggctcacgctgaagaccacggacatggagactgtgtacgagctcgggggaaagatgattgaggctcttgtgaaggagaaggtgcagagtggagatgtaattgcgcttgacatggcctccgggaaggtcaccaagcttggccgctccattgggaggtcgcgggattatgatgccgtaggtccacacaccaagtttgtcaagtgtcctgatggtgagctccagaagcgcaaggaggtcgtgcactgtgttaccttacatgagattgatgtcatcaatagcagaggttcgggagcagattgacacaaaagttgcagagtggagagaggaaggaaaagctgatattgtccctggtgttctgttcatcgatgaagtccacatgctagacatcgagtgcttctccttcctgaaccgcgcgttggaaaacgacatggcgccgatcttagtaatcgcaacgaaccgagggatcacgtctatccgcgggacaaactaccgctcgccgcatgggatcccgccagacttccttgaccggctactgattatcacgacgcatccctacacggaggatgagatccggaagatcctggatatccggtgcgacgaggaagacgtggagatgtccgcggacgccaaggttctgctcaccaagatcggtgtggagacctctctgcggtatgccatcaaccttatcacatctgccgcgctagcctgccagaggcgcaaggggaaggtggtcgagatggaggacattagccgggtgtaccagctgttcctggacgtgaagcgatcgacgcagtacctgatggagtaccagagccagtacatgttcaacgaagtgccggggcaagcagatggagaggacgccatgcaatcgtagatgaactttcctttacatggtgtgtgtgggttatagtatgtaccgcgtggcgtatatttatgatgcgtctttcttgttcaggttgctgttaccctgacccaaggcgcggtgtgtgcggtggactgtttgttagcttgatgtaggtgactatgcaactcaatctatcttattaaattcaccccggttggaaaccgtggtttgtttaga

SEQ ID NO: 67007 - DNA, 1229 bp, Zea Mays
ctcgagacccgcaccccagcttacttaacaccccagctggtgccttgccctgtggtcctcgctccttgatccactcctcctgcagctcctcctcgcacagcacgtctcctctccccagcctccctctctttctctgtccttggtcctctccccagcagcctccctctctctttctctatccctggtcctctccagataacctgacacagtggtcacgcttgacaaggagagagaaaggcgttgcagcagctgatccgcgcccgcccggccgggagcgcaggcgaaggatggaacaatacgacgggctctttcctcccgcctacgtggactcctcctcatccctcctcctggtgcccaacgccaacggtgcgcagtagtcgtacattctctttctcacagttgtgtagctgcactgcgcaggaggagagaccgagagcgcggcgcaggaggcgtcgagcagcgaggtgcggcggcggcggtggcgagctggacggaggaggggaccacaagaagcggcggctgaccgacgagcaggtagagatgctggagctgagcttccgggaggagcggaagctggagaccggccggaaggtgcacctgggcgccgagatcgggctcgacccccagcaggtcgccgtctgggtcccgaaacgccgcgccccgcccaagagaaagctgctcgaggaagaagtcggccagtacatatataatattgagcatgcctttcgtgggcacatgcccggctggaaggtgacgaggctgaaggacaagctggtgctcgccgaggaggagctgacacgattcagatccgcgggcaatgacgcggtctccggtgacggcggagacgtcatggcccgtgccgtctgcagcgggagcccgagctcatcgttctcgactggcacctgccagcagcccggaggaggcggcggcggcggcgatcacctgggggacgacgacctgctctatgttcctgactatgcctacgctgacagcagcgtggtcgagtggtttagcctgtatggactgatgtaatcgatggtatggtatgccatcgtcgtcggcagattaattctagctagctactcatcgtagcgtgtcattgctgtgctgaattgctgatttctatgtgcgccctcttaatcatatgtacataaatcaagctatcaattactggcaaaatatagccagctagcagcaactagtactttaattcagatgtgtgttcttac

SEQ ID NO: 67008 - DNA, 2252 bp, Zea Mays
accggtgatcctgccttctctgtctatatattgcgtccttgagatagtacacttcacagcgtccgttccctgccacagagaaacgaactctcttgagtaccacaaaaaaaaacattggcattctttgtagtagagcacagagcgaagccgtcaacgatggcttccgctccgctgccggcggccatcgagcccgggaagaaaggcaacgtcaagttcgccttcgcctgcgccatcctcgcctcaatgacctccatccttctcggctatgatatcggagtgatgagcggcgcgtcgttgtacatcaagaaggacctgaaaatcagcgacgtgaagctggagatcctgatgggcatcctcaacgtgtactcgctcatcggctcgttcgcggcagggcggacgtccgactggatcgggcgccgctacaccatcgtgttcgcggcggtgatcttcttcgcgggcgccttcctcatgggcttcgccgtgaactactggatgctcatgttcgggcgcttcgtggccgggatcggcgtgggctacgcgctcatgatcgcgcccgtgtacacggccgaggtgtcccccgcgtcggcccgcggcttcctgacgtcgttcccggaggtgttcatcaacttcggcatcctcctaggctacgtgtccaactacgccttctcccgcctcccgctccgcctgggctggcgcgtgatgctcggcatcggcgcggccccgtccgtggtgctcgccctcatggtgctcggcatgcccgagtcgccccggtggctcgtcatgaagggccgcctggcggacgccaaggtggtgctggggaagacctccgacacgccggaggaggccgcggagaggctcgctgacatcaaggccgccgccggcatcaccagcgacaaccagctcctgggaacgacctgcgcggtgggcgtcaccaagacgctcttcatcctggtggccacgttcctgctcgatagagtcggccggcggccgctcctcctgagcagcgtgggcggcatgatcttctcgctggtcgggctcgccgccgggctcaccgtcatcgggcactaccaggacgaaaagatcccatgggccatcggcgtggccatcgcgtctaccatggcctacgtggccttcttctccatcggcctcggccccatcacgtgggtgtacagctcggaggtattcccgctgcatgtgcgcgcgatgggctgcgcgctgggcgtggcctccaaccgcctgaccagcggcgtgatctccatgaccttcatctcgctgtccaaggccatcaccatcggcggcgccttcttcctctacgccggcgtcgcggtgctcgcgtgggtgttcttcttcaccttcctcccggagacccgcggccggacgctggaggcgatgagcaagctgttcggcgccaccgacgacgagctgaaaccccaggacggggccacgaaagacaagcagaagctcgaactggccgccaccggcaccaactaacttcacattattagagggtcttgttgagggtggtcgtgcgaagaacttgtgcagtaggcagctagctagctagctgccattgttgccatatgagctaagctaggctgaagcaacgtgggaagattcgctcgctggtccggcgcagctggagagcgacggccagcaagctcaggccggccagctcgtggctcttaaagttttttaaatcatgtctctaagttcgtggactgtatttcacactttgttttgcccgcaagttgttgatgaagtcgccgaggccgccaatggcaggtgcccaggttgctagtaacgacacgtcgtcctctaatgactatataatctgtgtagcagctggtgctgctgctgctgcctcgctgcacgagtcacggagagcgaggctggaagaaaactggtagtggttcgaggattctactgagggagtcaagcaagcaagccgtgaagagtgtgtaataaggaaacgttatctatcatccatatctatctaaggattgcgcggagattatttatccctgtcaaatggtaaccgttggttaacgcagcaagtttggtttaatcaactactcacgggactggaatctgaggtggttcacatcacatagagcttaataaacttcatgtgtaccttgtcagtgctccagtgtcgagaaacaagcgagagttcccaatgcaaagttggtcgaggaacctgctggattaccataccgacgggatgatctttcgaagtttagtaactaatactc

SEQ ID NO: 67009 - DNA, 1977 bp, Zea Mays
cccattactctcatctgcttcctctccttccctctcatcttaccggttcttctatctctaatacattctactgtaccctgatttgctagaatagtatacagagtgttcctctagctattggtttagaggtcgtgtattacgagttgttggtatcagactaattgcaatcctggtcgatctaccttctctgtggatgtggcgatgcaccgcgttctcgacgaactagcgcgcatggaggagcgcttgactgatgcgctggctgtccgttgcgactgtccgttgcgacgagcagccctcacgcggacgcactcccttctacttcaacgacgattcgggcggtgtctccgtcaatgcactcatcacctccaccgaccgtgacaccctgctccatttgaactaccgcgtcaccgaactcatcaccaccgacgtgtcaccaaactcatcgccgccgacgccggatacagctccgacagctccatccatggaggcagcagatctgtgctgtcctactcctactgcgaggtcgccaacgagaccctcactcccgacgcccagcagctggagccaactcaagcagcccatcggcatgtacaacacgacatgcaaggaagtcattgacgccaagcaacagaccaaggggatgtagtcgatgaagctggaggaggccaagcacaccggggaggctgctcgggcactggccgagacggacaaggccaagtgttgcgcgaccatggaggcagccgcggcgctgcagaagctggccgaccttgaggcgcagcggtgccgcaacgccgagttggcggtgcacgcagagggaggaggaggttctcgtcaccacgccaaccaagtgttcgagaatggacctcaaccgcggcgccaaggtgttggaggagctgcagcagatggagatgcgtctcaccggcgtcatcgaaggccaatgtggcctcctcaagcgcaacatcgacggccgctgcatcgccctcggcaagcacctcgaacagtggtacgaccacgacgaaccggtcttcgatgcatggcctatcttcgacgaggaacctgtcgacagtgccaccgctctcttgttcgacggtgctgaccactgcttcggcgaggagctcgacaccgaccaggcacggagttccactattgcgacaacaaccacgtcagagttgacgtcgacatcctccccacctccgagttcgacatcgagcagccgttcttccgcacctcctgcgtcgaggatgcgtatgcgcagccccaccaccaatttctcactaacgggctcatgccccagcactcgatggctccaccatggtgctatcgagcggcgacgtcgactaccacgccatcggctgcgtcgattactccaccaactccggggtgtgatccgtcggctgctaactgtgcagcagctacctcaaacataaaggagaaggtgcttgccaacacgcccaccaactgttcgatgttggtcctcaaccgtggcgcctaactccgtccccaaccctcctcaagctttgccggttggattcgcccgctccaccccgtctgctccggctccggtccctggcgccgccgcgagttcagccctcctgaaccgggcaccgttgcctcaccacgatgtttggtatctgcatgctgtgtaccaaaatggtaggagcgagcgttgaagcagcactggttgtactggactgcaagcactgggtgaaatggtggggcctcggtaacgagtttgatgaccagaggttgaagttggagttgtacacatatatcatggtcatggcgctctgctgggacttgtttggcgccggaacagagaccacatcggtcacaactgaatgggccccgtcgcttctgctgaaccacccggaggccctgaagaaggcacaggcagagatcgacgcggtggtgggcagctcacatctgatcaccaccgatgacatgtgctgcctcggctacctgcactgcatcatcaac

SEQ ID NO: 67010 - DNA, 2792 bp, Zea Mays
cgccaccccgagtccccgacaaaacgccccactgcactgcacctcacctcacctcacctcctccctcggcggaaacatcccactgcccagcccctcttcacgtcttccctcctccggcctgtgttactgccctctgtctgctcgaccagcttgggagcctggctgtccgctctccgatcgagtacggaagcctcggcagctggaggatctgtggcctgagcgcccccgccggacgacgggagagagattcttgcgcggggggtgggttggttggttcaacgtgcgggtcaaactccctgtgccggggttggaaaaatcttgtgttgactgttcggaccagtcctcggcatgtactcctgcctgcaggacagcaggagactgtacggaacatccctcaccaatgacgcagaatcacggtaggttttctcttgtcagcctttcaggttttgctacggcccacctgcgttgcgttgcgttccctctctgccatgccaccaggaatttggagatagttggtcgcgcttgtgtctgtcgaggctcggtgtgttactgtggtcctgtttggatgcaaatttagtggggattgttataaatgaatgcgacacaaataggatcaatcacagagaagacacggatttaacgtggaaaacccctccaaagtgaagcggttctgtttcatcctcatataacagaggactagaagacatccacacgtaccatcaatcaaattgcaaatctctgaatttacctcaaaatcggacgtgcctgttgtcatataccagaagcaattgataacttggagttgtagtagtctaccgtactctctactgaacaagtatggccgaccctccaacttcccgcatggtgcagcaccccttcggcgacatcccaagccagactcccaagcaattcctatactctggtagctcacagcacctctgccatccataccagtcagcttcggacgcccacgtcgcgccgcagcgtcactacaccgtgaggtctcagtctcagtctcagtcaccggatgctgggtctgaagactttgagacgcacagcaggcagtacacgctggactcctcttcggcttccggttgctcagggcacggttctccctcctgtcagagtgtccatgccgggagtcgcagccctgtgtctcactctcatgacgacagccactccggctccaccaatggcaacggatcgcctgcgagcgcgtcgtgtgtcaccgaggaccctactgacctcaagcagaaactgaaggatcttgaggctgtgatgctggggacggacacggacccagagaccgtggacagtctcgagatcgccatagcggaccggctttcggtggagcccgaggagtggaagaacaacatggtgagcgtgcctagaggggacctgaaggagctgctgatcgcctgcgccagggcagtggagcaaaacaacggctactccatcgacctgatggtcccagagctgaggaagatggtgtcggtgtccggcgagccgctcgagaggctgggagcctacatggtggaaggtctcgtcgccaggctcgccgcctctggcagctccatctacaaggctctgaggtgtaaggagcccaggagctccgacctcctctcctacatgcacttcctgtacgaggcctgcccctacttcaagttcggctacatgtcggccaacggcgcgatcgcggaggccgtcaagggagaagacaggatccatatcatcgacttccacatcgctcagggggcgcagtgggtctctctcctccaagcccttgcggcccggcctggcgggccaccgttcgtgagggtcaccggcattgatgatcccgtttcagcttacgcccgaggcggcggcttagagttggtcggcaagaggctgtcacacatcgctggcctctacaaggtgccctttcagttcgacgcggtcgccatctccggcagcgaggtggaggaggggcatctgggcgtcgtccctggcgaagccgtcgccgtcaactttactctagagctgcaccatatccccgacgagaccgtgagcacggcgaaccacagggaccgggtcctgaggctggtcaagggcctgtcgcccagggtgctcacgctggtggagcaggagtccaacaccaacacggcccccttcgcgcagcggttcgcggagacgctggactactacgcggccatcttcgagtccatcgacctggcgctgcccaggggcgacagggagcggatcaacatcgagcagcactgcctggctcgggagatcgtcaacctggtggcctgcgagggcgaggagcgggtggagcggcacgaggtgttcggcaagtggaaggcgcgcctcatgatggccgggttcaggccgtccccgctcagcgcgctggtcaacgccaccatcaagacgctgctgcagagctactcgccggactacaagctcgccgagagggaaggcgtgctctacctcggctggaagaacaggcccctcattgtttcatcggcatggcactagtgttggcctcgtggagaatgttggcctcgtggagaatgtttcttgtgactttctacctcgttgttagtatagatatgcttggctgagcactaaaactatatataggaagcctgtggtggtactgagttgtacaacacctataacctaataacctgatgttgtgaattgtgatggcagtcactaccagcctgataatgtgtagcagtaagttcgagtatatgtttcagttaatcgattttgctttgaaaatccgggtgcattctgaagagtgatctcag

SEQ ID NO: 67011 - DNA, 3152 bp, Zea Mays
cccactgcactgcacctcacctcacctcacctcctccctcggcggaaacatcccactgcccagcccctcttcacgtcttccctcctccggcctgtgttactgccctctgtctgctcgaccagcttgggagcctggctgtccgctctccgatcgagtacggaagcctcggcagctggaggatctgtggcctgagcgcccccgccggacgacgggagagagcgtgtgcggtttggcgagtgacgacggaagaagctgctgtcttcgctcttgctttgcttcaatcttcaggtacttgaagctcctctgctgttaactctgcatgctcgtgttagccccgcttcgggtgcagaactcgtactggtccacaatccccgtaggttcttcgtacagcacatccagccgcatcattcatgcctcgcttgtgaggaggtcgttgtgggggggaatttcctgtttctgtttttttgagaccatgtcgtcaacccatgaggtcttaggatgctcacgaagtggtggtggttagtacgcggatttctcgatccgctatctaaaaacaacagctgatctacaagcttttgaccacctaattttctggctttttttaagattcttgcgcggggggtgggttggttggttcaacgtgcgggtcaaactccctgtgccggggttggaaaaatcttgtgttgactgttcggaccagtcctcggcatgtactcctgcctgcaggacagcaggagactgtacggaacatccctcaccaatgacgcagaatcacggtaggttttctcttgtcagcctttcaggttttgctacggcccacctgcgttgcgttgcgttccctctctgccatgccaccaggaatttggagatagttggtcgcgcttgtgtctgtcgaggctcggtgtgttactgtggtcctgtttggatgcaaatttagtggggattgttataaatgaatgcgacacaaataggatcaatcacagagaagacacggatttaacgtggaaaacccctccaaagtgaagcggttctgtttcatcctcatataacagaggactagaagacatccacacgtaccatcaatcaaattgcaaatctctgaatttacctcaaaatcggacgtgcctgttgtcatataccagaagcaattgataacttggagttgtagtagtctaccgtactctctactgaacaagtatggccgaccctccaacttcccgcatggtgcagcaccccttcggcgacatcccaagccagactcccaagcaattcctatactctggtagctcacagcacctctgccatccataccagtcagcttcggacgcccacgtcgcgccgcagcgtcactacaccgtgaggtctcagtctcagtctcagtcaccggatgctgggtctgaagactttgagacgcacagcaggcagtacacgctggactcctcttcggcttccggttgctcagggcacggttctccctcctgtcagagtgtccatgccgggagtcgcagccctgtgtctcactctcatgacgacagccactccggctccaccaatggcaacggatcgcctgcgagcgcgtcgtgtgtcaccgaggaccctactgacctcaagcagaaactgaaggatcttgaggctgtgatgctggggacggacacggacccagagaccgtggacagtctcgagatcgccatagcggaccggctttcggtggagcccgaggagtggaagaacaacatggtgagcgtgcctagaggggacctgaaggagctgctgatcgcctgcgccagggcagtggagcaaaacaacggctactccatcgacctgatggtcccagagctgaggaagatggtgtcggtgtccggcgagccgctcgagaggctgggagcctacatggtggaaggtctcgtcgccaggctcgccgcctctggcagctccatctacaaggctctgaggtgtaaggagcccaggagctccgacctcctctcctacatgcacttcctgtacgaggcctgcccctacttcaagttcggctacatgtcggccaacggcgcgatcgcggaggccgtcaagggagaagacaggatccatatcatcgacttccacatcgctcagggggcgcagtgggtctctctcctccaagcccttgcggcccggcctggcgggccaccgttcgtgagggtcaccggcattgatgatcccgtttcagcttacgcccgaggcggcggcttagagttggtcggcaagaggctgtcacacatcgctggcctctacaaggtgccctttcagttcgacgcggtcgccatctccggcagcgaggtggaggaggggcatctgggcgtcgtccctggcgaagccgtcgccgtcaactttactctagagctgcaccatatccccgacgagaccgtgagcacggcgaaccacagggaccgggtcctgaggctggtcaagggcctgtcgcccagggtgctcacgctggtggagcaggagtccaacaccaacacggcccccttcgcgcagcggttcgcggagacgctggactactacgcggccatcttcgagtccatcgacctggcgctgcccaggggcgacagggagcggatcaacatcgagcagcactgcctggctcgggagatcgtcaacctggtggcctgcgagggcgaggagcgggtggagcggcacgaggtgttcggcaagtggaaggcgcgcctcatgatggccgggttcaggccgtccccgctcagcgcgctggtcaacgccaccatcaagacgctgctgcagagctactcgccggactacaagctcgccgagagggaaggcgtgctctacctcggctggaagaacaggcccctcattgtttcatcggcatggcactagtgttggcctcgtggagaatgttggcctcgtggagaatgtttcttgtgactttctacctcgttgttagtatagatatgcttggctgagcactaaaactatatataggaagcctgtggtggtactgagttgtacaacacctataacctaataacctgatgttgtgaattgtgatggcagtcactaccagcctgataatgtgtagcagtaagttcgagtatatgtttcagttaatcgattttgctttgaaaatccgggtgcattctgaagagtgatctcag

SEQ ID NO: 67012 - DNA, 2472 bp, Zea Mays
cagcccagcagctgctgctatcctgcatcgtctccttccccgcaccacacaagcagcccatatcatccatcgcctccagcgcggcgccgacctgcctctccattatttatgcatttccgcccccacccttacctttcccaattcagccgaggaccgcaatcgcagggcactgggagcgattaaaaaaggcagcctcccccgcaagggtaaaaaacaaacaaccaccgcatcgcggcaggcaaggcatcgcccgccagccaccgagcggagggggaagcaaaagcttgataaaaaggagaggaggagacgagacgtgccgtccggacccaagcaacttcctcccaccacctcctccctcccatgcccgcatcgagatcttagcgggacagcgagaggagaggcgacgccgacgcgggcgccccctgatccctcctcgccgccgccgccgaccgaccgaccgggggaggaggaggggaggggaggacggacacgatggaggcggactccgggaagctcttcgtcggcggcatctcttgggagacggacgaggatcgcctccgcgcgtacttcggtcgctttggcgaggtcaccgaggccgttatcatgcgggaccgcaacaccggccgcgcccgtgggttcgggttcgtcgtcttcgccgattccgggatcgccgaacgcgtcaccctcgataagcacatgatcgacgggcgcatggtggaagcaaagaaggccgttcctagggacgaccagagtattgcgagcaagaacaacagcagcatagggtcacctggaccaggacgcactagaaagatcttcgttggaggtctggcctcaaatgttaccgaggtcgaatttaggaggtattttgagcaatttggtgtgataaccgatgtggtagtgatgtatgaccacaacacgcagaggcctaggggctttggtttcatcacatatgactcagaagacgcagtggacaaggcactgcacaagaacttccatgagctgaatggtaaaatggtcgaggttaagagggctgtgccaaaggagcagtctcctggtcctattgcacgttcacctgcgggagggcagaactatgctatgagcagggttcataacttcctaaatggcttcaaccagggttacaacccgaaccccctgggtggttatggcatgagggtggatggaaggtatggtctccttacgggtgcacggaatgggttctcttcgtttggtccaggttatggaatgggcatgaatgctgaaggtggaatgagtgcatattttggtgcaagttctggttttgccaatagctccaatgggcggcaaataggttcttacttcaatagtagttcaaacagattaggcagtccaattggttatgttggccttaatgatgattcaggatcaatactgagttcaatgtctagaaatgtttggggcaatggaaatcttaactacacagggcaaccctacaaacacgaattcttttgctccacctgtaggtggtgggggtattcctggtgatgaaattagttggggaaaccttacttctgttcatgggatgggcaacatttcaagccttggaccgggaaaccttggccgtggaaccggagataacaactttggattgccttctggaacctatgtgaggagcaactcaactggtacaattggcgagccattttctgcatcagccaatccatatgaatcgaacaatctaggtgcatatggcagcagttctatttatggtgactccacctggaggttcaactcatctgaggttgatatacctccttttggtcatgatcttggaaatgttgatccagatattaaatcagaaatatcagcaaactatatgggcaactatactgttaataataatcagacaagcagaggtatcacttcctaggaagagtattattatattcatacatgacttgggataggtgaaatacccactactatatcaggctttcaggtgcatgactgtgaattggtgatgtcagattaatatacaggtaaggtactgggagctgatttgcagtggcagacaacgtaatgacggccgcgccgatccaacagtgggttgacaagcgttacagatgggaggaggacgcatcaacgccgaccgactaatccactatagccagtggattaatgccaatcacgtagcttgaaatcgcacactctcaccaccgtcatcctcgtatatgttcgcaatgtaaaaacatcaatcgtgtgtggtgactgtggtcgccgtatacctgacgtaaaaaaacagcagtccacattcggggggtcgtcgacacttgcaccacgcactcatcgctgcacccttgagaacacgagacacatctaatggtcatcgtgtcttgacagagtagtacaatagttaccatcgtgtcttgtcggttaatgtgatatgatccaattttgggttgggtgatctaatggtcatggtttttttttggtaga

SEQ ID NO: 67013 - DNA, 1906 bp, Zea Mays
ctgctatcctgcatcgtctccttccccgcaccacacaagcagcccatatcatccatcgcctccagcgcggcgccgacctgcctctccattatttatgcatttccgcccccacccttacctttcccaattcagccgaggaccgcaatcgcagggcactgggagcgattaaaaaaggcagcctcccccgcaagggtaaaaaacaaacaaccaccgcatcgcggcaggcaaggcatcgcccgccagccaccgagcggagggggaagcaaaagcttgataaaaaggagaggaggagacgagacgtgccgtccggacccaagcaacttcctcccaccacctcctccctcccatgcccgcatcgagatcttagcgggacagcgagaggagaggcgacgccgacgcgggcgccccctgatccctcctcgccgccgccgccgaccgaccgaccgggggaggaggaggggaggggaggacggacacgatggaggcggactccgggaagctcttcgtcggcggcatctcttgggagacggacgaggatcgcctccgcgcgtacttcggtcgctttggcgaggtcaccgaggccgttatcatgcgggaccgcaacaccggccgcgcccgtgggttcgggttcgtcgtcttcgccgattccgggatcgccgaacgcgtcaccctcgataagcacatgatcgacgggcgcatggtggaagcaaagaaggccgttcctagggacgaccagagtattgcgagcaagaacaacagcagcatagggtcacctggaccaggacgcactagaaagatcttcgttggaggtctggcctcaaatgttaccgaggtcgaatttaggaggtattttgagcaatttggtgtgataaccgatgtggtagtgatgtatgaccacaacacgcagaggcctaggggctttggtttcatcacatatgactcagaagacgcagtggacaaggcactgcacaagaacttccatgagctgaatggtaaaatggtcgaggttaagagggctgtgccaaaggagcagtctcctggtcctattgcacgttcacctgcgggagggcagaactatgctatgagcagggttcataacttcctaaatggcttcaaccagggttacaacccgaaccccctgggtggttatggcatgagggtggatggaaggtatggtctccttacgggtgcacggaatgggttctcttcgtttggtccaggttatggaatgggcatgaatgctgaaggtggaatgagtgcatattttggtgcaagttctggttttgccaatagctccaatgggcggcaaataggttcttacttcaatagtagttcaaacagattaggcagtccaattggttatgttggccttaatgatgattcaggatcaatactgagttcaatgtctagaaatgtttggggcaatggaaatcttaactacacagggcaaccctacaaacacgaattcttttgctccacctgtaggtggtgggggtattcctggtgatgaaattagttggggaaaccttacttctgttcatgggatgggcaacatttcaagccttggaccgggaaaccttggccgtggaaccggagataacaactttggattgccttctggaacctatgtgaggagcaactcaactggtacaattggcgagccattttctgcatcagccaatccatatgaatcgaacaatctaggtgcatatggcagcagttctatttatggtgactccacctggaggttcaactcatctgaggttgatatacctccttttggtcatgatcttggaaatgttgatccagatattaaatcagaaatatcagcaaactatatgggcaactatactgttaataataatcagacaagcagagctttggaatgtagctattgattctggaa

SEQ ID NO: 67014 - DNA, 596 bp, Zea Mays
cttggacggtgaaggtggacgggaaccagatcatggacatgtacatgaagagcatgcagcaattcacggattccctggctaaaatgaagctccctgccttggacttggacatagacaatggtagcagcgggaggagtagtcctgcagcagccacaaccgacgcagaatccactggtgccgactcgatcgcggtgaagaagccagccgccgccgggaagcaggataagccatctcccaaggtgttctatggcagccgggcgttcttctgatctcctgtccgcttgagcactggaagcacagcgctccagccgccgagtaacgaagcaaagagacggcatttgcagtcgcctcagctgaatcttactagcgcagaggaataacaccttctcatgctcttgctctagatttgccagatagggaattaattgctcgtttcaatgtattagttgctcgtttcaatgtatcggtcagtacttatgaaaaatcgtctggtttccctcttttagggctagtttatggactctactttttcaagaaatttctgtttttctaaaagaaattgaactaattttctttagtaaaatgaaaatccttcg

SEQ ID NO: 67015 - DNA, 1936 bp, Zea Mays
atttgcgttgatccattcatggaaggatcctcgtcttcgccactgaatccaaagatggtgtgcgaagaaggcggcggtagaaaaggaacgtagagcacagagcgcaaagctgagaccgagacagcgagacgttgacaggcacaggcaggataggaagtgtcgcgaaacgcgaccggcctcgtcctaccaccggtcgatagggatctcggcctcgtgccccaccgccctctgtctgcccatcaccggatcacccctcgtccccacccagcgcgtcacgggcacgagctcgagccctcgtaccctcgcgtccgcgctctccctccctcgctcgccgcgctccgatcgaactcccgtccccgcgtggaggagagcagggccccacgagggccctctcgcgcggcgaccccgtggcgttcctgcgcggctgcttctcgttcgggtcggcggggcggaggcggcccaaggcctcgcccttgccctccccgccgcgcctgaccgcggctgcggcggcagcggacgacggggccaagatgaagggcctcttcaagtccaagccgcggacgcccgtggacatcgtgcggcagacgcgcgagtgcctcgtctacctcgacctccactcggactccaggagcggcgatgccaagcgcgaggagaagatgacagagctaagcaaaaatatcagggatatgaagtctatcctttacggcaatggtgaatcagagcctgtaactgaagcatgtgtacaattgacccaagaattcttcagggagaacactttacggctattaatcatacatcttccaaaactaaatttggagactaggaaagatgctactcaagttgttgcaaacttgcaaagacagcaagtatcctcaaagatagtagcgtctgagtacctagagtcaaataaagatctcttggacattttaattttagggtatgagaacatggacatcgctttacattatggtgctatgttgagggaatgtattcgccaccaaagcattgcaaggtatgttttagagtctgaacacatgaagaagttctttgactatatacagcttccaaattttgacatagcttctgatgcttcggctacctttaaggaactgttgacaaggcataaagcaaccgtggctgaatttctctccaacaattatgattggttctttgaagaatttaactctaggttgctgtcatcaaccaactacataacaaaaaggcaagctatcaagttgttgggagatatgctgctggatagatcaaatgctgcagtcatgatgcgctatgttagctccaaagacaaccttatgattttgatgaatctcttaagggattcgagtaaaaatattcaaattgaagcatttcacgtgttcaagctgtttgctgcgaataaaaacaaaccgcctgaggtcgtgaacatactggtcaccaatagaagcaagctacttcggttttttgctggattcaagattgacaaagaggatgaacagtttgaagcagacaaggagcaagtcataaaagaaatatcggcactttgagtatgcttgaggaaagcggagctgacaggacggtcccacggtgcagcgagagggagtgagcgcacggagggagccccatcacgttgatgagacggacccgcaaggaagagagggaaagggggcgcggacgagggcaactggtatcgacagagcggctccactgggtagagagagggagggagcacgcggcctggctgggccgagctagaccggtttgggctgaaatggttttctctttttccaggaaatttctcattgcttttctttttattttctctaggattttcaattcaaatttaaaccaagtttcaaattcaaacaaattcaaacatatgcaacaatttaaagaatgtttaagctcagcatgatgcaacatttcatgactcataatgttt

SEQ ID NO: 67016 - DNA, 1920 bp, Zea Mays
cgttgatccattcatggaaggatcctcgtcttcgccactgaatccaaagatggtgtgcgaagaaggcggcggtagaaaaggaacgtagagcacagagcgcaaagctgagaccgagacagcgagacgttgacaggcacaggcaggataggaagtgtcgcgaaacgcgaccggcctcgtcctaccaccggtcgatagggatctcggcctcgtgccccaccgccctctgtctgcccatcaccggatcacccctcgtccccacccagcgcgtcacgggcacgagctcgagccctcgtaccctcgcgtccgcgctctccctccctcgctcgccgcgctccgatcgaactcccgtccccgcgtggaggagagcagggccccacgagggccctctcgcgcggcgaccccgtggcgttcctgcgcggctgcttctcgttcgggtcggcggggcggaggcggcccaaggcctcgcccttgccctccccgccgcgcctgaccgcggctgcggcggcagcggacgacggggccaagatgaagggcctcttcaagtccaagccgcggacgcccgtggacatcgtgcggcagacgcgcgagtgcctcgtctacctcgacctccactcggactccaggagcggcgatgccaagcgcgaggagaagatgacagagctaagcaaaaatatcagggatatgaagtctatcctttacggcaatggtgaatcagagcctgtaactgaagcatgtgtacaattgacccaagaattcttcagggagaacactttacggctattaatcatacatcttccaaaactaaatttggagactaggaaagatgctactcaagttgttgcaaacttgcaaagacagcaagtatcctcaaagatagtagcgtctgagtacctagagtcaaataaagatctcttggacattttaattttagggtatgagaacatggacatcgctttacattatggtgctatgttgagggaatgtattcgccaccaaagcattgcaaggtatgttttagagtctgaacacatgaagaagttctttgactatatacagcttccaaattttgacatagcttctgatgcttcggctacctttaaggaactgttgacaaggcataaagcaaccgtggctgaatttctctccaacaattatgattggttctttgaagaatttaactctaggttgctgtcatcaaccaactacataacaaaaaggcaagctatcaagttgttgggagatatgctgctggatagatcaaatgctgcagtcatgatgcgctatgttagctccaaagacaaccttatgattttgatgaatctcttaagggattcgagtaaaaatattcaaattgaagcatttcacgtgttcaagctgtttgctgcgaataaaaacaaaccgcctgaggtcgtgaacatactggtcaccaatagaagcaagctacttcggttttttgctggattcaagattgacaaagaggatgaacagtttgaagcagacaaggagcaagtcataaaagaaatatcggcactttgagaaagcggagctgacaggacggtcccacggtgcagcgagagggagtgagcgcacggagggagccccatcacgttgatgagacggacccgcaaggaagagagggaaagggggcgcggacgagggcaactggtatcgacagagcggctccactgggtagagagagggagggagcacgcggcctggctgggccgagctagaccggtttgggctgaaatggttttctctttttccaggaaatttctcattgcttttctttttattttctctaggattttcaattcaaatttaaaccaagtttcaaattcaaacaaattcaaacatatgcaacaatttaaagaatgtttaagctcagcatgatgcaacatttcatgactcataatgttt

SEQ ID NO: 67017 - DNA, 625 bp, Zea Mays
aaacaacctaaaattagaatgaggattcgagtaaaaatattcaaattgaagcatttcacgtgttcaagctgtttgctgcgaataaaaacaaaccgcctgaggtcgtgaacatactggtcaccaatagaagcaagctacttcggttttttgctggattcaagattgacaaagaggatgaacagtttgaagcagacaaggagcaagtcataaaagaaatatcggcactttgagtatgcttgaggaaagcggagctgacaggacggtcccacggtgcagcgagagggagtgagcgcacggagggagccccatcacgttgatgagacggacccgcaaggaagagagggaaagggggcgcggacgagggcaactggtatcgacagagcggctccactgggtagagagagggagggagcacgcggcctggctgggccgagctagaccggtttgggctgaaatggttttctctttttccaggaaatttctcattgcttttctttttattttctctaggattttcaattcaaatttaaaccaagtttcaaattcaaacaaattcaaacatatgcaacaatttaaagaatgtttaagctcagcatgatgcaacatttcatgactcataatgttt

SEQ ID NO: 67018 - DNA, 165 bp, Zea Mays
atcgtccatccgtattcccgtcacaactcacaacccgagccccccaaacccgaagcagcaggagctcccctgaccctgctccgcctccgatcaaggaaaaggaagatgagctactacggccagcagccccccgtcggcgtcccgccgcagcaaggctaattatct

SEQ ID NO: 67019 - DNA, 772 bp, Zea Mays
atcgtccatccgtattcccgtcacaactcacaacccgagccccccaaacccgaagcagcaggagctcccctgaccctgctccgcctccgatcaaggaaaaggaagatgagctactacggccagcagccccccgtcggcgtcccgccgcagcaagcttggctgccctctgctgctgctgcctcctggacgcctgcttctgacggaaccatccgtgccgggtccaacacggctgcaagtgaagcaaccagcttacggaagagctggaactgggccgtgctattctagctttgtcctgcgttatcgccctcttttcttttttttttctctctctctctctctgttatgagactactggtactctgtcgatgtcgattggattagactagggctggtgtgtattctgtggatgctccgtgtttctggtgggattcaagttcaaccctgggattattgtatttcttctacctgtcgcatggatgcgtttctttgctgttactctgttgccgagcacgtttcgcttgcgtacatgattcgtagcgctccgtaggatgttcgactgtagcgcaatttattcggatcgacttatttgacctggcattttggacgaagtcttgtttagaaaaaaaaaaatcccagcttctctctagaagctcgaggcaacctggttagctttttgcgtgtttgacttgctggtcagcgtccgttcttgcgtgagggcgtgaggcatccagctttgtgatggacacgttcagtataacagcgagtcattatt

SEQ ID NO: 67020 - DNA, 81 bp, Zea Mays
tccggagacaacgcaagtctttttggtatgactgggacataagtttatttttttgcatctggtggattggagaaattaatt

SEQ ID NO: 67021 - DNA, 301 bp, Zea Mays
aagggttggagacccatatttatagccctagaggctgcactatcacaccttctcacacacactacacaacaggattgtcctctagatgctaaagagactacagaggacaatcaaaagcgacggttgtcctctagatgctaaagcgactacagaggacagtcaaaaagcgactgctgtcctctagatgctaaagagactacagaggacagtcaagctgtcctctagatgctaaaggactacagaggacagtcaaaagcgactgttgtcctctagatgctcaaagacttattccatcattctc

SEQ ID NO: 67022 - DNA, 1116 bp, Zea Mays
gcgacctcggcctcctgctggcgccgcgcactcgaagtggccgagcgtagggacatggtgggctagtgaggggtcgctgcgtgtggaagaggctgtctcagacgaaaggctgctcgtctgagcaggggaggaaggaacagttggagctcttgttgccgactgagtgtggggagaggcgcgggaaggagatgagcacgagatgtttaggctgcaggatagtttggctccgataccaattgtaagtatagggactctaactctcatcaagaggatgacactatgagttggggcaatttttctgtttatttcctcaaacactacacaactacacaatgccatacccatctaagggttggagacccatatttatagccctagaggttgcactatcacaccttctcacacacactacacaacaggattgtcctctagatgctaaagagactacagagaacagtcaaaagcgactgttgtcctctagatgctaaagcgactacagaggacagtcaaaaagcgactgttgtcctctagatgctaaagagactacagaggacagtcaagctgtcctctagatgctaaaggactacagaggacagtcaaaagcgactgttgtcctctagatgctcaagacttattccatcatcgagcgcccacacccctttttgttctcttcggcatcctatgaccatctttgtgtttttgtgtgtgcatgctacctcaacctttctaccacggttgcccataaggttgctcctcgctctgtttgttgtatcttcctcaagtactcctctgatcacaaagggtactggtgtattgccctcacaactcatcatctcttgatcttctattacatcatcttcgacgagacgattttctcattctcgaatacctccctgcccccactgcctcccttcctgagttggattttctccatgatcctaactttgtggcgccctctgatcaaccaccatttgtttttccatatgcaggttcccccacactgtttcatccgctggccccagtgcccctcgtggctcctgcgctcccgaactccctctgggctggcccgccgcctcgtgtgccaccccattaacacatgttgccccatgtggcccc

SEQ ID NO: 67023 - DNA, 3103 bp, Zea Mays
gtctaaagtcctgaaccagaacaatctgcaggaatcaacccccgtacatttattccctgacttaactggccgtgcttgttccctggaacacggggcccagatgggccagatgtcagtgtgctggtccttctaaagagctgcatcggctctcttcatcctcttggagcgtaggtagaggcgtagagcgccgcacactcatttgccacttcggttcggcgacggtggaggctgccaacatcctcggcgtcctccttccggaggccacgccagaaaaagaaaaagaaacggaagcaacggcataattgttttttcagaaaaaaagttccggaggagaattcagggtcccttcttcttttagagtagtattttgttttctaccagagctgttcgatgacgagaggaacggaagttgttgtgagagcgctgctcgttgcggcggcggtagctgggctgttgctgtcggcggcggcggaggacggcgttgttatccagcggaggtcgcttcaccagccgtttttccccgtcgatcccacgccgccgccggggttcgacgactcgatcgtgccgccgccgccgccgccggcggcggcggctggggccgcggcggcgtcggccgcgtcgaagggcggcgggcggtccgtcaccaacgccgtcgcgatcgcgctcgccacgggcctcgtcgtgctcgcggtggcgttctactcgtgcttcctcctgtggcgccgacgctccgacggaggaggcgggggcgtgggcggcgacggcctccgcgccgtcaagtcgtcgcggccaggcgccgtcgccgtgagggtcgccagcgacgtggggagcagcgcgcggcaccagcggtcgccgccgccgagctcgacggcgtccgacgcgatatacctcgacccgctcacgacgatggtggaggtgagccggcaccggccgcagagcccggacctccgcccgctcgcgctcgtcaagcagccgagccccgacctccgcccgctgccgccgctgaagcggccggcgccacagccgccccctccgccggcgtccacgccgccgatgaccaccaccacgggggactcctccgacgaggaggaccaggccacgtactacaccgcgcccaagaccgccaagtcctcgttcagccgcagcacgagccagcgcagcaccgtggagccgacagtggctcaaccacccgcgcctgctcccgcgtccacgcccacgccgctgccgccgcaagctaacgccccccgacctggtcgtccgccgccgcccccgccgccgccgaggcaaaggctgctgcggccgatgcccgaggagtccccacccccggccgtcctcgccagtttggcgctaaccaatccccctgaaccctctggtcaggacaggggaggtgagaacccggatggccacggcgggagagcgcggccgccgaagccaccgagcctgaaaccgctgcactgggacaagctccgcgccatctccggccgcaccaccgtctgggaccaggtcaacaattccgactcgttccgcgtcgacgaggcggcaattgagagcttgttcctgaacaactccggcggcgtgggtaattcggatcaggcggcgaggaggggaggcgccgggaagcaggagagccggctgctcgacccgaagcggctgcagaatgtcgcgatcatgctcaaggtgctgaatgtgacatcgagtgacgtgattggagcactcatgcacggaaatggagatctggggtctgagttctacgaaacactagctaagatggcaccaaccaaagaagaagaactgaaattaaaaggttataatggcgatatatcaaaacttgatccagcagaacgctttctgaaagatgtacttgatgttccttttgccttcaaaagagtagacgcaatgttgtacagagcaaactttggcgctgaagtgaattatttaaagaaatcttttggaacgctagaggcagcttgtacagatttaaggagcagcaagctattcctgaagttgctagacgcagtgctcaagactgggaaccgcatgaacgacggaactaaccgaggcgaggcgagggccttcaaactcgacacccttctaaagcttgcagacatcaagtcgacggatggaaaaacgacagtgctccatttcgtggttcaagagatcatccgatccgaaggcttgggttccgatcaagcagcagcagcagcagcgaatcctggaagcaccagcaaggaacagttcaagaaggacggccttcaagtgcttgcagggctcagcagcgagctctccaacgtgaagagcgcggccgccttggagatggacacgctggtcggcagcgtctcgaggctcgaaaccgacctcgagaaggtgacgctcgtctcccggctcaggcagacgtgtcccggtgacgatcaggtctcaagcgagaagttcttcgaggcgaacgacgcgttcctcggacgtgctcacgcggagatcgaggcagtgaaggcggccggggagcgcgcgctgcagcgcgtcaaggagaccacggagtacttccacggggacgccgtcaaggaggagcctcacccgctgaggatcttcatggtggtgcgcgacttcctcgcgacgctggaccgcgtgtgccgggccgtcggcaggacgccggagagggtgatgatggggtccggcaagtcgttccgcgtctcggcgggcacaacctccctgccgcagcgccggaacgaccagcggagggagctgagctcctctgacgaggacagctcctcgtcatagggtaacactactaggaaaccttttttttttctttctttttctttctctggcgcgtagagtagttcgggatcgaggcctgtgattcttgcagatttgttgagcatgtgtagccaacgtcagaactcaataggtgaaagttactgtgtagtttctacaaagtacaaaggttaaaagatatgtatagctgtacaaagacgggggcttcttattatgaactacgacactaggagtttgctgtactagtattcaacatctagccagctgggtgcgagagcgatgattaaggtttcttcagaaacaagcctgttctgtctctgcatctagacaagaa

SEQ ID NO: 67024 - DNA, 3002 bp, Zea Mays
atttattccctgacttaactggccgtgcttgttccctggaacacggggcccagatgggccagatgtcagtgtgctggtccttctaaagagctgcatcggctctcttcatcctcttggagcgtaggtagaggcgtagagcgccgcacactcatttgccacttcggttcggcgacggtggaggctgccaacatcctcggcgtcctccttccggaggccacgccagaaaaagaaaaagaaacggaagcaacggcataattgttttttcagaaaaaaagttccggaggagaattcagggtcccttcttcttttagagtagtattttgttttctaccagagctgttcgatgacgagaggaacggaagttgttgtgagagcgctgctcgttgcggcggcggtagctgggctgttgctgtcggcggcggcggaggacggcgttgttatccagcggaggtcgcttcaccagccgtttttccccgtcgatcccacgccgccgccggggttcgacgactcgatcgtgccgccgccgccgccgccggcggcggcggctggggccgcggcggcgtcggccgcgtcgaagggcggcgggcggtccgtcaccaacgccgtcgcgatcgcgctcgccacgggcctcgtcgtgctcgcggtggcgttctactcgtgcttcctcctgtggcgccgacgctccgacggaggaggcgggggcgtgggcggcgacggcctccgcgccgtcaagtcgtcgcggccaggcgccgtcgccgtgagggtcgccagcgacgtggggagcagcgcgcggcaccagcggtcgccgccgccgagctcgacggcgtccgacgcgatatacctcgacccgctcacgacgatggtggaggtgagccggcaccggccgcagagcccggacctccgcccgctcgcgctcgtcaagcagccgagccccgacctccgcccgctgccgccgctgaagcggccggcgccacagccgccccctccgccggcgtccacgccgccgatgaccaccaccacgggggactcctccgacgaggaggaccaggccacgtactacaccgcgcccaagaccgccaagtcctcgttcagccgcagcacgagccagcgcagcaccgtggagccgacagtggctcaaccacccgcgcctgctcccgcgtccacgcccacgccgctgccgccgcaagctaacgccccccgacctggtcgtccgccgccgcccccgccgccgccgaggcaaaggctgctgcggccgatgcccgaggagtccccacccccggccgtcctcgccagtttggcgctaaccaatccccctgaaccctctggtcaggacaggggaggtgagaacccggatggccacggcgggagagcgcggccgccgaagccaccgagcctgaaaccgctgcactgggacaagctccgcgccatctccggccgcaccaccgtctgggaccaggtcaacaattccgactcgttccgcgtcgacgaggcggcaattgagagcttgttcctgaacaactccggcggcgtgggtaattcggatcaggcggcgaggaggggaggcgccgggaagcaggagagccggctgctcgacccgaagcggctgcagaatgtcgcgatcatgctcaaggtgctgaatgtgacatcgagtgacgtgattggagcactcatgcacggaaatggagatctggggtctgagttctacgaaacactagctaagatggcaccaaccaaagaagaagaactgaaattaaaaggttataatggcgatatatcaaaacttgatccagcagaacgctttctgaaagatgtacttgatgttccttttgccttcaaaagagtagacgcaatgttgtacagagcaaactttggcgctgaagtgaattatttaaagaaatcttttggaacgctagagaaaattttcaggcagcttgtacagatttaaggagcagcaagctattcctgaagttgctagacgcagtgctcaagactgggaaccgcatgaacgacggaactaaccgaggcgaggcgagggccttcaaactcgacacccttctaaagcttgcagacatcaagtcgacggatggaaaaacgacagtgctccatttcgtggttcaagagatcatccgatccgaaggcttgggttccgatcaagcagcagcagcagcagcgaatcctggaagcaccagcaaggaacagttcaagaaggacggccttcaagtgcttgcagggctcagcagcgagctctccaacgtgaagagcgcggccgccttggagatggacacgctggtcggcagcgtctcgaggctcgaaaccgacctcgagaaggtgacgctcgtctcccggctcaggcagacgtgtcccggtgacgatcaggtctcaagcgagaagttcttcgaggcgaacgacgcgttcctcggacgtgctcacgcggagatcgaggcagtgaaggcggccggggagcgcgcgctgcagcgcgtcaaggagaccacggagtacttccacggggacgccgtcaaggaggagcctcacccgctgaggatcttcatggtggtgcgcgacttcctcgcgacgctggaccgcgtgtgccgggccgtcggcaggacgccggagagggtgatgatggggtccggcaagtcgttccgcgtctcggcgggcacaacctccctgccgcagcgccggaacgaccagcggagggagctgagctcctctgacgaggacagctcctcgtcatagggtaacactactaggaaaccttttttttttctttctttttctttctctggcgcgtagagtagttcgggatcgaggcctgtgattcttgcagatttgttgagcatgtgtagccaacgtcagaactcaataggtgaaagttactgtgtagtttctacaaagtacaaaggttaaaagatatgtatagctgtacaaagacgggggcttcttattatggtatgttttctctgttacatttgtaattgtgattagtttaaagtttgtagatg

SEQ ID NO: 67025 - DNA, 2300 bp, Zea Mays
gatgtctttatctgagcctcaagttgatgcaaccactgagcctgagagtcaattaaagaggaaatcaagtgatataggatgggaatgggggcgattagttgatccaaatgataagaaccgagtgaagtgtctgctttgtggccatgagagcacaggaggaatacataggttcaaacagcatcttggtcatgttggtagtgctgttgcaaagtgcaagaaagtgagtgatgatgttaaggccaagtgcaagaaagatttggaatcagcaattcaaaaaaaaagagagaagctgcaacatgatagagatgttagagacaatgtgcaattgattgatgatgaacccacatatgtgcagtctcttgttgggagctcagactcagtaagcaaacttggccccatggacagttttgctcgtcgcattgatcctaaagcaaatcaagctgaagccaagaggcaacaaaacattaatgaggctctttggaaagagagaacacaccaggtgcagcaatatgttgctagatgggtgtacacacatggtattccattccatgcttgtgacaatgatgagttcaaggaaatggttgaggctattggtcgatttggccctggttttcagccaccatctcaacatcattatagagagaagctgctagaagaggagcatgctagaactaaaagcttgctgcaagaccgtgaagacgagaagaacaagtatggctgctctgttatgaccgatgcttggacagatatgaagaggagaagcatcatgaacatttgtacacataccactgcagggacaagttttatcaagtcaaaggagatgtcaaatgtgtcacacacaagtgaggtcatatttgagttggtggataaagcaattcaggatttaggaccggactcagtagtgcaagttgtcacggacaatgcttctaacaatatgggagctaaggcattgttgcatgacaagaggcctaatattttttggagttcttgtgcaactcacacaataaatttaatgctacaaggcattggcaaccttccaagattcaagaagagaattgaccaagctaaatcattcaccatctttgtctatggtcaccaccgcaccttggcatgtatgagatcattcacattgaagagagatattataagacctggggtaacaagatttgctacagcctaccttactttgcaaagcatgatggagaagaaagatgaccttagaaagatggttgtcgattcaaagtggtatgacttacccgatgtgaagtctaagaagggaaaggaggcaacagcaatggtgttaagcataccattttggaaaggtgtgtcactttgcttgaaggtatttgagcctcttgtcaaacttcttcgtttggtagatggggatgtgaagccatctatgggtttcctctatggagaactaatcaatgcaaagaaggccattaaggaagcatttggaaatgttgagataaaatacaaagaagttatgtccattgttgagaaaaaaatgaaaaacaggcttgattccccactgcatgtggctgcatatatgctgaatccatactatagttacaccaacagcagcatcttctgtgattcaaccattatggaaaaattcatgctatgtgttgagacattttatcatggtgaggacgagaaagcatatagagctgtcaatgatgacttggataggtttcaaacaaaacaaggatctttctcaaaaaatatggcaaggagctaccaacgctttggtttcaatccagcatcttggtggaggctctatgggggtggagcacctgatttgcaagcaattgccattaggatcctttcattaaccactagctcatccggttgtgaaagaacttggagcgtttttgaacaggaacagattaacaacagaacgcctcaacaatcttgtcttcatccaattcaacaatagaatgttgtccaagaaagagagaatttcccgaaacaagaactatgaggtgctcttgagttctgattgttcagaagctcaaggatttttctttaagggaggggatgaacaagcattagttcaaatcagggatgaggatgagggagaaatgcaagggacaggtataccatggtctgtcctaggagatgcaatgggagtagaggatgagcttcaatctcgcaggagcgcaagagtggctagagaggtggacgaagaagattgggaatctgaaaaagaagatgaagacaatgtgcttgaggatattgattatgaagaggacaactgtgagatttcaaacaccagtgactatgtccatgtggagtaa

SEQ ID NO: 67026 - DNA, 1923 bp, Zea Mays
gttttatcaaggggtccctacgcaaagtatccggatacgttcccagcaccgatcgagtccctccacccttgatccgtcggctatgggcctgtggctgctgcgtaacacggtggcatcgcagggtcagcagcatcattagaaaacgacgtctcgccgttcttcgtcttcagatctagggttctctcgtgctctgttctcatcttctgctcgctggtgtcccctccctctcacccatggcttcggcggcggcggcaactcaggtggggacttacttcctgcggaactactacaacctgctgcaacaaacccccgatgtcgtccaccagttctacagcgaagccagcaccatggtccgcgtcgacgacctcaccggcacgaccgcggctgccaacaacatgatggacatacactcactcatcatgtctttgaacttcacccaaattgagatcaagactgccaattttgtgaactcatggggcgatggggtgctagttatggtctctggtctagtgcagaccaaggagtacagccaccaaaggaaatttatccagatgttcttccttgcccctcaagagaagggttactttgtcctcaacgattactttcacttcgttgaccaagaacatgtgcagcctgcgccagtgattgctcaggaagactacgagagcaatttggcacccaacacagttgttgagaccgctcctgagtacgttcacgaggaagaagctcaacaaatagcacctgaagtacatgatgtggtcgaaaactatacttattctgagccacaacagcaagtagtgtcggacaactggggagaggagcctcttcctgaagaaccgccttctttctcaaatgaaatggcagtcgctcctgaggagccagtgcaagctccacctgtgccacttcctcacgtggatgagcctgtttgtgaaccagtaaagaagacttatgcttccatcctaaaaaccgcaaaggctcctgcattcccagtagcccagcaagtacctgtgagtaagacttctcaccctacaacagagtcaaaccaaacccagcattcagttatggcttcatcaatgggaaccgagaaaccgaggtctgatgtctttggtgagggtgcttcccatgatgacgaagagagcaaatctgtgtatgtcggcaacgtgccatcatctgtaagtgaggctgatcttgaaaacgagttcaagaaatttggccggcttattcctgacggtgttgctatcagaagccgaaaggagactggcggctattatgctttcgtggaattcgaggaactcagcggtgtacacaatgcgttaaaggcttcaccaattgaaataaatgggcggcagatatatgttgaggagaggaagccaaatagcggaataagagggaggggaggacgtggccgtttcagtggtggaggccggggatattcgagaggtggaggcgatgagtacaatagtaaccgtgggaggtcaaacggttacggtcgtgctcctcaccaagagaggggcatacttgggagccacaccccaaggaactgattcagtccagcagcaaacataaggttttgatccgtgtcgtcaaagcgagagagagagagatcctaaacaatctgcctatcagctactaggccgcgtttgggttttggggcttgttttgtcgatgaatgtgtgtgcgcgcgtcatcgacctatgtgacacttaaaacttttgctagtctgacgctatctctttacattaagatcggctgttctattaaccttgctgctattgttgctcgtgcatttctggcggtggtatttgatgttttgcctctgcatggaaaaggtttcagctttacatatgttacattgcagtcccccccaaaacttcttccgccaggcctagctagtgtcccgtcggcccatccacaccatttctt

SEQ ID NO: 67027 - DNA, 1857 bp, Zea Mays
gggcctgtggctgctgcgtaacacggtggcatcgcagggtcagcagcatcattagaaaacgacgtctcgccgttcttcgtcttcagatctagggttctctcgtgctctgttctcatcttctgctcgctggtgtcccctccctctcacccatggcttcggcggcggcggcaactcaggtggggacttacttcctgcggaactactacaacctgctgcaacaaacccccgatgtcgtccaccagttctacagcgaagccagcaccatggtccgcgtcgacgacctcaccggcacgaccgcggctgccaacaacatgatggtttgtcgcaacctttctgacatacactcactcatcatgtctttgaacttcacccaaattgagatcaagactgccaattttgtgaactcatggggcgatggggtgctagttatggtctctggtctagtgcagaccaaggagtacagccaccaaaggaaatttatccagatgttcttccttgcccctcaagagaagggttactttgtcctcaacgattactttcacttcgttgaccaagaacatgtgcagcctgcgccagtgattgctcaggaagactacgagagcaatttggcacccaacacagttgttgagaccgctcctgagtacgttcacgaggaagaagctcaacaaatagcacctgaagtacatgatgtggtcgaaaactatacttattctgagccacaacagcaagtagtgtcggacaactggggagaggagcctcttcctgaagaaccgccttctttctcaaatgaaatggcagtcgctcctgaggagccagtgcaagctccacctgtgccacttcctcacgtggatgagcctgtttgtgaaccagtaaagaagacttatgcttccatcctaaaaaccgcaaaggctcctgcattcccagtagcccagcaagtacctgtgagtaagacttctcaccctacaacagagtcaaaccaaacccagcattcagttatggcttcatcaatgggaaccgagaaaccgaggtctgatgtctttggtgagggtgcttcccatgatgacgaagagagcaaatctgtgtatgtcggcaacgtgccatcatctgtaagtgaggctgatcttgaaaacgagttcaagaaatttggccggcttattcctgacggtgttgctatcagaagccgaaaggagactggcggctattatgctttcgtggaattcgaggaactcagcggtgtacacaatgcgttaaaggcttcaccaattgaaataaatgggcggcagatatatgttgaggagaggaagccaaatagcggaataagagggaggggaggacgtggccgtttcagtggtggaggccggggatattcgagaggtggaggcgatgagtacaatagtaaccgtgggaggtcaaacggttacggtcgtgctcctcaccaagagaggggcatacttgggagccacaccccaaggaactgattcagtccagcagcaaacataaggttttgatccgtgtcgtcaaagcgagagagagagagatcctaaacaatctgcctatcagctactaggccgcgtttgggttttggggcttgttttgtcgatgaatgtgtgtgcgcgcgtcatcgacctatgtgacacttaaaacttttgctagtctgacgctatctctttacattaagatcggctgttctattaaccttgctgctattgttgctcgtgcatttctggcggtggtatttgatgttttgcctctgcatggaaaaggtttcagctttacatatgttacattgcagtcccccccaaaacttcttccgccaggcctagctagtgtcccgtcggcccatccacaccatttctt

SEQ ID NO: 67028 - DNA, 1745 bp, Zea Mays
ccttaatcccgcccgccaccctccgcggcggcccatcgtcgttagctcggggattaatctgccccacgcggcctgggtggggacttacttcctgcggaactactacaacctgctgcaacaaacccccgatgtcgtccaccagttctacagcgaagccagcaccatggtccgcgtcgacgacctcaccggcacgaccgcggctgccaacaacatgatggacatacactcactcatcatgtctttgaacttcacccaaattgagatcaagactgccaattttgtgaactcatggggcgatggggtgctagttatggtctctggtctagtgcagaccaaggagtacagccaccaaaggaaatttatccagatgttcttccttgcccctcaagagaagggttactttgtcctcaacgattactttcacttcgttgaccaagaacatgtgcagcctgcgccagtgattgctcaggaagactacgagagcaatttggcacccaacacagttgttgagaccgctcctgagtacgttcacgaggaagaagctcaacaaatagcacctgaagtacatgatgtggtcgaaaactatacttattctgagccacaacagcaagtagtgtcggacaactggggagaggagcctcttcctgaagaaccgccttctttctcaaatgaaatggcagtcgctcctgaggagccagtgcaagctccacctgtgccacttcctcacgtggatgagcctgtttgtgaaccagtaaagaagacttatgcttccatcctaaaaaccgcaaaggctcctgcattcccagtagcccagcaagtacctgtgagtaagacttctcaccctacaacagagtcaaaccaaacccagcattcagttatggcttcatcaatgggaaccgagaaaccgaggtctgatgtctttggtgagggtgcttcccatgatgacgaagagagcaaatctgtgtatgtcggcaacgtgccatcatctgtaagtgaggctgatcttgaaaacgagttcaagaaatttggccggcttattcctgacggtgttgctatcagaagccgaaaggagactggcggctattatgctttcgtggaattcgaggaactcagcggtgtacacaatgcgttaaaggcttcaccaattgaaataaatgggcggcagatatatgttgaggagaggaagccaaatagcggaataagaggtggaaggaggggaggacgtggccgtttcagtggtggaggccggggatattcgagaggtggaggcgatgagtacaatagtaaccgtgggaggtcaaacggttacggtcgtgctcctcaccaagagaggggcatacttgggagccacaccccaaggaactgattcagtccagcagcaaacataaggttttgatccgtgtcgtcaaagcgagagagagagagatcctaaacaatctgcctatcagctactaggccgcgtttgggttttggggcttgttttgtcgatgaatgtgtgtgcgcgcgtcatcgacctatgtgacacttaaaacttttgctagtctgacgctatctctttacattaagatcggctgttctattaaccttgctgctattgttgctcgtgcatttctggcggtggtatttgatgttttgcctctgcatggaaaaggtttcagctttacatatgttacattgcagtcccccccaaaacttcttccgccaggcctagctagtgtcccgtcggcccatccacaccatttctt

SEQ ID NO: 67029 - DNA, 1628 bp, Zea Mays
gattaatctgccccacgcggcctggttctacagcgaagccagcaccatggtccgcgtcgacgacctcaccggcacgaccgcggctgccaacaacatgatggacatacactcactcatcatgtctttgaacttcacccaaattgagatcaagactgccaattttgtgaactcatggggcgatggggtgctagttatggtctctggtctagtgcagaccaaggagtacagccaccaaaggaaatttatccagatgttcttccttgcccctcaagagaagggttactttgtcctcaacgattactttcacttcgttgaccaagaacatgtgcagcctgcgccagtgattgctcaggaagactacgagagcaatttggcacccaacacagttgttgagaccgctcctgagtacgttcacgaggaagaagctcaacaaatagcacctgaagtacatgatgtggtcgaaaactatacttattctgagccacaacagcaagtagtgtcggacaactggggagaggagcctcttcctgaagaaccgccttctttctcaaatgaaatggcagtcgctcctgaggagccagtgcaagctccacctgtgccacttcctcacgtggatgagcctgtttgtgaaccagtaaagaagacttatgcttccatcctaaaaaccgcaaaggctcctgcattcccagtagcccagcaagtacctgtgagtaagacttctcaccctacaacagagtcaaaccaaacccagcattcagttatggcttcatcaatgggaaccgagaaaccgaggtctgatgtctttggtgagggtgcttcccatgatgacgaagagagcaaatctgtgtatgtcggcaacgtgccatcatctgtaagtgaggctgatcttgaaaacgagttcaagaaatttggccggcttattcctgacggtgttgctatcagaagccgaaaggagactggcggctattatgctttcgtggaattcgaggaactcagcggtgtacacaatgcgttaaaggcttcaccaattgaaataaatgggcggcagatatatgttgaggagaggaagccaaatagcggaataagaggtggaaggaggggaggacgtggccgtttcagtggtggaggccggggatattcgagaggtggaggcgatgagtacaatagtaaccgtgggaggtcaaacggttacggtcgtgctcctcaccaagagaggggcatacttgggagccacaccccaaggaactgattcagtccagcagcaaacataaggttttgatccgtgtcgtcaaagcgagagagagagagatcctaaacaatctgcctatcagctactaggccgcgtttgggttttggggcttgttttgtcgatgaatgtgtgtgcgcgcgtcatcgacctatgtgacacttaaaacttttgctagtctgacgctatctctttacattaagatcggctgttctattaaccttgctgctattgttgctcgtgcatttctggcggtggtatttgatgttttgcctctgcatggaaaaggtttcagctttacatatgttacattgcagtcccccccaaaacttcttccgccaggcctagctagtgtcccgtcggcccatccacaccatttctt

SEQ ID NO: 67030 - DNA, 1571 bp, Zea Mays
cccccaccccccaaaataaaaaaatgatctttgaactgctggcgacatacactcactcatcatgtctttgaacttcacccaaattgagatcaagactgccaattttgtgaactcatggggcgatggggtgctagttatggtctctggtctagtgcagaccaaggagtacagccaccaaaggaaatttatccagatgttcttccttgcccctcaagagaagggttactttgtcctcaacgattactttcacttcgttgaccaagaacatgtgcagcctgcgccagtgattgctcaggaagactacgagagcaatttggcacccaacacagttgttgagaccgctcctgagtacgttcacgaggaagaagctcaacaaatagcacctgaagtacatgatgtggtcgaaaactatacttattctgagccacaacagcaagtagtgtcggacaactggggagaggagcctcttcctgaagaaccgccttctttctcaaatgaaatggcagtcgctcctgaggagccagtgcaagctccacctgtgccacttcctcacgtggatgagcctgtttgtgaaccagtaaagaagacttatgcttccatcctaaaaaccgcaaaggctcctgcattcccagtagcccagcaagtacctgtgagtaagacttctcaccctacaacagagtcaaaccaaacccagcattcagttatggcttcatcaatgggaaccgagaaaccgaggtctgatgtctttggtgagggtgcttcccatgatgacgaagagagcaaatctgtgtatgtcggcaacgtgccatcatctgtaagtgaggctgatcttgaaaacgagttcaagaaatttggccggcttattcctgacggtgttgctatcagaagccgaaaggagactggcggctattatgctttcgtggaattcgaggaactcagcggtgtacacaatgcgttaaaggcttcaccaattgaaataaatgggcggcagatatatgttgaggagaggaagccaaatagcggaataagaggtggaaggaggggaggacgtggccgtttcagtggtggaggccggggatattcgagaggtggaggcgatgagtacaatagtaaccgtgggaggtcaaacggttacggtcgtgctcctcaccaagagaggggcatacttgggagccacaccccaaggaactgattcagtccagcagcaaacataaggttttgatccgtgtcgtcaaagcgagagagagagagatcctaaacaatctgcctatcagctactaggccgcgtttgggttttggggcttgttttgtcgatgaatgtgtgtgcgcgcgtcatcgacctatgtgacacttaaaacttttgctagtctgacgctatctctttacattaagatcggctgttctattaaccttgctgctattgttgctcgtgcatttctggcggtggtatttgatgttttgcctctgcatggaaaaggtttcagctttacatatgttacattgcagtcccccccaaaacttcttccgccaggcctagctagtgtcccgtcggcccatccacaccatttctt

SEQ ID NO: 67031 - DNA, 3541 bp, Zea Mays
gccgccccagtcgcgcatcccgcagccgcgccgcgccgcaacccgcagcctccccgcatacgcccacagccgccccacgcgcgcatcccgcagccgcgcgatccgtccgcttcctcctccccgcgcccgcagcccccgccgccgatgccagccgccgcgcccgcgcaagggaagttgcttcccaaatcccgcagacaagatttaatcccgtgattcttcccatccatggcagccgtgcccgcaaaccgcgcctccccacgactcccacttccatggcgtcgcccccttccatccatggcagtcacgctccctctgcgcccttccatccatggctgcggctccctccgcgccgcaattcttcccatcctctccttccgcgcggtttgcggctaccaatcctctccctctgcgtcgtgttcttcccatcctctccctccgcgccggatctcgccccatgtccaccaacgccggtgtccgtgatggcgcgctcggggcagcggtggacgcagcctttgccaggcgtgtgctccaggccgaggccctcctcgggtacctctccgcgctggccaccagcccgcgtgccgagggcgacagggtggaccccgccgtcgccgcggcgcagctcggggcgctcggccggtggaagggctcggcgaggggccttcccgagtacacggtcgtccacggcatcgatggtgccgtcgtcgccgcccctgggagagccaaagccaagcagaggaggccgcagtcgaccggatttgggaatcctgctcctgccaaacgggatgaacggaaggaagcaaaatctttctggggttgatttggcttgaaggaagcgggatctttctggacaatggctgtctagcttcatccattctggtaacaaagaaaaaaacaagaaacatctggtatctgagtccagtagaaagttgtgcaaagagaagagcaaaatatctacaccagacgtctcttttaggtacagagggatggagtcttgtaagaaggtagctgcaagcttgaagtcgtgtgagccatgggggaacagggcatcctggacaaacgccgttgggccaggttggaagttgagctttgctgttgagccatggactaagggctttagcgcgtcgtgtgcggcgccatattctgctggagccacagagcatcaattatcgctcgatgagaaggtggataactccaccgttgcatctggttttgatgggtaaagttatctatcagctagattcatggcaggaaaggttttttctattgtcggtatccagcacctaagtaggcctaggatttttttcttctatctttaattagcaattgcctttttcagcaacccgttcttatgaatttcttttattgacaacatgaattagtctattttagttcatctctttcttgtcacaaatttaaatgaatataattgtttgtttcagtggcaattctgtgaagcccaaaggttccaagtcaccatgaaaaaattgaaatgacgagatctcttaatctaattgttgcaccttggaaggtctgaaccatcatagtttaattgtatcacccatttacacaagttcctaccatcagagttcaactgtatcacccatccataagcaattccttttgttgaaatttatgagaagacatatgcctctgttaagtctcaggaacttttttgctgggaagccaattccttactgatctgagggacaacatttttgtttgcctgatataaggtgatgaaggtggctggataacacgattatgggtaaagtgtgaaagggaaacgcgaaaagaaacgtgtcctggtcccaagtcacctgccatactgaacacgattgatcgcagaaagaaacacgttctggtctagactgacagttttggagctggagccggccatgcgctcgatcagagttccgctgcagccacgacctctctcccgaacgcgcacgaggagaccaggtggaacatatgcaagcaggttctagagcaataaccccatgaatccagatcgggggtctgcatctacacgggcgtgtactccgcaccgctcccctccggccccgaccgccgtgtgctcgttgtagccggggtcgacctcaaccacgacgacgatgcggtctcctcgccccaggctcgacctcctcgctgacctcgccctgctccacctcaactcgcgatgaggattgtcggcacgttcacaccgcgccgttgcagaacgttggagcctctcagaactctagaagctgcctaccaccacgcaccctaagataggggcatatctgtgttagtcgcctgcacacatactgaaatatgggcatatccaccatgtattcttctcttagttatgttagataagacttttactctgtcatttactgatctggtctgtttttagctccattagcttgttcacaagcttatgttagagaaggcgttatggcttttctcaagattataacatttctgaataactgttctgcgtaggcatggtaccatcttcatcatgtagctgggatgagctggcaccatgaaagaattcaagtggttaaatcatgcatctgcagaaatattgtactctcaaatggtgggttgctgcgtcatgggagtttgggtgaaggcctgaaggatgtgatgcaaaacgtcgatgcaggtctgggatgtccgcctcattatggatcaaaattcatgacgttctaaaggtgtcggatgagtacctatatactccctcccagaaaacaaggcgcctcattacactattggaagctggacgacatggatgactctggcaagatgcggtgggagcacgacgacatggatgactccgaccatgagttcgacaggaagcctagcaacagtacgcagtagcaaggttgaccagaggggcagtggagactaacccaacaccccctcctccgaccgtcatagcgcttctttcctctggcttcatttcttacctatgtatggatggtcttcaccactggttacatctagcaagtcctcctagggtgacatgaaggagattgtcatgctgccaaagcacatcaaggacaatgcaaacaaggacagaggaagaccggacatgccatttccagacccgtggatctaattgcttttgcaagggaaagagatatgccttctgattcagataggaccttaaatgaagacaagcgtttcatatcttgtagtatgccacaggagcatcaaaagatctttgaattgggctgaagaaaacatagaatatagtgtaatcttatagtataaaatttagagtctattgtcacccatacatataagtcttgtgaacgtttatggaaccagggaataagacattgttctgtatggccagtctgttggtagcagaccaacccttgatctagctattcgtttcaatcatgaagagatgtggtattaatcatagataagggatgtttagttccagagactaaagtttagtacgtgtcacatagaatatttgaatctcattttactatggatttatatatcatagtgacatttgtcgttatgtattgatgtttta

SEQ ID NO: 67032 - DNA, 3684 bp, Zea Mays
ccgcaacccgcagcctccccgcatacgcccacagccgccccacgcgcgcatcccgcagccgcgcgatccgtccgcttcctcctccccgcgcccgcagcccccgccgccgatgccagccgccgcgcccgcgcaagggaagttgcttcccaaatcccgcagacaagatttaatcccgtgattcttcccatccatggcagccgtgcccgcaaaccgcgcctccccacgactcccacttccatggcgtcgcccccttccatccatggcagtcacgctccctctgcgcccttccatccatggctgcggctccctccgcgccgcaattcttcccatcctctccttccgcgcggtttgcggctaccaatcctctccctctgcgtcgtgttcttcccatcctctccctccgcgccggatctcgccccatgtccaccaacgccggtgtccgtgatggcgcgctcggggcagcggtggacgcagcctttgccaggcgtgtgctccaggccgaggccctcctcgggtacctctccgcgctggccaccagcccgcgtgccgagggcgacagggtggaccccgccgtcgccgcggcgcagctcggggcgctcggccggtggaagggctcggcgaggggccttcccgagtacacggtcgtccacggcatcgatggtgccgtcgtcgccgcccctgggagagccaaagccaagcagaggaggccgcagtcgaccggatttgggaatcctgctcctgccaaacgggatgaacggaaggaagcaaaatctttctggggttgatttggcttgaaggaagcgggatctttctggacaatggctgtctagcttcatccattctggtaacaaagaaaaaaacaagaaacatctggtatctgagtccagtagaaagttgtgcaaagagaagagcaaaatatctacaccagacgtctcttttaggtacagagggatggagtcttgtaagaaggtagctgcaagcttgaagtcgtgtgagccatgggggaacagggcatcctggacaaacgccgttgggccaggttggaagttgagctttgctgttgagccatggactaagggctttagcgcgtcgtgtgcggcgccatattctgctggagccacagagcatcaattatcgctcgatgagaaggtggataactccaccgttgcatctggttttgatgggtaaagttatctatcagctagattcatggcaggaaaggttttttctattgtcggtatccagcacctaatggcaattctgtgaagcccaaaggttccaagtcaccatgaaaaaattgaaatgacgagatctcttaatctaattgttgcaccttggaaggtctgaaccatcatagtttaattgtatcacccatttacacaagttcctaccatcagagttcaactgtatcacccatccataagcaattccttttgttgaaatttatgagaagacatatgcctctgttaagtctcaggaacttttttgctgggaagccaattccttactgatctgagggacaacatttttgtttgcctgatataaggtgatgaaggtggctggataacacgattatgggtaaagtgtgaaagggaaacgcgaaaagaaacgtgtcctggtcccaagtcacctgccatactgaacacgattgatcgcagaaagaaacacgttctggtctagactgacaggttccgctgctactattttgtatatataaactatcttatataaagagtacgcacttcgttctcccatttatgaaaattattcatagttttggagctggagccggccatgcgctcgatcagagttccgctgcagccacgacctctctcccgaacgcgcacgaggagaccaggtggaacatatgcaagcaggttctagagcaataaccccatgaatccagatcgggggtctgcatctacacgggcgtgtactccgcaccgctcccctccggccccgaccgccgtgtgctcgttgtagccggggtcgacctcaaccacgacgacgatgcggtctcctcgccccaggctcgacctcctcgctgacctcgccctgctccacctcaactcgcgatgaggattgtcggcacgttcacaccgcgccgttgcagaacgttggagcctctcagaactctagaagctgcctaccaccacgcaccctaagataggggcatatctgtgcatggtaccatcttcatcatgtagctgggatgagctggcaccatgaaagaattcaagtggttaaatcatgcatctgcagaaatattgtactctcaaatggtgggttgctgcgtcatgggagtttgggtgaaggcctgaaggatgtgatgcaaaacgtcgatgcaggtctgggatgtccgcctcattatggatcaaaattcatgacgttctaaaggtgtcggatgagtacctatatactccctcccagaaaacaaggcgcctcattacactattggaagctggacgacatggatgactctggcaagatgcggtgggagcacgacgacatggatgactccgaccatgagttcgacaggaagcctagcaacagtacgcagtagcaaggttgaccagaggggcagtggagactaacccaacaccccctcctccgaccgtcatagcgcttctttcctctggcttcatttcttacctatgtatggatggtcttcaccactggttacatctagcaagtcctcctaggggtgagctcaattttctcctgatttgctctctcctttgttttttattgattcatctatgcacatttaatgatctatggcgtgccttcaatgcaattggtggaggcagtgacatgaaggagattgtcatgctgccaaagcacatcaaggacaatgcaaacaaggacagaggaagaccggacatgccatttccaggtggtgacatttctattctcacgcgcccacccaacatttttgcttttactaaatgactatgtgcgcgaatgctttgtggatgttgagagggattatctgtgcttgacaaaacagtatcccagacttgcaattactccagaattttctaaggttgggcattttgtacattgaacttttgttgctgatcgatattcaatgtggcttttggcattctctgtcactctagctaggtccttggatgagccacactattgacatgggtttaggatataatgcacatgggttagttcatctctttttcttttgcacccaagtatgccattttggggatttctccactatacccgtggatctaattgcttttgcaagggaaagagatatgccttctgattcagataggaccttaaatgaagacaagcgtttcatatcttgtagtatgccacaggagcatcaaaagatctttgaattgggctgaagaaaacatagaatatagtgtaatcttatagtataaaatttagagtctattgtcacccatacatataagtcttgtgaacgtttatggaaccagggaataagacattgttctgtatggccagtctgttggtagcagaccaacccttgatctagctattcgtttcaatcatgaagagatgtggtattaatcatagataagggatgtttagttccagagactaaagtttagtacgtgtcacatagaatatttgaatctcattttactatggatttatatatcatagtgacatttgtcgttatgtattgatgtttta

SEQ ID NO: 67033 - DNA, 4081 bp, Zea Mays
cgcatacgcccacagccgccccacgcgcgcatcccgcagccgcgcgatccgtccgcttcctcctccccgcgcccgcagcccccgccgccgatgccagccgccgcgcccgcgcaagggaagttgcttcccaaatcccgcagacaagatttaatcccgtgattcttcccatccatggcagccgtgcccgcaaaccgcgcctccccacgactcccacttccatggcgtcgcccccttccatccatggcagtcacgctccctctgcgcccttccatccatggctgcggctccctccgcgccgcaattcttcccatcctctccttccgcgcggtttgcggctaccaatcctctccctctgcgtcgtgttcttcccatcctctccctccgcgccggatctcgccccatgtccaccaacgccggtgtccgtgatggcgcgctcggggcagcggtggacgcagcctttgccaggcgtgtgctccaggccgaggccctcctcgggtacctctccgcgctggccaccagcccgcgtgccgagggcgacagggtggaccccgccgtcgccgcggcgcagctcggggcgctcggccggtggaagggctcggcgaggggccttcccgagtacacggtcgtccacggcatcgatggtgccgtcgtcgccgcccctgggagagccaaagccaagcagaggaggccgcagtcgaccggatttgggaatcctgctcctgccaaacgggatgaacggaaggaagcaaaatctttctggggttgatttggcttgaaggaagcgggatctttctggacaatggctgtctagcttcatccattctggtacagagggatggagtcttgtaagaaggtagctgcaagcttgaagtcgtgtgagccatgggggaacagggcatcctggacaaacgccgttgggccaggttggaagttgagctttgctgttgagccatggactaagggctttagcgcgtcgtgtgcggcgccatattctgctggagccacagagcatcaattatcgctcgatgagaaggtggataactccaccgttgcatctggttttgatgggtaaagttatctatcagctagattcatggcaggaaaggttttttctattgtcggtatccagcacctaagtaggcctaggatttttttcttctatctttaattagcaattgcctttttcagcaacccgttcttatgaatttcttttattgacaacatgaattagtctattttagttcatctctttcttgtcacaaatttaaatgaatataattgtttgtttcagtggcaattctgtgaagcccaaaggttccaagtcaccatgaaaaaattgaaatgacgagatctcttaatctaattgttgcaccttggaaggtctgaaccatcatagtttaattgtatcacccatttacacaagttcctaccatcagagttcaactgtatcacccatccataagcaattccttttgttgaaatttatgagaagacatatgcctctgttaagtctcaggaacttttttgctgggaagccaattccttactgatctgagggacaacatttttgtttgcctgatataaggtaaagtgtgaaagggaaacgcgaaaagaaacgtgtcctggtcccaagtcacctgccatactgaacacgattgatcgcagaaagaaacacgttctggtctagactgacaggttccgctgctactattttgtatatataaactatcttatataaagagtacgcacttcgttctcccatttatgaaaattattcatagttttggagctggagccggccatgcgctcgatcagagttccgctgcagccacgacctctctcccgaacgcgcacgaggagaccaggtggaacatatgcaagcaggttctagagcaataaccccatgaatccagatcgggggtctgcatctacacgggcgtgtactccgcaccgctcccctccggccccgaccgccgtgtgctcgttgtagccggggtcgacctcaaccacgacgacgatgcggtctcctcgccccaggctcgacctcctcgctgacctcgccctgctccacctcaactcgcgatgaggattgtcggcacgttcacaccgcgccgttgcagaacgttggagcctctcagaactctagaagctgcctaccaccacgcaccctaagataggggcatatctgtaaatattgtactctcaaatggtgggttgctgcgtcatgggagtttgggtgaaggcctgaaggatgtgatgcaaaacgtcgatgcaggtctgggatgtccgcctcattatggatcaaaattcatgacgttctaaaggtgtcggatgagtacctatatactccctcccagaaaacaaggcgcctcattacactattggaagctggacgacatggatgactctggcaagatgcggtgggagcacgacgacatggatgactccgaccatgagttcgacaggaagcctagcaacagtacgcagtagcaaggttgaccagaggggcagtggagactaacccaacaccccctcctccgaccgtcatagcgcttctttcctctggcttcatttcttacctatgtatggatggtcttcaccactggttacatctagcaagtcctcctagggtgacatgaaggagattgtcatgctgccaaagcacatcaaggacaatgcaaacaaggacagaggaagaccggacatgccatttccaggtggtgacatttctattctcacgcgcccacccaacatttttgcttttactaaatgactatgtgcgcgaatgctttgtggatgttgagagggattatctgtgcttgacaaaacagtatcccagacttgcaattactccagaattttctaaggttgggcattttgtacattgaacttttgttgctgatcgatattcaatgtggcttttggcattctctgtcactctagctaggtccttggatgagccacactattgacatgggtttaggtgagtgactcatcacggtgcctttatatggctcgatcaattccaaatttgctatagtctagttgtcactagaatttcctcatttggcatgcaataattacaattgatttgcctggtactctgattgaaatgggaaagttgagtgcttacatatgttgatccacaatatttctttattgtcaagggcagagttaaagtgaattgtgtggattcacaccaactgcacctttggatctcttctgggtcgtttcatttcaaaaaatactggccatatccccctctatatctggtaaacatagattgaggactagatagatcaggataaacaaggcgtgttaattgttgacaaatacaataaaagtaaaatcacagtaatgacgagtgaacaaacatgccttcgctgcttcatctgtttgaaactagagatatcaacctttaagtgcagcttaaggttttttgggatgattctttgtttatcatcgcaggatataatgcacatgggttagttcatctctttttcttttgcacccaagtatgccattttggggatttctccactatgtatgtttaaatgagcacattatttagaagccttttattatcatgttgttatgttctatgttgtttactgcttgcttggtgtaatctctagacccgtggatctaattgcttttgcaagggaaagagatatgccttctgattcagataggaccttaaatgaagacaagcgtttcatatcttgtagtatgccacaggagcatcaaaagatctttgaattgggctgaagaaaacatagaatatagtgtaatcttatagtataaaatttagagtctattgtcacccatacatataagtcttgtgaacgtttatggaaccagggaataagacattgttctgtatggccagtctgttggtagcagaccaacccttgatctagctattcgtttcaatcatgaagagatgtggtattaatcatagataagggatgtttagttccagagactaaagtttagtacgtgtcacatagaatatttgaatctcattttactatggatttatatatcatagtgacatttgtcgttatgtattgatgtttta

SEQ ID NO: 67034 - DNA, 3852 bp, Zea Mays
cgcatacgcccacagccgccccacgcgcgcatcccgcagccgcgcgatccgtccgcttcctcctccccgcgcccgcagcccccgccgccgatgccagccgccgcgcccgcgcaagggaagttgcttcccaaatcccgcagacaagatttaatcccgtgattcttcccatccatggcagccgtgcccgcaaaccgcgcctccccacgactcccacttccatggcgtcgcccccttccatccatggcagtcacgctccctctgcgcccttccatccatggctgcggctccctccgcgccgcaattcttcccatcctctccttccgcgcggtttgcggctaccaatcctctccctctgcgtcgtgttcttcccatcctctccctccgcgccggatctcgccccatgtccaccaacgccggtgtccgtgatggcgcgctcggggcagcggtggacgcagcctttgccaggcgtgtgctccaggccgaggccctcctcgggtacctctccgcgctggccaccagcccgcgtgccgagggcgacagggtggaccccgccgtcgccgcggcgcagctcggggcgctcggccggtggaagggctcggcgaggggccttcccgagtacacggtcgtccacggcatcgatggtgccgtcgtcgccgcccctgggagagccaaagccaagcagaggaggccgcagtcgaccggatttgggaatcctgctcctgccaaacgggatgaacggaaggaagcaaaatctttctggggttgatttggcttgaaggaagcgggatctttctggacaatggctgtctagcttcatccattctggtacagagggatggagtcttgtaagaaggtagctgcaagcttgaagtcgtgtgagccatgggggaacagggcatcctggacaaacgccgttgggccaggttggaagttgagctttgctgttgagccatggactaagggctttagcgcgtcgtgtgcggcgccatattctgctggagccacagagcatcaattatcgctcgatgagaaggtggataactccaccgttgcatctggttttgatggtggcaattctgtgaagcccaaaggttccaagtcaccatgaaaaaattgaaatgacgagatctcttaatctaattgttgcaccttggaaggtctgaaccatcatagtttaattgtatcacccatttacacaagttcctaccatcagagttcaactgtatcacccatccataagcaattccttttgttgaaatttatgagaagacatatgcctctgttaagtctcaggaacttttttgctgggaagccaattccttactgatctgagggacaacatttttgtttgcctgatataaggtaaagtgtgaaagggaaacgcgaaaagaaacgtgtcctggtcccaagtcacctgccatactgaacacgattgatcgcagaaagaaacacgttctggtctagactgacagttttggagctggagccggccatgcgctcgatcagagttccgctgcagccacgacctctctcccgaacgcgcacgaggagaccaggtggaacatatgcaagcaggttctagagcaataaccccatgaatccagatcgggggtctgcatctacacgggcgtgtactccgcaccgctcccctccggccccgaccgccgtgtgctcgttgtagccggggtcgacctcaaccacgacgacgatgcggtctcctcgccccaggctcgacctcctcgctgacctcgccctgctccacctcaactcgcgatgaggattgtcggcacgttcacaccgcgccgttgcagaacgttggagcctctcagaactctagaagctgcctaccaccacgcaccctaagataggggcatatctgtgcatggtaccatcttcatcatgtagctgggatgagctggcaccatgaaagaattcaagtggttaaatcatgcatctgcagaaatattgtactctcaaatggtgggttgctgcgtcatgggagtttgggtgaaggcctgaaggatgtgatgcaaaacgtcgatgcaggtctgggatgtccgcctcattatggatcaaaattcatgacgttctaaaggtgtcggatgagtacctatatactccctcccagaaaacaaggcgcctcattacactattggaagctggacgacatggatgactctggcaagatgcggtgggagcacgacgacatggatgactccgaccatgagttcgacaggaagcctagcaacagtacgcagtagcaaggttgaccagaggggcagtggagactaacccaacaccccctcctccgaccgtcatagcgcttctttcctctggcttcatttcttacctatgtatggatggtcttcaccactggttacatctagcaagtcctcctagggtgacatgaaggagattgtcatgctgccaaagcacatcaaggacaatgcaaacaaggacagaggaagaccggacatgccatttccaggtggtgacatttctattctcacgcgcccacccaacatttttgcttttactaaatgactatgtgcgcgaatgctttgtggatgttgagagggattatctgtgcttgacaaaacagtatcccagacttgcaattactccagaattttctaaggttgggcattttgtacattgaacttttgttgctgatcgatattcaatgtggcttttggcattctctgtcactctagctaggtccttggatgagccacactattgacatgggtttaggtgagtgactcatcacggtgcctttatatggctcgatcaattccaaatttgctatagtctagttgtcactagaatttcctcatttggcatgcaataattacaattgatttgcctggtactctgattgaaatgggaaagttgagtgcttacatatgttgatccacaatatttctttattgtcaagggcagagttaaagtgaattgtgtggattcacaccaactgcacctttggatctcttctgggtcgtttcatttcaaaaaatactggccatatccccctctatatctggtaaacatagattgaggactagatagatcaggataaacaaggcgtgttaattgttgacaaatacaataaaagtaaaatcacagtaatgacgagtgaacaaacatgccttcgctgcttcatctgtttgaaactagagatatcaacctttaagtgcagcttaaggttttttgggatgattctttgtttatcatcgcaggatataatgcacatgggttagttcatctctttttcttttgcacccaagtatgccattttggggatttctccactatgtatgtttaaatgagcacattatttagaagccttttattatcatgttgttatgttctatgttgtttactgcttgcttggtgtaatctctagacccgtggatctaattgcttttgcaagggaaagagatatgccttctgattcagataggaccttaaatgaagacaagcgtttcatatcttgtagtatgccacaggagcatcaaaagatctttgaattgggctgaagaaaacatagaatatagtgtaatcttatagtataaaatttagagtctattgtcacccatacatataagtcttgtgaacgtttatggaaccagggaataagacattgttctgtatggccagtctgttggtagcagaccaacccttgatctagctattcgtttcaatcatgaagagatgtggtattaatcatagataagggatgtttagttccagagactaaagtttagtacgtgtcacatagaatatttgaatctcattttactatggatttatatatcatagtgacatttgtcgttatgtattgatgtttta

SEQ ID NO: 67035 - DNA, 3858 bp, Zea Mays
cgcatacgcccacagccgccccacgcgcgcatcccgcagccgcgcgatccgtccgcttcctcctccccgcgcccgcagcccccgccgccgatgccagccgccgcgcccgcgcaagggaagttgcttcccaaatcccgcagacaagatttaatcccgtgattcttcccatccatggcagccgtgcccgcaaaccgcgcctccccacgactcccacttccatggcgtcgcccccttccatccatggcagtcacgctccctctgcgcccttccatccatggctgcggctccctccgcgccgcaattcttcccatcctctccttccgcgcggtttgcggctaccaatcctctccctctgcgtcgtgttcttcccatcctctccctccgcgccggatctcgccccatgtccaccaacgccggtgtccgtgatggcgcgctcggggcagcggtggacgcagcctttgccaggcgtgtgctccaggccgaggccctcctcgggtacctctccgcgctggccaccagcccgcgtgccgagggcgacagggtggaccccgccgtcgccgcggcgcagctcggggcgctcggccggtggaagggctcggcgaggggccttcccgagtacacggtcgtccacggcatcgatggtgccgtcgtcgccgcccctgggagagccaaagccaagcagaggaggccgcagtcgaccggatttgggaatcctgctcctgccaaacgggatgaacggaaggaagcaaaatctttctggggttgatttggcttgaaggaagcgggatctttctggacaatggctgtctagcttcatccattctggtacagagggatggagtcttgtaagaaggtagctgcaagcttgaagtcgtgtgagccatgggggaacagggcatcctggacaaacgccgttgggccaggttggaagttgagctttgctgttgagccatggactaagggctttagcgcgtcgtgtgcggcgccatattctgctggagccacagagcatcaattatcgctcgatgagaaggtggataactccaccgttgcatctggttttgatggtggcaattctgtgaagcccaaaggttccaagtcaccatgaaaaaattgaaatgacgagatctcttaatctaattgttgcaccttggaaggtctgaaccatcatagtttaattgtatcacccatttacacaagttcctaccatcagagttcaactgtatcacccatccataagcaattccttttgttgaaatttatgagaagacatatgcctctgttaagtctcaggaacttttttgctgggaagccaattccttactgatctgagggacaacatttttgtttgcctgatataaggtaaagtgtgaaagggaaacgcgaaaagaaacgtgtcctggtcccaagtcacctgccatactgaacacgattgatcgcagaaagaaacacgttctggtctagactgacaggttccgctgctactattttgtatatataaactatcttatataaagagtacgcacttcgttctcccatttatgaaaattattcatagttttggagctggagccggccatgcgctcgatcagagttccgctgcagccacgacctctctcccgaacgcgcacgaggagaccaggtggaacatatgcaagcaggttctagagcaataaccccatgaatccagatcgggggtctgcatctacacgggcgtgtactccgcaccgctcccctccggccccgaccgccgtgtgctcgttgtagccggggtcgacctcaaccacgacgacgatgcggtctcctcgccccaggctcgacctcctcgctgacctcgccctgctccacctcaactcgcgatgaggattgtcggcacgttcacaccgcgccgttgcagaacgttggagcctctcagaactctagaagctgcctaccaccacgcaccctaagataggggcatatctgtaaatattgtactctcaaatggtgggttgctgcgtcatgggagtttgggtgaaggcctgaaggatgtgatgcaaaacgtcgatgcaggtctgggatgtccgcctcattatggatcaaaattcatgacgttctaaaggtgtcggatgagtacctatatactccctcccagaaaacaaggcgcctcattacactattggaagctggacgacatggatgactctggcaagatgcggtgggagcacgacgacatggatgactccgaccatgagttcgacaggaagcctagcaacagtacgcagtagcaaggttgaccagaggggcagtggagactaacccaacaccccctcctccgaccgtcatagcgcttctttcctctggcttcatttcttacctatgtatggatggtcttcaccactggttacatctagcaagtcctcctagggtgacatgaaggagattgtcatgctgccaaagcacatcaaggacaatgcaaacaaggacagaggaagaccggacatgccatttccaggtggtgacatttctattctcacgcgcccacccaacatttttgcttttactaaatgactatgtgcgcgaatgctttgtggatgttgagagggattatctgtgcttgacaaaacagtatcccagacttgcaattactccagaattttctaaggttgggcattttgtacattgaacttttgttgctgatcgatattcaatgtggcttttggcattctctgtcactctagctaggtccttggatgagccacactattgacatgggtttaggtgagtgactcatcacggtgcctttatatggctcgatcaattccaaatttgctatagtctagttgtcactagaatttcctcatttggcatgcaataattacaattgatttgcctggtactctgattgaaatgggaaagttgagtgcttacatatgttgatccacaatatttctttattgtcaagggcagagttaaagtgaattgtgtggattcacaccaactgcacctttggatctcttctgggtcgtttcatttcaaaaaatactggccatatccccctctatatctggtaaacatagattgaggactagatagatcaggataaacaaggcgtgttaattgttgacaaatacaataaaagtaaaatcacagtaatgacgagtgaacaaacatgccttcgctgcttcatctgtttgaaactagagatatcaacctttaagtgcagcttaaggttttttgggatgattctttgtttatcatcgcaggatataatgcacatgggttagttcatctctttttcttttgcacccaagtatgccattttggggatttctccactatgtatgtttaaatgagcacattatttagaagccttttattatcatgttgttatgttctatgttgtttactgcttgcttggtgtaatctctagacccgtggatctaattgcttttgcaagggaaagagatatgccttctgattcagataggaccttaaatgaagacaagcgtttcatatcttgtagtatgccacaggagcatcaaaagatctttgaattgggctgaagaaaacatagaatatagtgtaatcttatagtataaaatttagagtctattgtcacccatacatataagtcttgtgaacgtttatggaaccagggaataagacattgttctgtatggccagtctgttggtagcagaccaacccttgatctagctattcgtttcaatcatgaagagatgtggtattaatcatagataagggatgtttagttccagagactaaagtttagtacgtgtcacatagaatatttgaatctcattttactatggatttatatatcatagtgacatttgtcgttatgtattgatgtttta

SEQ ID NO: 67036 - DNA, 3700 bp, Zea Mays
cgcatacgcccacagccgccccacgcgcgcatcccgcagccgcgcgatccgtccgcttcctcctccccgcgcccgcagcccccgccgccgatgccagccgccgcgcccgcgcaagggaagttgcttcccaaatcccgcagacaagatttaatcccgtgattcttcccatccatggcagccgtgcccgcaaaccgcgcctccccacgactcccacttccatggcgtcgcccccttccatccatggcagtcacgctccctctgcgcccttccatccatggctgcggctccctccgcgccgcaattcttcccatcctctccttccgcgcggtttgcggctaccaatcctctccctctgcgtcgtgttcttcccatcctctccctccgcgccggatctcgccccatgtccaccaacgccggtgtccgtgatggcgcgctcggggcagcggtggacgcagcctttgccaggcgtgtgctccaggccgaggccctcctcgggtacctctccgcgctggccaccagcccgcgtgccgagggcgacagggtggaccccgccgtcgccgcggcgcagctcggggcgctcggccggtggaagggctcggcgaggggccttcccgagtacacggtcgtccacggcatcgatggtgccgtcgtcgccgcccctgggagagccaaagccaagcagaggaggccgcagtcgaccggatttgggaatcctgctcctgccaaacgggatgaacggaaggaagcaaaatctttctggggttgatttggcttgaaggaagcgggatctttctggacaatggctgtctagcttcatccattctggtacagagggatggagtcttgtaagaaggtagctgcaagcttgaagtcgtgtgagccatgggggaacagggcatcctggacaaacgccgttgggccaggttggaagttgagctttgctgttgagccatggactaagggctttagcgcgtcgtgtgcggcgccatattctgctggagccacagagcatcaattatcgctcgatgagaaggtggataactccaccgttgcatctggttttgatgggtaaagttatctatcagctagattcatggcaggaaaggttttttctattgtcggtatccagcacctaagtaggcctaggatttttttcttctatctttaattagcaattgcctttttcagcaacccgttcttatgaatttcttttattgacaacatgaattagtctattttagttcatctctttcttgtcacaaatttaaatgaatataattgtttgtttcagtggcaattctgtgaagcccaaaggttccaagtcaccatgaaaaaattgaaatgacgagatctcttaatctaattgttgcaccttggaaggtctgaaccatcatagtttaattgtatcacccatttacacaagttcctaccatcagagttcaactgtatcacccatccataagcaattccttttgttgaaatttatgagaagacatatgcctctgttaagtctcaggaacttttttgctgggaagccaattccttactgatctgagggacaacatttttgtttgcctgatataaggtaaagtgtgaaagggaaacgcgaaaagaaacgtgtcctggtcccaagtcacctgccatactgaacacgattgatcgcagaaagaaacacgttctggtctagactgacagttttggagctggagccggccatgcgctcgatcagagttccgctgcagccacgacctctctcccgaacgcgcacgaggagaccaggtggaacatatgcaagcaggttctagagcaataaccccatgaatccagatcgggggtctgcatctacacgggcgtgtactccgcaccgctcccctccggccccgaccgccgtgtgctcgttgtagccggggtcgacctcaaccacgacgacgatgcggtctcctcgccccaggctcgacctcctcgctgacctcgccctgctccacctcaactcgcgatgaggattgtcggcacgttcacaccgcgccgttgcagaacgttggagcctctcagaactctagaagctgcctaccaccacgcaccctaagataggggcatatctgtgttagtcgcctgcacacatactgaaatatgggcatatccaccatgtattcttctcttagttatgttagataagacttttactctgtcatttactgatctggtctgtttttagctccattagcttgttcacaagcttatgttagagaaggcgttatggcttttctcaagattataacatttctgaataactgttctgcgtaggcatggtaccatcttcatcatgtagctgggatgagctggcaccatgaaagaattcaagtggttaaatcatgcatctgcagaaatattgtactctcaaatggtgggttgctgcgtcatgggagtttgggtgaaggcctgaaggatgtgatgcaaaacgtcgatgcaggtctgggatgtccgcctcattatggatcaaaattcatgacgttctaaaggtgtcggatgagtacctatatactccctcccagaaaacaaggcgcctcattacactattggaagctggacgacatggatgactctggcaagatgcggtgggagcacgacgacatggatgactccgaccatgagttcgacaggaagcctagcaacagtacgcagtagcaaggttgaccagaggggcagtggagactaacccaacaccccctcctccgaccgtcatagcgcttctttcctctggcttcatttcttacctatgtatggatggtcttcaccactggttacatctagcaagtcctcctagggtgacatgaaggagattgtcatgctgccaaagcacatcaaggacaatgcaaacaaggacagaggaagaccggacatgccatttccaggtggtgacatttctattctcacgcgcccacccaacatttttgcttttactaaatgactatgtgcgcgaatgctttgtggatgttgagagggattatctgtgcttgacaaaacagtatcccagacttgcaattactccagaattttctaaggttgggcattttgtacattgaacttttgttgctgatcgatattcaatgtggcttttggcattctctgtcactctagctaggtccttggatgagccacactattgacatgggtttaggatataatgcacatgggttagttcatctctttttcttttgcacccaagtatgccattttggggatttctccactatacccgtggatctaattgcttttgcaagggaaagagatatgccttctgattcagataggaccttaaatgaagacaagcgtttcatatcttgtagtatgccacaggagcatcaaaagatctttgaattgggctgaagaaaacatagaatatagtgtaatcttatagtataaaatttagagtctattgtcacccatacatataagtcttgtgaacgtttatggaaccagggaataagacattgttctgtatggccagtctgttggtagcagaccaacccttgatctagctattcgtttcaatcatgaagagatgtggtattaatcatagataagggatgtttagttccagagactaaagtttagtacgtgtcacatagaatatttgaatctcattttactatggatttatatatcatagtgacatttgtcgttatgtattgatgtttta

SEQ ID NO: 67037 - DNA, 3550 bp, Zea Mays
cgcatacgcccacagccgccccacgcgcgcatcccgcagccgcgcgatccgtccgcttcctcctccccgcgcccgcagcccccgccgccgatgccagccgccgcgcccgcgcaagggaagttgcttcccaaatcccgcagacaagatttaatcccgtgattcttcccatccatggcagccgtgcccgcaaaccgcgcctccccacgactcccacttccatggcgtcgcccccttccatccatggcagtcacgctccctctgcgcccttccatccatggctgcggctccctccgcgccgcaattcttcccatcctctccttccgcgcggtttgcggctaccaatcctctccctctgcgtcgtgttcttcccatcctctccctccgcgccggatctcgccccatgtccaccaacgccggtgtccgtgatggcgcgctcggggcagcggtggacgcagcctttgccaggcgtgtgctccaggccgaggccctcctcgggtacctctccgcgctggccaccagcccgcgtgccgagggcgacagggtggaccccgccgtcgccgcggcgcagctcggggcgctcggccggtggaagggctcggcgaggggccttcccgagtacacggtcgtccacggcatcgatggtgccgtcgtcgccgcccctgggagagccaaagccaagcagaggaggccgcagtcgaccggatttgggaatcctgctcctgccaaacgggatgaacggaaggaagcaaaatctttctggggttgatttggcttgaaggaagcgggatctttctggacaatggctgtctagcttcatccattctggtacagagggatggagtcttgtaagaaggtagctgcaagcttgaagtcgtgtgagccatgggggaacagggcatcctggacaaacgccgttgggccaggttggaagttgagctttgctgttgagccatggactaagggctttagcgcgtcgtgtgcggcgccatattctgctggagccacagagcatcaattatcgctcgatgagaaggtggataactccaccgttgcatctggttttgatgggtaaagttatctatcagctagattcatggcaggaaaggttttttctattgtcggtatccagcacctaagtaggcctaggatttttttcttctatctttaattagcaattgcctttttcagcaacccgttcttatgaatttcttttattgacaacatgaattagtctattttagttcatctctttcttgtcacaaatttaaatgaatataattgtttgtttcagtggcaattctgtgaagcccaaaggttccaagtcaccatgaaaaaattgaaatgacgagatctcttaatctaattgttgcaccttggaaggtctgaaccatcatagtttaattgtatcacccatttacacaagttcctaccatcagagttcaactgtatcacccatccataagcaattccttttgttgaaatttatgagaagacatatgcctctgttaagtctcaggaacttttttgctgggaagccaattccttactgatctgagggacaacatttttgtttgcctgatataaggtaaagtgtgaaagggaaacgcgaaaagaaacgtgtcctggtcccaagtcacctgccatactgaacacgattgatcgcagaaagaaacacgttctggtctagactgacaggttccgctgctactattttgtatatataaactatcttatataaagagtacgcacttcgttctcccatttatgaaaattattcatagttttggagctggagccggccatgcgctcgatcagagttccgctgcagccacgacctctctcccgaacgcgcacgaggagaccaggtggaacatatgcaagcaggttctagagcaataaccccatgaatccagatcgggggtctgcatctacacgggcgtgtactccgcaccgctcccctccggccccgaccgccgtgtgctcgttgtagccggggtcgacctcaaccacgacgacgatgcggtctcctcgccccaggctcgacctcctcgctgacctcgccctgctccacctcaactcgcgatgaggattgtcggcacgttcacaccgcgccgttgcagaacgttggagcctctcagaactctagaagctgcctaccaccacgcaccctaagataggggcatatctgtgttagtcgcctgcacacatactgaaatatgggcatatccaccatgtattcttctcttagttatgttagataagacttttactctgtcatttactgatctggtctgtttttagctccattagcttgttcacaagcttatgttagagaaggcgttatggcttttctcaagattataacatttctgaataactgttctgcgtaggcatggtaccatcttcatcatgtagctgggatgagctggcaccatgaaagaattcaagtggttaaatcatgcatctgcagaaatattgtactctcaaatggtgggttgctgcgtcatgggagtttgggtgaaggcctgaaggatgtgatgcaaaacgtcgatgcaggtctgggatgtccgcctcattatggatcaaaattcatgacgttctaaaggtgtcggatgagtacctatatactccctcccagaaaacaaggcgcctcattacactattggaagctggacgacatggatgactctggcaagatgcggtgggagcacgacgacatggatgactccgaccatgagttcgacaggaagcctagcaacagtacgcagtagcaaggttgaccagaggggcagtggagactaacccaacaccccctcctccgaccgtcatagcgcttctttcctctggcttcatttcttacctatgtatggatggtcttcaccactggttacatctagcaagtcctcctaggggtgagctcaattttctcctgatttgctctctcctttgttttttattgattcatctatgcacatttaatgatctatggcgtgccttcaatgcaattggtggaggcagtgacatgaaggagattgtcatgctgccaaagcacatcaaggacaatgcaaacaaggacagaggaagaccggacatgccatttccagacccgtggatctaattgcttttgcaagggaaagagatatgccttctgattcagataggaccttaaatgaagacaagcgtttcatatcttgtagtatgccacaggagcatcaaaagatctttgaattgggctgaagaaaacatagaatatagtgtaatcttatagtataaaatttagagtctattgtcacccatacatataagtcttgtgaacgtttatggaaccagggaataagacattgttctgtatggccagtctgttggtagcagaccaacccttgatctagctattcgtttcaatcatgaagagatgtggtattaatcatagataagggatgtttagttccagagactaaagtttagtacgtgtcacatagaatatttgaatctcattttactatggatttatatatcatagtgacatttgtcgttatgtattgatgtttta

SEQ ID NO: 67038 - DNA, 4084 bp, Zea Mays
cgcatacgcccacagccgccccacgcgcgcatcccgcagccgcgcgatccgtccgcttcctcctccccgcgcccgcagcccccgccgccgatgccagccgccgcgcccgcgcaagggaagttgcttcccaaatcccgcagacaagatttaatcccgtgattcttcccatccatggcagccgtgcccgcaaaccgcgcctccccacgactcccacttccatggcgtcgcccccttccatccatggcagtcacgctccctctgcgcccttccatccatggctgcggctccctccgcgccgcaattcttcccatcctctccttccgcgcggtttgcggctaccaatcctctccctctgcgtcgtgttcttcccatcctctccctccgcgccggatctcgccccatgtccaccaacgccggtgtccgtgatggcgcgctcggggcagcggtggacgcagcctttgccaggcgtgtgctccaggccgaggccctcctcgggtacctctccgcgctggccaccagcccgcgtgccgagggcgacagggtggaccccgccgtcgccgcggcgcagctcggggcgctcggccggtggaagggctcggcgaggggccttcccgagtacacggtcgtccacggcatcgatggtgccgtcgtcgccgcccctgggagagccaaagccaagcagaggaggccgcagtcgaccggatttgggaatcctgctcctgccaaacgggatgaacggaaggaagcaaaatctttctggggttgatttggcttgaaggaagcgggatctttctggacaatggctgtctagcttcatccattctggtacagagggatggagtcttgtaagaaggtagctgcaagcttgaagtcgtgtgagccatgggggaacagggcatcctggacaaacgccgttgggccaggttggaagttgagctttgctgttgagccatggactaagggctttagcgcgtcgtgtgcggcgccatattctgctggagccacagagcatcaattatcgctcgatgagaaggtggataactccaccgttgcatctggttttgatgggtaaagttatctatcagctagattcatggcaggaaaggttttttctattgtcggtatccagcacctaagtaggcctaggatttttttcttctatctttaattagcaattgcctttttcagcaacccgttcttatgaatttcttttattgacaacatgaattagtctattttagttcatctctttcttgtcacaaatttaaatgaatataattgtttgtttcagtggcaattctgtgaagcccaaaggttccaagtcaccatgaaaaaattgaaatgacgagatctcttaatctaattgttgcaccttggaaggtctgaaccatcatagtttaattgtatcacccatttacacaagttcctaccatcagagttcaactgtatcacccatccataagcaattccttttgttgaaatttatgagaagacatatgcctctgttaagtctcaggaacttttttgctgggaagccaattccttactgatctgagggacaacatttttgtttgcctgatataaggtgatgaaggtaaagtgtgaaagggaaacgcgaaaagaaacgtgtcctggtcccaagtcacctgccatactgaacacgattgatcgcagaaagaaacacgttctggtctagactgacagttttggagctggagccggccatgcgctcgatcagagttccgctgcagccacgacctctctcccgaacgcgcacgaggagaccaggtggaacatatgcaagcaggttctagagcaataaccccatgaatccagatcgggggtctgcatctacacgggcgtgtactccgcaccgctcccctccggccccgaccgccgtgtgctcgttgtagccggggtcgacctcaaccacgacgacgatgcggtctcctcgccccaggctcgacctcctcgctgacctcgccctgctccacctcaactcgcgatgaggattgtcggcacgttcacaccgcgccgttgcagaacgttggagcctctcagaactctagaagctgcctaccaccacgcaccctaagataggggcatatctgtgcatggtaccatcttcatcatgtagctgggatgagctggcaccatgaaagaattcaagtggttaaatcatgcatctgcagaaatattgtactctcaaatggtgggttgctgcgtcatgggagtttgggtgaaggcctgaaggatgtgatgcaaaacgtcgatgcaggtctgggatgtccgcctcattatggatcaaaattcatgacgttctaaaggtgtcggatgagtacctatatactccctcccagaaaacaaggcgcctcattacactattggaagctggacgacatggatgactctggcaagatgcggtgggagcacgacgacatggatgactccgaccatgagttcgacaggaagcctagcaacagtacgcagtagcaaggttgaccagaggggcagtggagactaacccaacaccccctcctccgaccgtcatagcgcttctttcctctggcttcatttcttacctatgtatggatggtcttcaccactggttacatctagcaagtcctcctagggtgacatgaaggagattgtcatgctgccaaagcacatcaaggacaatgcaaacaaggacagaggaagaccggacatgccatttccaggtggtgacatttctattctcacgcgcccacccaacatttttgcttttactaaatgactatgtgcgcgaatgctttgtggatgttgagagggattatctgtgcttgacaaaacagtatcccagacttgcaattactccagaattttctaaggttgggcattttgtacattgaacttttgttgctgatcgatattcaatgtggcttttggcattctctgtcactctagctaggtccttggatgagccacactattgacatgggtttaggtgagtgactcatcacggtgcctttatatggctcgatcaattccaaatttgctatagtctagttgtcactagaatttcctcatttggcatgcaataattacaattgatttgcctggtactctgattgaaatgggaaagttgagtgcttacatatgttgatccacaatatttctttattgtcaagggcagagttaaagtgaattgtgtggattcacaccaactgcacctttggatctcttctgggtcgtttcatttcaaaaaatactggccatatccccctctatatctggtaaacatagattgaggactagatagatcaggataaacaaggcgtgttaattgttgacaaatacaataaaagtaaaatcacagtaatgacgagtgaacaaacatgccttcgctgcttcatctgtttgaaactagagatatcaacctttaagtgcagcttaaggttttttgggatgattctttgtttatcatcgcaggatataatgcacatgggttagttcatctctttttcttttgcacccaagtatgccattttggggatttctccactatgtatgtttaaatgagcacattatttagaagccttttattatcatgttgttatgttctatgttgtttactgcttgcttggtgtaatctctagacccgtggatctaattgcttttgcaagggaaagagatatgccttctgattcagataggaccttaaatgaagacaagcgtttcatatcttgtagtatgccacaggagcatcaaaagatctttgaattgggctgaagaaaacatagaatatagtgtaatcttatagtataaaatttagagtctattgtcacccatacatataagtcttgtgaacgtttatggaaccagggaataagacattgttctgtatggccagtctgttggtagcagaccaacccttgatctagctattcgtttcaatcatgaagagatgtggtattaatcatagataagggatgtttagttccagagactaaagtttagtacgtgtcacatagaatatttgaatctcattttactatggatttatatatcatagtgacatttgtcgttatgtattgatgtttta

SEQ ID NO: 67039 - DNA, 3002 bp, Zea Mays
cgcatacgcccacagccgccccacgcgcgcatcccgcagccgcgcgatccgtccgcttcctcctccccgcgcccgcagcccccgccgccgatgccagccgccgcgcccgcgcaagggaagttgcttcccaaatcccgcagacaagatttaatcccgtgattcttcccatccatggcagccgtgcccgcaaaccgcgcctccccacgactcccacttccatggcgtcgcccccttccatccatggcagtcacgctccctctgcgcccttccatccatggctgcggctccctccgcgccgcaattcttcccatcctctccttccgcgcggtttgcggctaccaatcctctccctctgcgtcgtgttcttcccatcctctccctccgcgccggatctcgccccatgtccaccaacgccggtgtccgtgatggcgcgctcggggcagcggtggacgcagcctttgccaggcgtgtgctccaggccgaggccctcctcgggtacctctccgcgctggccaccagcccgcgtgccgagggcgacagggtggaccccgccgtcgccgcggcgcagctcggggcgctcggccggtggaagggctcggcgaggggccttcccgagtacacggtcgtccacggcatcgatggtgccgtcgtcgccgcccctgggagagccaaagccaagcagaggaggccgcagtcgaccggatttgggaatcctgctcctgccaaacgggatgaacggaaggaagcaaaatctttctggggttgatttggcttgaaggaagcgggatctttctggacaatggctgtctagcttcatccattctggtacagagggatggagtcttgtaagaaggtagctgcaagcttgaagtcgtgtgagccatgggggaacagggcatcctggacaaacgccgttgggccaggttggaagttgagctttgctgttgagccatggactaagggctttagcgcgtcgtgtgcggcgccatattctgctggagccacagagcatcaattatcgctcgatgagaaggtggataactccaccgttgcatctggttttgatgggtaaagttatctatcagctagattcatggcaggaaaggttttttctattgtcggtatccagcacctaatggcaattctgtgaagcccaaaggttccaagtcaccatgaaaaaattgaaatgacgagatctcttaatctaattgttgcaccttggaaggtctgaaccatcatagtttaattgtatcacccatttacacaagttcctaccatcagagttcaactgtatcacccatccataagcaattccttttgttgaaatttatgagaagacatatgcctctgttaagtctcaggaacttttttgctgggaagccaattccttactgatctgagggacaacatttttgtttgcctgatataaggtaaagtgtgaaagggaaacgcgaaaagaaacgtgtcctggtcccaagtcacctgccatactgaacacgattgatcgcagaaagaaacacgttctggtctagactgacagttttggagctggagccggccatgcgctcgatcagagttccgctgcagccacgacctctctcccgaacgcgcacgaggagaccaggtggaacatatgcaagcaggttctagagcaataaccccatgaatccagatcgggggtctgcatctacacgggcgtgtactccgcaccgctcccctccggccccgaccgccgtgtgctcgttgtagccggggtcgacctcaaccacgacgacgatgcggtctcctcgccccaggctcgacctcctcgctgacctcgccctgctccacctcaactcgcgatgaggattgtcggcacgttcacaccgcgccgttgcagaacgttggagcctctcagaactctagaagctgcctaccaccacgcaccctaagataggggcatatctgtgcatggtaccatcttcatcatgtagctgggatgagctggcaccatgaaagaattcaagtggttaaatcatgcatctgcagaaatattgtactctcaaatggtgggttgctgcgtcatgggagtttgggtgaaggcctgaaggatgtgatgcaaaacgtcgatgcaggtctgggatgtccgcctcattatggatcaaaattcatgacgttctaaaggtgtcggatgagtacctatatactccctcccagaaaacaaggcgcctcattacactattggaagctggacgacatggatgactctggcaagatgcggtgggagcacgacgacatggatgactccgaccatgagttcgacaggaagcctagcaacagtacgcagtagcaaggttgaccagaggggcagtggagactaacccaacaccccctcctccgaccgtcatagcgcttctttcctctggcttcatttcttacctatgtatggatggtcttcaccactggttacatctagcaagtcctcctagggtgacatgaaggagattgtcatgctgccaaagcacatcaaggacaatgcaaacaaggacagaggaagaccggacatgccatttccagacccgtggatctaattgcttttgcaagggaaagagatatgccttctgattcagataggaccttaaatgaagacaagcgtttcatatcttgtagtatgccacaggagcatcaaaagatctttgaattgggctgaagaaaacatagaatatagtgtaatcttatagtataaaatttagagtctattgtcacccatacatataagtcttgtgaacgtttatggaaccagggaataagacattgttctgtatggccagtctgttggtagcagaccaacccttgatctagctattcgtttcaatcatgaagagatgtggtattaatcatagataagggatgtttagttccagagactaaagtttagtacgtgtcacatagaatatttgaatctcattttactatggatttatatatcatagtgacatttgtcgttatgtattgatgtttta

SEQ ID NO: 67040 - DNA, 3040 bp, Zea Mays
cgcatacgcccacagccgccccacgcgcgcatcccgcagccgcgcgatccgtccgcttcctcctccccgcgcccgcagcccccgccgccgatgccagccgccgcgcccgcgcaagggaagttgcttcccaaatcccgcagacaagatttaatcccgtgattcttcccatccatggcagccgtgcccgcaaaccgcgcctccccacgactcccacttccatggcgtcgcccccttccatccatggcagtcacgctccctctgcgcccttccatccatggctgcggctccctccgcgccgcaattcttcccatcctctccttccgcgcggtttgcggctaccaatcctctccctctgcgtcgtgttcttcccatcctctccctccgcgccggatctcgccccatgtccaccaacgccggtgtccgtgatggcgcgctcggggcagcggtggacgcagcctttgccaggcgtgtgctccaggccgaggccctcctcgggtacctctccgcgctggccaccagcccgcgtgccgagggcgacagggtggaccccgccgtcgccgcggcgcagctcggggcgctcggccggtggaagggctcggcgaggggccttcccgagtacacggtcgtccacggcatcgatggtgccgtcgtcgccgcccctgggagagccaaagccaagcagaggaggccgcagtcgaccggatttgggaatcctgctcctgccaaacgggatgaacggaaggaagcaaaatctttctggggttgatttggcttgaaggaagcgggatctttctggacaatggctgtctagcttcatccattctggtacagagggatggagtcttgtaagaaggtagctgcaagcttgaagtcgtgtgagccatgggggaacagggcatcctggacaaacgccgttgggccaggttggaagttgagctttgctgttgagccatggactaagggctttagcgcgtcgtgtgcggcgccatattctgctggagccacagagcatcaattatcgctcgatgagaaggtggataactccaccgttgcatctggttttgatgggtaaagttatctatcagctagattcatggcaggaaaggttttttctattgtcggtatccagcacctaagtaggcctaggatttttttcttctatctttaattagcaattgcctttttcagcaacccgttcttatgaatttcttttattgacaacatgaattagtctattttagttcatctctttcttgtcacaaatttaaatgaatataattgtttgtttcagtggcaattctgtgaagcccaaaggttccaagtcaccatgaaaaaattgaaatgacgagatctcttaatctaattgttgcaccttggaaggtctgaaccatcatagtttaattgtatcacccatttacacaagttcctaccatcagagttcaactgtatcacccatccataagcaattccttttgttgaaatttatgagaagacatatgcctctgttaagtctcaggaacttttttgctgggaagccaattccttactgatctgagggacaacatttttgtttgcctgatataaggtaaagtgtgaaagggaaacgcgaaaagaaacgtgtcctggtcccaagtcacctgccatactgaacacgattgatcgcagaaagaaacacgttctggtctagactgacagttttggagctggagccggccatgcgctcgatcagagttccgctgcagccacgacctctctcccgaacgcgcacgaggagaccaggtggaacatatgcaagcaggttctagagcaataaccccatgaatccagatcgggggtctgcatctacacgggcgtgtactccgcaccgctcccctccggccccgaccgccgtgtgctcgttgtagccggggtcgacctcaaccacgacgacgatgcggtctcctcgccccaggctcgacctcctcgctgacctcgccctgctccacctcaactcgcgatgaggattgtcggcacgttcacaccgcgccgttgcagaacgttggagcctctcagaactctagaagctgcctaccaccacgcaccctaagataggggcatatctgtgcatggtaccatcttcatcatgtagctgggatgagctggcaccatgaaagaattcaagtggttaaatcatgcatctgcagaaatattgtactctcaaatggtgggttgctgcgtcatgggagtttgggtgaaggcctgaaggatgtgatgcaaaacgtcgatgcaggtctgggatgtccgcctcattatggatcaaaattcatgacgttctaaaggtgtcggatgagtacctatatactccctcccagaaaacaaggcgcctcattacactattggaagctggacgacatggatgactctggcaagatgcggtgggagcacgacgacatggatgactccgaccatgagttcgacaggaagcctagcaacagtacgcagtagcaaggttgaccagaggggcagtggagactaacccaacaccccctcctccgaccgtcatagcgcttctttcctctggcttcatttcttacctatgtatggatggtcttcaccactggttacatctagcaagtcctcctagggtgacatgaaggagattgtcatgctgccaaagcacatcaaggacaatgcaaacaaggacagaggaagaccggacatgccatttccaggtggtgacatttctattctcacgcgcccacccaacatttttgcttttactaaatgactatgtgcgcgaatgctttgtggatgttgagagggattatctgtgcttgacaaaacagtatcccagacttgcaattactccagaattttctaaggttgggcattttgtacattgaacttttgttgctgatcgatattcaatgtggcttttggcattctctgtcactctagctaggtccttggatgagccacactattgacatgggtttagagaacttctcaagggcccgctgtattatgcctgtgctataactctgacaacaatagttttctg

SEQ ID NO: 67041 - DNA, 3118 bp, Zea Mays
cgcatacgcccacagccgccccacgcgcgcatcccgcagccgcgcgatccgtccgcttcctcctccccgcgcccgcagcccccgccgccgatgccagccgccgcgcccgcgcaagggaagttgcttcccaaatcccgcagacaagatttaatcccgtgattcttcccatccatggcagccgtgcccgcaaaccgcgcctccccacgactcccacttccatggcgtcgcccccttccatccatggcagtcacgctccctctgcgcccttccatccatggctgcggctccctccgcgccgcaattcttcccatcctctccttccgcgcggtttgcggctaccaatcctctccctctgcgtcgtgttcttcccatcctctccctccgcgccggatctcgccccatgtccaccaacgccggtgtccgtgatggcgcgctcggggcagcggtggacgcagcctttgccaggcgtgtgctccaggccgaggccctcctcgggtacctctccgcgctggccaccagcccgcgtgccgagggcgacagggtggaccccgccgtcgccgcggcgcagctcggggcgctcggccggtggaagggctcggcgaggggccttcccgagtacacggtcgtccacggcatcgatggtgccgtcgtcgccgcccctgggagagccaaagccaagcagaggaggccgcagtcgaccggatttgggaatcctgctcctgccaaacgggatgaacggaaggaagcaaaatctttctggggttgatttggcttgaaggaagcgggatctttctggacaatggctgtctagcttcatccattctggtacagagggatggagtcttgtaagaaggtagctgcaagcttgaagtcgtgtgagccatgggggaacagggcatcctggacaaacgccgttgggccaggttggaagttgagctttgctgttgagccatggactaagggctttagcgcgtcgtgtgcggcgccatattctgctggagccacagagcatcaattatcgctcgatgagaaggtggataactccaccgttgcatctggttttgatgggtaaagttatctatcagctagattcatggcaggaaaggttttttctattgtcggtatccagcacctaatggcaattctgtgaagcccaaaggttccaagtcaccatgaaaaaattgaaatgacgagatctcttaatctaattgttgcaccttggaaggtctgaaccatcatagtttaattgtatcacccatttacacaagttcctaccatcagagttcaactgtatcacccatccataagcaattccttttgttgaaatttatgagaagacatatgcctctgttaagtctcaggaacttttttgctgggaagccaattccttactgatctgagggacaacatttttgtttgcctgatataaggtgatgaaggtggctggataacacgattatgggtaaagtgtgaaagggaaacgcgaaaagaaacgtgtcctggtcccaagtcacctgccatactgaacacgattgatcgcagaaagaaacacgttctggtctagactgacagttttggagctggagccggccatgcgctcgatcagagttccgctgcagccacgacctctctcccgaacgcgcacgaggagaccaggtggaacatatgcaagcaggttctagagcaataaccccatgaatccagatcgggggtctgcatctacacgggcgtgtactccgcaccgctcccctccggccccgaccgccgtgtgctcgttgtagccggggtcgacctcaaccacgacgacgatgcggtctcctcgccccaggctcgacctcctcgctgacctcgccctgctccacctcaactcgcgatgaggattgtcggcacgttcacaccgcgccgttgcagaacgttggagcctctcagaactctagaagctgcctaccaccacgcaccctaagataggggcatatctgtgttagtcgcctgcacacatactgaaatatgggcatatccaccatgtattcttctcttagttatgttagataagacttttactctgtcatttactgatctggtctgtttttagctccattagcttgttcacaagcttatgttagagaaggcgttatggcttttctcaagattataacatttctgaataactgttctgcgtaggcatggtaccatcttcatcatgtagctgggatgagctggcaccatgaaagaattcaagtggttaaatcatgcatctgcagaaatattgtactctcaaatggtgggttgctgcgtcatgggagtttgggtgaaggcctgaaggatgtgatgcaaaacgtcgatgcaggtctgggatgtccgcctcattatggatcaaaattcatgacgttctaaaggtgtcggatgagtacctatatactccctcccagaaaacaaggcgcctcattacactattggaagctggacgacatggatgactctggcaagatgcggtgggagcacgacgacatggatgactccgaccatgagttcgacaggaagcctagcaacagtacgcagtagcaaggttgaccagaggggcagtggagactaacccaacaccccctcctccgaccgtcatagcgcttctttcctctggcttcatttcttacctatgtatggatggtcttcaccactggttacatctagcaagtcctcctagggtgacatgaaggagattgtcatgctgccaaagcacatcaaggacaatgcaaacaaggacagaggaagaccggacatgccatttccaggtggtgacatttctattctcacgcgcccacccaacatttttgcttttactaaatgactatgtgcgcgaatgctttgtggatgttgagagggattatctgtgcttgacaaaacagtatcccagacttgcaattactccagaattttctaaggttgggcattttgtacattgaacttttgttgctgatcgatattcaatgtggcttttggcattctctgtcactctagctaggtccttggatgagccacactattgacatgggtttagagaacttctcaagggcccgctgtattatgcctgtgctataactctgacaacaatagttttctg

SEQ ID NO: 67042 - DNA, 2774 bp, Zea Mays
cgcatacgcccacagccgccccacgcgcgcatcccgcagccgcgcgatccgtccgcttcctcctccccgcgcccgcagcccccgccgccgatgccagccgccgcgcccgcgcaagggaagttgcttcccaaatcccgcagacaagatttaatcccgtgattcttcccatccatggcagccgtgcccgcaaaccgcgcctccccacgactcccacttccatggcgtcgcccccttccatccatggcagtcacgctccctctgcgcccttccatccatggctgcggctccctccgcgccgcaattcttcccatcctctccttccgcgcggtttgcggctaccaatcctctccctctgcgtcgtgttcttcccatcctctccctccgcgccggatctcgccccatgtccaccaacgccggtgtccgtgatggcgcgctcggggcagcggtggacgcagcctttgccaggcgtgtgctccaggccgaggccctcctcgggtacctctccgcgctggccaccagcccgcgtgccgagggcgacagggtggaccccgccgtcgccgcggcgcagctcggggcgctcggccggtggaagggctcggcgaggggccttcccgagtacacggtcgtccacggcatcgatggtgccgtcgtcgccgcccctgggagagccaaagccaagcagaggaggccgcagtcgaccggatttgggaatcctgctcctgccaaacgggatgaacggaaggaagcaaaatctttctggggttgatttggcttgaaggaagcgggatctttctggacaatggctgtctagcttcatccattctggtacagagggatggagtcttgtaagaaggtagctgcaagcttgaagtcgtgtgagccatgggggaacagggcatcctggacaaacgccgttgggccaggttggaagttgagctttgctgttgagccatggactaagggctttagcgcgtcgtgtgcggcgccatattctgctggagccacagagcatcaattatcgctcgatgagaaggtggataactccaccgttgcatctggttttgatgggtaaagttatctatcagctagattcatggcaggaaaggttttttctattgtcggtatccagcacctaagtaggcctaggatttttttcttctatctttaattagcaattgcctttttcagcaacccgttcttatgaatttcttttattgacaacatgaattagtctattttagttcatctctttcttgtcacaaatttaaatgaatataattgtttgtttcagtggcaattctgtgaagcccaaaggttccaagtcaccatgaaaaaattgaaatgacgagatctcttaatctaattgttgcaccttggaaggtctgaaccatcatagtttaattgtatcacccatttacacaagttcctaccatcagagttcaactgtatcacccatccataagcaattccttttgttgaaatttatgagaagacatatgcctctgttaagtctcaggaacttttttgctgggaagccaattccttactgatctgagggacaacatttttgtttgcctgatataaggtaaagtgtgaaagggaaacgcgaaaagaaacgtgtcctggtcccaagtcacctgccatactgaacacgattgatcgcagaaagaaacacgttctggtctagactgacagttttggagctggagccggccatgcgctcgatcagagttccgctgcagccacgacctctctcccgaacgcgcacgaggagaccaggtggaacatatgcaagcaggttctagagcaataaccccatgaatccagatcgggggtctgcatctacacgggcgtgtactccgcaccgctcccctccggccccgaccgccgtgtgctcgttgtagccggggtcgacctcaaccacgacgacgatgcggtctcctcgccccaggctcgacctcctcgctgacctcgccctgctccacctcaactcgcgatgaggattgtcggcacgttcacaccgcgccgttgcagaacgttggagcctctcagaactctagaagctgcctaccaccacgcaccctaagataggggcatatctgtgcatggtaccatcttcatcatgtagctgggatgagctggcaccatgaaagaattcaagtggttaaatcatgcatctgcagaaatattgtactctcaaatggtgggttgctgcgtcatgggagtttgggtgaaggcctgaaggatgtgatgcaaaacgtcgatgcaggtctgggatgtccgcctcattatggatcaaaattcatgacgttctaaaggtgtcggatgagtacctatatactccctcccagaaaacaaggcgcctcattacactattggaagctggacgacatggatgactctggcaagatgcggtgggagcacgacgacatggatgactccgaccatgagttcgacaggaagcctagcaacagtacgcagtagcaaggttgaccagaggggcagtggagactaacccaacaccccctcctccgaccgtcatagcgcttctttcctctggcttcatttcttacctatgtatggatggtcttcaccactggttacatctagcaagtcctcctagggtgacatgaaggagattgtcatgctgccaaagcacatcaaggacaatgcaaacaaggacagaggaagaccggacatgccatttccagagaacttctcaagggcccgctgtattatgcctgtgctataactctgacaacaatagttttctg

SEQ ID NO: 67043 - DNA, 3999 bp, Zea Mays
cgcatacgcccacagccgccccacgcgcgcatcccgcagccgcgcgatccgtccgcttcctcctccccgcgcccgcagcccccgccgccgatgccagccgccgcgcccgcgcaagggaagttgcttcccaaatcccgcagacaagatttaatcccgtgattcttcccatccatggcagccgtgcccgcaaaccgcgcctccccacgactcccacttccatggcgtcgcccccttccatccatggcagtcacgctccctctgcgcccttccatccatggctgcggctccctccgcgccgcaattcttcccatcctctccttccgcgcggtttgcggctaccaatcctctccctctgcgtcgtgttcttcccatcctctccctccgcgccggatctcgccccatgtccaccaacgccggtgtccgtgatggcgcgctcggggcagcggtggacgcagcctttgccaggcgtgtgctccaggccgaggccctcctcgggtacctctccgcgctggccaccagcccgcgtgccgagggcgacagggtggaccccgccgtcgccgcggcgcagctcggggcgctcggccggtggaagggctcggcgaggggccttcccgagtacacggtcgtccacggcatcgatggtgccgtcgtcgccgcccctgggagagccaaagccaagcagaggaggccgcagtcgaccggatttgggaatcctgctcctgccaaacgggatgaacggaaggaagcaaaatctttctggggttgatttggcttgaaggaagcgggatctttctggacaatggctgtctagcttcatccattctggtacagagggatggagtcttgtaagaaggtagctgcaagcttgaagtcgtgtgagccatgggggaacagggcatcctggacaaacgccgttgggccaggttggaagttgagctttgctgttgagccatggactaagggctttagcgcgtcgtgtgcggcgccatattctgctggagccacagagcatcaattatcgctcgatgagaaggtggataactccaccgttgcatctggttttgatgggtaaagttatctatcagctagattcatggcaggaaaggttttttctattgtcggtatccagcacctaatggcaattctgtgaagcccaaaggttccaagtcaccatgaaaaaattgaaatgacgagatctcttaatctaattgttgcaccttggaaggtctgaaccatcatagtttaattgtatcacccatttacacaagttcctaccatcagagttcaactgtatcacccatccataagcaattccttttgttgaaatttatgagaagacatatgcctctgttaagtctcaggaacttttttgctgggaagccaattccttactgatctgagggacaacatttttgtttgcctgatataaggtaaagtgtgaaagggaaacgcgaaaagaaacgtgtcctggtcccaagtcacctgccatactgaacacgattgatcgcagaaagaaacacgttctggtctagactgacagttttggagctggagccggccatgcgctcgatcagagttccgctgcagccacgacctctctcccgaacgcgcacgaggagaccaggtggaacatatgcaagcaggttctagagcaataaccccatgaatccagatcgggggtctgcatctacacgggcgtgtactccgcaccgctcccctccggccccgaccgccgtgtgctcgttgtagccggggtcgacctcaaccacgacgacgatgcggtctcctcgccccaggctcgacctcctcgctgacctcgccctgctccacctcaactcgcgatgaggattgtcggcacgttcacaccgcgccgttgcagaacgttggagcctctcagaactctagaagctgcctaccaccacgcaccctaagataggggcatatctgtgttagtcgcctgcacacatactgaaatatgggcatatccaccatgtattcttctcttagttatgttagataagacttttactctgtcatttactgatctggtctgtttttagctccattagcttgttcacaagcttatgttagagaaggcgttatggcttttctcaagattataacatttctgaataactgttctgcgtaggcatggtaccatcttcatcatgtagctgggatgagctggcaccatgaaagaattcaagtggttaaatcatgcatctgcagaaatattgtactctcaaatggtgggttgctgcgtcatgggagtttgggtgaaggcctgaaggatgtgatgcaaaacgtcgatgcaggtctgggatgtccgcctcattatggatcaaaattcatgacgttctaaaggtgtcggatgagtacctatatactccctcccagaaaacaaggcgcctcattacactattggaagctggacgacatggatgactctggcaagatgcggtgggagcacgacgacatggatgactccgaccatgagttcgacaggaagcctagcaacagtacgcagtagcaaggttgaccagaggggcagtggagactaacccaacaccccctcctccgaccgtcatagcgcttctttcctctggcttcatttcttacctatgtatggatggtcttcaccactggttacatctagcaagtcctcctagggtgacatgaaggagattgtcatgctgccaaagcacatcaaggacaatgcaaacaaggacagaggaagaccggacatgccatttccaggtggtgacatttctattctcacgcgcccacccaacatttttgcttttactaaatgactatgtgcgcgaatgctttgtggatgttgagagggattatctgtgcttgacaaaacagtatcccagacttgcaattactccagaattttctaaggttgggcattttgtacattgaacttttgttgctgatcgatattcaatgtggcttttggcattctctgtcactctagctaggtccttggatgagccacactattgacatgggtttaggaaatggaggcagcatgctgctgacaagcgattacttagggagcagaagaatgctcttgctgttgcagcattgtgttctctatcacttggcccaccagttcataaaagtacaacggtgtctaagctagcagttgaagaactagatattggccacgcctttaaagaaagacaagcaagaaagcaaaggtcctggtcacggctaaatgtttcggagttgtctggtcccattctaaatgaaaataaccctgatgctagatgcctctgctggatgttgcttgtacttgttccaccgggtatggaatcccagaccaacagttttgtctcaaaatggttacttagaaagctcatgggttatggaaccggatatattggattggttgtttcttcagcaggcctatcaatttggacagagtggatcagttttccaaatgcatgttgtttgtctgttgttagggccagcgatcagcaagttattgataatgatatttggtcgtgttttggtcagtatgacatggcggcagtggtatccacaatgttgctcgtcaccggggtgactacattgctgcacatgtttgttggaacgagactatccacttgtgcagggtccatcctttttatacctggctcctgcccttgcgatcatcaactcacaagaattctttgggatcaatgataataattctaaacacataatgaagcacctgcagggagctataataattggaggtgcattccaagtgtttttgggatatagaggcctcatgtcactatttcttaggttgataaatccagtggcgatgagctccacctgctgctgcttataaggtaggtggagatggtcgagaaattgagacacatggttctgctgtcctgggtaacttctgcgacaagcgcattcgatggtacaaaagacataatggaagctcttagcaacaaacatactaatctagccaatgagcttgaggtaaatatcata

SEQ ID NO: 67044 - DNA, 3721 bp, Zea Mays
cgcatacgcccacagccgccccacgcgcgcatcccgcagccgcgcgatccgtccgcttcctcctccccgcgcccgcagcccccgccgccgatgccagccgccgcgcccgcgcaagggaagttgcttcccaaatcccgcagacaagatttaatcccgtgattcttcccatccatggcagccgtgcccgcaaaccgcgcctccccacgactcccacttccatggcgtcgcccccttccatccatggcagtcacgctccctctgcgcccttccatccatggctgcggctccctccgcgccgcaattcttcccatcctctccttccgcgcggtttgcggctaccaatcctctccctctgcgtcgtgttcttcccatcctctccctccgcgccggatctcgccccatgtccaccaacgccggtgtccgtgatggcgcgctcggggcagcggtggacgcagcctttgccaggcgtgtgctccaggccgaggccctcctcgggtacctctccgcgctggccaccagcccgcgtgccgagggcgacagggtggaccccgccgtcgccgcggcgcagctcggggcgctcggccggtggaagggctcggcgaggggccttcccgagtacacggtcgtccacggcatcgatggtgccgtcgtcgccgcccctgggagagccaaagccaagcagaggaggccgcagtcgaccggatttgggaatcctgctcctgccaaacgggatgaacggaaggaagcaaaatctttctggggttgatttggcttgaaggaagcgggatctttctggacaatggctgtctagcttcatccattctggtacagagggatggagtcttgtaagaaggtagctgcaagcttgaagtcgtgtgagccatgggggaacagggcatcctggacaaacgccgttgggccaggttggaagttgagctttgctgttgagccatggactaagggctttagcgcgtcgtgtgcggcgccatattctgctggagccacagagcatcaattatcgctcgatgagaaggtggataactccaccgttgcatctggttttgatgggtaaagttatctatcagctagattcatggcaggaaaggttttttctattgtcggtatccagcacctaagtaggcctaggatttttttcttctatctttaattagcaattgcctttttcagcaacccgttcttatgaatttcttttattgacaacatgaattagtctattttagttcatctctttcttgtcacaaatttaaatgaatataattgtttgtttcagtggcaattctgtgaagcccaaaggttccaagtcaccatgaaaaaattgaaatgacgagatctcttaatctaattgttgcaccttggaaggtctgaaccatcatagtttaattgtatcacccatttacacaagttcctaccatcagagttcaactgtatcacccatccataagcaattccttttgttgaaatttatgagaagacatatgcctctgttaagtctcaggaacttttttgctgggaagccaattccttactgatctgagggacaacatttttgtttgcctgatataaggtaaagtgtgaaagggaaacgcgaaaagaaacgtgtcctggtcccaagtcacctgccatactgaacacgattgatcgcagaaagaaacacgttctggtctagactgacagttttggagctggagccggccatgcgctcgatcagagttccgctgcagccacgacctctctcccgaacgcgcacgaggagaccaggtggaacatatgcaagcaggttctagagcaataaccccatgaatccagatcgggggtctgcatctacacgggcgtgtactccgcaccgctcccctccggccccgaccgccgtgtgctcgttgtagccggggtcgacctcaaccacgacgacgatgcggtctcctcgccccaggctcgacctcctcgctgacctcgccctgctccacctcaactcgcgatgaggattgtcggcacgttcacaccgcgccgttgcagaacgttggagcctctcagaactctagaagctgcctaccaccacgcaccctaagataggggcatatctgtgcatggtaccatcttcatcatgtagctgggatgagctggcaccatgaaagaattcaagtggttaaatcatgcatctgcagaaatattgtactctcaaatggtgggttgctgcgtcatgggagtttgggtgaaggcctgaaggatgtgatgcaaaacgtcgatgcaggtctgggatgtccgcctcattatggatcaaaattcatgacgttctaaaggtgtcggatgagtacctatatactccctcccagaaaacaaggcgcctcattacactattggaagctggacgacatggatgactctggcaagatgcggtgggagcacgacgacatggatgactccgaccatgagttcgacaggaagcctagcaacagtacgcagtagcaaggttgaccagaggggcagtggagactaacccaacaccccctcctccgaccgtcatagcgcttctttcctctggcttcatttcttacctatgtatggatggtcttcaccactggttacatctagcaagtcctcctagggtgacatgaaggagattgtcatgctgccaaagcacatcaaggacaatgcaaacaaggacagaggaagaccggacatgccatttccaggaaatggaggcagcatgctgctgacaagcgattacttagggagcagaagaatgctcttgctgttgcagcattgtgttctctatcacttggcccaccagttcataaaagtacaacggtgtctaagctagcagttgaagaactagatattggccacgcctttaaagaaagacaagcaagaaagcaaaggtcctggtcacggctaaatgtttcggagttgtctggtcccattctaaatgaaaataaccctgatgctagatgcctctgctggatgttgcttgtacttgttccaccgggtatggaatcccagaccaacagttttgtctcaaaatggttacttagaaagctcatgggttatggaaccggatatattggattggttgtttcttcagcaggcctatcaatttggacagagtggatcagttttccaaatgcatgttgtttgtctgttgttagggccagcgatcagcaagttattgataatgatatttggtcgtgttttggtcagtatgacatggcggcagtggtatccacaatgttgctcgtcaccggggtgactacattgctgcacatgtttgttggaacgagactatccacttgtgcagggtccatcctttttatacctggctcctgcccttgcgatcatcaactcacaagaattctttgggatcaatgataatgttgataaatccagtggcgatgagctccacctgctgctgcttataaggtatggtgcttgtgagacctgtcatggttgcttgctttgctttgtttagagatgctctcgccatggctgccagttgcactggtattcatgcaacctacatttggtccctgcaatatagttgcttcttgaaagcaggtaggtggagatggtcgagaaattgagacacatggttctgctgtcctgggtaacttctgcgacaagcgcattcgatggtacaaaagacataatggaagctcttagcaacaaacatactaatctagccaatgagcttgaggtaaatatcata

SEQ ID NO: 67045 - DNA, 4112 bp, Zea Mays
cgcatacgcccacagccgccccacgcgcgcatcccgcagccgcgcgatccgtccgcttcctcctccccgcgcccgcagcccccgccgccgatgccagccgccgcgcccgcgcaagggaagttgcttcccaaatcccgcagacaagatttaatcccgtgattcttcccatccatggcagccgtgcccgcaaaccgcgcctccccacgactcccacttccatggcgtcgcccccttccatccatggcagtcacgctccctctgcgcccttccatccatggctgcggctccctccgcgccgcaattcttcccatcctctccttccgcgcggtttgcggctaccaatcctctccctctgcgtcgtgttcttcccatcctctccctccgcgccggatctcgccccatgtccaccaacgccggtgtccgtgatggcgcgctcggggcagcggtggacgcagcctttgccaggcgtgtgctccaggccgaggccctcctcgggtacctctccgcgctggccaccagcccgcgtgccgagggcgacagggtggaccccgccgtcgccgcggcgcagctcggggcgctcggccggtggaagggctcggcgaggggccttcccgagtacacggtcgtccacggcatcgatggtgccgtcgtcgccgcccctgggagagccaaagccaagcagaggaggccgcagtcgaccggatttgggaatcctgctcctgccaaacgggatgaacggaaggaagcaaaatctttctggggttgatttggcttgaaggaagcgggatctttctggacaatggctgtctagcttcatccattctggtacagagggatggagtcttgtaagaaggtagctgcaagcttgaagtcgtgtgagccatgggggaacagggcatcctggacaaacgccgttgggccaggttggaagttgagctttgctgttgagccatggactaagggctttagcgcgtcgtgtgcggcgccatattctgctggagccacagagcatcaattatcgctcgatgagaaggtggataactccaccgttgcatctggttttgatgggtaaagttatctatcagctagattcatggcaggaaaggttttttctattgtcggtatccagcacctaatggcaattctgtgaagcccaaaggttccaagtcaccatgaaaaaattgaaatgacgagatctcttaatctaattgttgcaccttggaaggtctgaaccatcatagtttaattgtatcacccatttacacaagttcctaccatcagagttcaactgtatcacccatccataagcaattccttttgttgaaatttatgagaagacatatgcctctgttaagtctcaggaacttttttgctgggaagccaattccttactgatctgagggacaacatttttgtttgcctgatataaggtgatgaaggtggctggataacacgattatgggtaaagtgtgaaagggaaacgcgaaaagaaacgtgtcctggtcccaagtcacctgccatactgaacacgattgatcgcagaaagaaacacgttctggtctagactgacagttttggagctggagccggccatgcgctcgatcagagttccgctgcagccacgacctctctcccgaacgcgcacgaggagaccaggtggaacatatgcaagcaggttctagagcaataaccccatgaatccagatcgggggtctgcatctacacgggcgtgtactccgcaccgctcccctccggccccgaccgccgtgtgctcgttgtagccggggtcgacctcaaccacgacgacgatgcggtctcctcgccccaggctcgacctcctcgctgacctcgccctgctccacctcaactcgcgatgaggattgtcggcacgttcacaccgcgccgttgcagaacgttggagcctctcagaactctagaagctgcctaccaccacgcaccctaagataggggcatatctgtgttagtcgcctgcacacatactgaaatatgggcatatccaccatgtattcttctcttagttatgttagataagacttttactctgtcatttactgatctggtctgtttttagctccattagcttgttcacaagcttatgttagagaaggcgttatggcttttctcaagattataacatttctgaataactgttctgcgtaggcatggtaccatcttcatcatgtagctgggatgagctggcaccatgaaagaattcaagtggttaaatcatgcatctgcagaaatattgtactctcaaatggtgggttgctgcgtcatgggagtttgggtgaaggcctgaaggatgtgatgcaaaacgtcgatgcaggtctgggatgtccgcctcattatggatcaaaattcatgacgttctaaaggtgtcggatgagtacctatatactccctcccagaaaacaaggcgcctcattacactattggaagctggacgacatggatgactctggcaagatgcggtgggagcacgacgacatggatgactccgaccatgagttcgacaggaagcctagcaacagtacgcagtagcaaggttgaccagaggggcagtggagactaacccaacaccccctcctccgaccgtcatagcgcttctttcctctggcttcatttcttacctatgtatggatggtcttcaccactggttacatctagcaagtcctcctagggtgacatgaaggagattgtcatgctgccaaagcacatcaaggacaatgcaaacaaggacagaggaagaccggacatgccatttccaggtggtgacatttctattctcacgcgcccacccaacatttttgcttttactaaatgactatgtgcgcgaatgctttgtggatgttgagagggattatctgtgcttgacaaaacagtatcccagacttgcaattactccagaattttctaaggttgggcattttgtacattgaacttttgttgctgatcgatattcaatgtggcttttggcattctctgtcactctagctaggtccttggatgagccacactattgacatgggtttaggaaatttcttggtttgactatgtctcaaattccaggtacgataaagacttcttatttcttattgtttattttctaatacacatatacagatttaatggagggattggtacaaggctcttagttgatgcgctaaatgtccgacacttagcaggagataacctggcccttataatgcagtccatagctacactaataactagatttgccatacgcttagcaggagataacctggcccttataatgcagtgaataggttgaacctataggtatatacatctgtggtagttgactgtatctcttgtcatcagtattgtaattgttttaggatagtttagtgaatatgttagtaagtgcatcttataatatgcataagcaaataaggcgaagctatatgtatatacctagataaaacggtacaatatttatgagcaataaaatgtgaaaaaatagaggagtagaaaacattgccacgagcaatttgaacaaatgaattgggatgtgctttctaattccccgagtcaaaagctacaatagtaagtaggagtagaaaagcatggggttagttggttaggtcctaatcagacaaacagatctatcattgaggaaaatatccaattagtagtttcagagaattcattcattccaaatgggctccaacactgctaatcagattagaagttttttcattgcaatagtaaacatcgtagtgatttgacaaaaaagacgcagcctgtatgcagaggtgttatatctgcacaacatatgaatatttatggttcccatgtgcactctaggttgtgcactagcttttaagtttgttgctatattaagtggtcacagaagcatgatactgtcacacccggttttagaaggcaaaccgaatgcgaaccatgtacgtgccaggatcagttattcacgtacacagcagttacataacatggacatcatcacacagtgctcaaaatagtattaaaagggaataatagtcgattacatcatacgtctgagacgtccatatagtccttacaataaatcaaagtgcgaaaacgaaacgtag

SEQ ID NO: 67046 - DNA, 3744 bp, Zea Mays
cgcatacgcccacagccgccccacgcgcgcatcccgcagccgcgcgatccgtccgcttcctcctccccgcgcccgcagcccccgccgccgatgccagccgccgcgcccgcgcaagggaagttgcttcccaaatcccgcagacaagatttaatcccgtgattcttcccatccatggcagccgtgcccgcaaaccgcgcctccccacgactcccacttccatggcgtcgcccccttccatccatggcagtcacgctccctctgcgcccttccatccatggctgcggctccctccgcgccgcaattcttcccatcctctccttccgcgcggtttgcggctaccaatcctctccctctgcgtcgtgttcttcccatcctctccctccgcgccggatctcgccccatgtccaccaacgccggtgtccgtgatggcgcgctcggggcagcggtggacgcagcctttgccaggcgtgtgctccaggccgaggccctcctcgggtacctctccgcgctggccaccagcccgcgtgccgagggcgacagggtggaccccgccgtcgccgcggcgcagctcggggcgctcggccggtggaagggctcggcgaggggccttcccgagtacacggtcgtccacggcatcgatggtgccgtcgtcgccgcccctgggagagccaaagccaagcagaggaggccgcagtcgaccggatttgggaatcctgctcctgccaaacgggatgaacggaaggaagcaaaatctttctggggttgatttggcttgaaggaagcgggatctttctggacaatggctgtctagcttcatccattctggtacagagggatggagtcttgtaagaaggtagctgcaagcttgaagtcgtgtgagccatgggggaacagggcatcctggacaaacgccgttgggccaggttggaagttgagctttgctgttgagccatggactaagggctttagcgcgtcgtgtgcggcgccatattctgctggagccacagagcatcaattatcgctcgatgagaaggtggataactccaccgttgcatctggttttgatgggtaaagttatctatcagctagattcatggcaggaaaggttttttctattgtcggtatccagcacctaagtaggcctaggatttttttcttctatctttaattagcaattgcctttttcagcaacccgttcttatgaatttcttttattgacaacatgaattagtctattttagttcatctctttcttgtcacaaatttaaatgaatataattgtttgtttcagtggcaattctgtgaagcccaaaggttccaagtcaccatgaaaaaattgaaatgacgagatctcttaatctaattgttgcaccttggaaggtctgaaccatcatagtttaattgtatcacccatttacacaagttcctaccatcagagttcaactgtatcacccatccataagcaattccttttgttgaaatttatgagaagacatatgcctctgttaagtctcaggaacttttttgctgggaagccaattccttactgatctgagggacaacatttttgtttgcctgatataaggtgatgaaggtggctggataacacgattatgggtaaagtgtgaaagggaaacgcgaaaagaaacgtgtcctggtcccaagtcacctgccatactgaacacgattgatcgcagaaagaaacacgttctggtctagactgacaggttccgctgctactattttgtatatataaactatcttatataaagagtacgcacttcgttctcccatttatgaaaattattcatagttttggagctggagccggccatgcgctcgatcagagttccgctgcagccacgacctctctcccgaacgcgcacgaggagaccaggtggaacatatgcaagcaggttctagagcaataaccccatgaatccagatcgggggtctgcatctacacgggcgtgtactccgcaccgctcccctccggccccgaccgccgtgtgctcgttgtagccggggtcgacctcaaccacgacgacgatgcggtctcctcgccccaggctcgacctcctcgctgacctcgccctgctccacctcaactcgcgatgaggattgtcggcacgttcacaccgcgccgttgcagaacgttggagcctctcagaactctagaagctgcctaccaccacgcaccctaagataggggcatatctgtgcatggtaccatcttcatcatgtagctgggatgagctggcaccatgaaagaattcaagtggttaaatcatgcatctgcagaaatattgtactctcaaatggtgggttgctgcgtcatgggagtttgggtgaaggcctgaaggatgtgatgcaaaacgtcgatgcaggtctgggatgtccgcctcattatggatcaaaattcatgacgttctaaaggtgtcggatgagtacctatatactccctcccagaaaacaaggcgcctcattacactattggaagctggacgacatggatgactctggcaagatgcggtgggagcacgacgacatggatgactccgaccatgagttcgacaggaagcctagcaacagtacgcagtagcaaggttgaccagaggggcagtggagactaacccaacaccccctcctccgaccgtcatagcgcttctttcctctggcttcatttcttacctatgtatggatggtcttcaccactggttacatctagcaagtcctcctagggtgacatgaaggagattgtcatgctgccaaagcacatcaaggacaatgcaaacaaggacagaggaagaccggacatgccatttccaggaaatggaggcagcatgctgctgacaagcgattacttagggagcagaagaatgctcttgctgttgcagcattgtgttctctatcacttggcccaccagttcataaaagtacaacggttgataaatccagtggcgatgagctccacctgctgctgcttataaggtaggtggagatggtcgagaaattgagacacatggttctgctgtcctgggtaacttctgcgacaagcgcattcgatggtacaaaagacataatggaagctcttagcaacaaacatactaatctagccaatgagcttgaggtcacttgacatccaagagcaatgtgtgcagctttagggtggtgctgctggagctcatgataggcagacggtcaatggacaagagccgatcagcaggtctgccaccagaagtttcttttatgctggatttgtggtatgaagaaactttgttgaggtattatgcaccagctttggggttcttgatgtttgctgttggtgtaaactcaagcgccaaggatttgattgaaacaataaaaaggccagatgctattgctgcgggctatatcagacagtttgtcaagctcgtcaccgtcgacgaccctttcatcaccacggactacatggtttcgggaggatcaacgggctcgtggccagggtccccctctagaaatgtggggaaaattgatgaggcatcagaactgaggagaactgtgagtgatatcaagcacaatgttcagacacagcttagcgagaatgctaagaccaataaacgagtgattgggattcacaaagaattgcagaaactgcatagagaagctattcagaacaccatcaattcagtcaccatggtagcaaacctgatgcctccattgccttcgttgtcatatcaattgccagacgaatctctgggatcg

SEQ ID NO: 67047 - DNA, 4205 bp, Zea Mays
cgcatacgcccacagccgccccacgcgcgcatcccgcagccgcgcgatccgtccgcttcctcctccccgcgcccgcagcccccgccgccgatgccagccgccgcgcccgcgcaagggaagttgcttcccaaatcccgcagacaagatttaatcccgtgattcttcccatccatggcagccgtgcccgcaaaccgcgcctccccacgactcccacttccatggcgtcgcccccttccatccatggcagtcacgctccctctgcgcccttccatccatggctgcggctccctccgcgccgcaattcttcccatcctctccttccgcgcggtttgcggctaccaatcctctccctctgcgtcgtgttcttcccatcctctccctccgcgccggatctcgccccatgtccaccaacgccggtgtccgtgatggcgcgctcggggcagcggtggacgcagcctttgccaggcgtgtgctccaggccgaggccctcctcgggtacctctccgcgctggccaccagcccgcgtgccgagggcgacagggtggaccccgccgtcgccgcggcgcagctcggggcgctcggccggtggaagggctcggcgaggggccttcccgagtacacggtcgtccacggcatcgatggtgccgtcgtcgccgcccctgggagagccaaagccaagcagaggaggccgcagtcgaccggatttgggaatcctgctcctgccaaacgggatgaacggaaggaagcaaaatctttctggggttgatttggcttgaaggaagcgggatctttctggacaatggctgtctagcttcatccattctggtacagagggatggagtcttgtaagaaggtagctgcaagcttgaagtcgtgtgagccatgggggaacagggcatcctggacaaacgccgttgggccaggttggaagttgagctttgctgttgagccatggactaagggctttagcgcgtcgtgtgcggcgccatattctgctggagccacagagcatcaattatcgctcgatgagaaggtggataactccaccgttgcatctggttttgatgggtaaagttatctatcagctagattcatggcaggaaaggttttttctattgtcggtatccagcacctaacccaaaggttccaagtcaccatgaaaaaattgaaatgacgagatctcttaatctaattgttgcaccttggaaggtctgaaccatcatagtttaattgtatcacccatttacacaagttcctaccatcagagttcaactgtatcacccatccataagcaattccttttgttgaaatttatgagaagacatatgcctctgttaagtctcaggaacttttttgctgggaagccaattccttactgatctgagggacaacatttttgtttgcctgatataaggtaaagtgtgaaagggaaacgcgaaaagaaacgtgtcctggtcccaagtcacctgccatactgaacacgattgatcgcagaaagaaacacgttctggtctagactgacagttttggagctggagccggccatgcgctcgatcagagttccgctgcagccacgacctctctcccgaacgcgcacgaggagaccaggtggaacatatgcaagcaggttctagagcaataaccccatgaatccagatcgggggtctgcatctacacgggcgtgtactccgcaccgctcccctccggccccgaccgccgtgtgctcgttgtagccggggtcgacctcaaccacgacgacgatgcggtctcctcgccccaggctcgacctcctcgctgacctcgccctgctccacctcaactcgcgatgaggattgtcggcacgttcacaccgcgccgttgcagaacgttggagcctctcagaactctagaagctgcctaccaccacgcaccctaagataggggcatatctgtgcatggtaccatcttcatcatgtagctgggatgagctggcaccatgaaagaattcaagtggttaaatcatgcatctgcagaaatattgtactctcaaatggtgggttgctgcgtcatgggagtttgggtgaaggcctgaaggatgtgatgcaaaacgtcgatgcaggtctgggatgtccgcctcattatggatcaaaattcatgacgttctaaaggtgtcggatgagtacctatatactccctcccagaaaacaaggcgcctcattacactattggaagctggacgacatggatgactctggcaagatgcggtgggagcacgacgacatggatgactccgaccatgagttcgacaggaagcctagcaacagtacgcagtagcaaggttgaccagaggggcagtggagactaacccaacaccccctcctccgaccgtcatagcgcttctttcctctggcttcatttcttacctatgtatggatggtcttcaccactggttacatctagcaagtcctcctagggtgacatgaaggagattgtcatgctgccaaagcacatcaaggacaatgcaaacaaggacagaggaagaccggacatgccatttccaggaaatggaggcagcatgctgctgacaagcgattacttagggagcagaagaatgctcttgctgttgcagcattgtgttctctatcacttggcccaccagttcataaaagtacaacggtgtctaagctagcagttgaagaactagatattggccacgcctttaaagaaagacaagcaagaaagcaaaggtcctggtcacggctaaatgtttcggagttgtctggtcccattctaaatgaaaataaccctgatgctagatgcctctgctggatgttgcttgtacttgttccaccgggtatggaatcccagaccaacagttttgtctcaaaatggttacttagaaagctcatgggttatggaaccggatatattggattggttgtttcttcagcaggcctatcaatttggacagagtggatcagttttccaaatgcatgttgtttgtctgttgttagggccagcgatcagcaagttattgataatgatatttggtcgtgttttggtcagtatgacatggcggcagtggtatccacaatgttgctcgtcaccggggtgactacattgctgcacatgtttgttggaacgagactatccacttgtgcagggtccatcctttttatacctggctcctgcccttgcgatcatcaactcacaagaattctttgggatcaatgataataattctaaacacataatgaagcacctgcagggagctataataattggaggtgcattccaagtgtttttgggatatagaggcctcatgtcactatttcttaggttgataaatccagtggcgatgagctccacctgctgctgcttataaggtaggtggagatggtcgagaaattgagacacatggttctgctgtcctgggtaacttctgcgacaagcgcattcgatggtacaaaagacataatggaagctcttagcaacaaacatactaatctagccaatgagcttgagcgcaatactttttgtttgcgcttgctgggggcaagctgatagagcgtattcgtgccttgtcatttcaaagcattgtgcgctaggaaatttcttggtttgactatgtctcaaattccagctttagggtggtgctgctggagctcatgataggcagacggtcaatggacaagagccgatcagcaggtctgccaccagaagtttcttttatgctggatttgtggtatgaagaaactttgttgaggtattatgcaccagctttggggttcttgatgtttgctgttggtgtaaactcaagcgccaaggatttgattgaaacaataaaaaggccagatgctattgctgcgggctatatcagacagtttgtcaagctcgtcaccgtcgacgaccctttcatcaccacggactacatggtttcgggaggatcaacgggctcgtggccagggtccccctctagaaatgtggggaaaattgatgaggcatcagaactgaggagaactgtgagtgatatcaagcacaatgttcagacacagcttagcgagaatgctaagaccaataaacgagtgattgggattcacaaagaattgcagaaactgcatagagaagctattcagaacaccatcaattcagtcaccatggtagcaaacctgatgcctccattgccttcgttgtcatatcaattgccagacgaatctctgggatcg

SEQ ID NO: 67048 - DNA, 7072 bp, Zea Mays
cgcatacgcccacagccgccccacgcgcgcatcccgcagccgcgcgatccgtccgcttcctcctccccgcgcccgcagcccccgccgccgatgccagccgccgcgcccgcgcaagggaagttgcttcccaaatcccgcagacaagatttaatcccgtgattcttcccatccatggcagccgtgcccgcaaaccgcgcctccccacgactcccacttccatggcgtcgcccccttccatccatggcagtcacgctccctctgcgcccttccatccatggctgcggctccctccgcgccgcaattcttcccatcctctccttccgcgcggtttgcggctaccaatcctctccctctgcgtcgtgttcttcccatcctctccctccgcgccggatctcgccccatgtccaccaacgccggtgtccgtgatggcgcgctcggggcagcggtggacgcagcctttgccaggcgtgtgctccaggccgaggccctcctcgggtacctctccgcgctggccaccagcccgcgtgccgagggcgacagggtggaccccgccgtcgccgcggcgcagctcggggcgctcggccggtggaagggctcggcgaggggccttcccgagtacacggtcgtccacggcatcgatggtgccgtcgtcgccgcccctgggagagccaaagccaagcagaggaggccgcagtcgaccggatttgggaatcctgctcctgccaaacgggatgaacggaaggaagcaaaatctttctggggttgatttggcttgaaggaagcgggatctttctggacaatggctgtctagcttcatccattctggtacagagggatggagtcttgtaagaaggtagctgcaagcttgaagtcgtgtgagccatgggggaacagggcatcctggacaaacgccgttgggccaggttggaagttgagctttgctgttgagccatggactaagggctttagcgcgtcgtgtgcggcgccatattctgctggagccacagagcatcaattatcgctcgatgagaaggtggataactccaccgttgcatctggttttgatgggtaaagttatctatcagctagattcatggcaggaaaggttttttctattgtcggtatccagcacctaagtaggcctaggatttttttcttctatctttaattagcaattgcctttttcagcaacccgttcttatgaatttcttttattgacaacatgaattagtctattttagttcatctctttcttgtcacaaatttaaatgaatataattgtttgtttcagtggcaattctgtgaagcccaaaggttccaagtcaccatgaaaaaattgaaatgacgagatctcttaatctaattgttgcaccttggaaggtctgaaccatcatagtttaattgtatcacccatttacacaagttcctaccatcagagttcaactgtatcacccatccataagcaattccttttgttgaaatttatgagaagacatatgcctctgttaagtctcaggaacttttttgctgggaagccaattccttactgatctgagggacaacatttttgtttgcctgatataaggtaaagtgtgaaagggaaacgcgaaaagaaacgtgtcctggtcccaagtcacctgccatactgaacacgattgatcgcagaaagaaacacgttctggtctagactgacagttttggagctggagccggccatgcgctcgatcagagttccgctgcagccacgacctctctcccgaacgcgcacgaggagaccaggtggaacatatgcaagcaggttctagagcaataaccccatgaatccagatcgggggtctgcatctacacgggcgtgtactccgcaccgctcccctccggccccgaccgccgtgtgctcgttgtagccggggtcgacctcaaccacgacgacgatgcggtctcctcgccccaggctcgacctcctcgctgacctcgccctgctccacctcaactcgcgatgaggattgtcggcacgttcacaccgcgccgttgcagaacgttggagcctctcagaactctagaagctgcctaccaccacgcaccctaagataggggcatatctgtgttagtcgcctgcacacatactgaaatatgggcatatccaccatgtattcttctcttagttatgttagataagacttttactctgtcatttactgatctggtctgtttttagctccattagcttgttcacaagcttatgttagagaaggcgttatggcttttctcaagattataacatttctgaataactgttctgcgtaggcatggtaccatcttcatcatgtagctgggatgagctggcaccatgaaagaattcaagtggttaaatcatgcatctgcagaaatattgtactctcaaatggtgggttgctgcgtcatgggagtttgggtgaaggcctgaaggatgtgatgcaaaacgtcgatgcaggtctgggatgtccgcctcattatggatcaaaattcatgacgttctaaaggtgtcggatgagtacctatatactccctcccagaaaacaaggcgcctcattacactattggaagctggacgacatggatgactctggcaagatgcggtgggagcacgacgacatggatgactccgaccatgagttcgacaggaagcctagcaacagtacgcagtagcaaggttgaccagaggggcagtggagactaacccaacaccccctcctccgaccgtcatagcgcttctttcctctggcttcatttcttacctatgtatggatggtcttcaccactggttacatctagcaagtcctcctaggggtgagctcaattttctcctgatttgctctctcctttgttttttattgattcatctatgcacatttaatgatctatggcgtgccttcaatgcaattggtggaggcagtgacatgaaggagattgtcatgctgccaaagcacatcaaggacaatgcaaacaaggacagaggaagaccggacatgccatttccagagaacttctcaagggcccgctgtattatgcctgtgctataactctgacaacaatagttttctggaggacatctcccatctcaatcgcggtgatctgcaatttgtgtgccggagatggaaatggaggcagcatgctgctgacaagcgattacttagggagcagaagaatgctcttgctgttgcagcattgtgttctctatcacttggcccaccagttcataaaagtacaacggtgtctaagctagcagttgaagaactagatattggccacgcctttaaagaaagacaagcaagaaagcaaaggtcctggtcacggctaaatgtttcggagttgtctggtcccattctaaatgaaaataaccctgatgctagatgcctctgctggatgttgcttgtacttgttccaccgggtatggaatcccagaccaacagttttgtctcaaaatggttacttagaaagctcatgggttatggaaccggatatattggattggttgtttcttcagcaggcctatcaatttggacagagtggatcagttttccaaatgcatgttgtttgtctgttgttagggccagcgatcagcaagttattgataatgatatttggtcgtgttttggtcagtatgacatggcggcagtggtatccacaatgttgctcgtcaccggggtgactacattgctgcacatgtttgttggaacgagactatccacttgtgcagggtccatcctttttatacctggctcctgcccttgcgatcatcaactcacaagaattctttgggatcaatgataataattctaaacacataatgaagcacctgcagggagctataataattggaggtgcattccaagtgtttttgggatatagaggcctcatgtcactatttcttaggttgataaatccagtggcgatgagctccacctgctgctgcttataaggtatggtgcttgtgagacctgtcatggttgcttgctttgctttgtttagagatgctctcgccatggctgccagttgcactggtattcatgcaacctacatttggtccctgcaatatagttgcttcttgaaagcaggtaggtggagatggtcgagaaattgagacacatggttctgctgtcctgggtaacttctgcgacaagcgcattcgatggtacaaaagacataatggaagctcttagcaacaaacatactaatctagccaatgagcttgaggtattatgcaccagctttggggttcttgatgtttgctgttggtgtaaactcaagcgccaaggatttgattgaaacaataaaaaggccagatgctattgctgcgggctatatcagacagtttgtcaagctcgtcaccgtcgacgaccctttcatcaccacggactacatggtttcgggaggatcaacgggctcgtggccagggtccccctctagaaatgtggggaaaattgatgaggcatcagaactgaggagaactgtgagtgatatcaagcacaatgttcagacacagcttagcgagaatgctaagaccaataaacgagtgattgggattcacaaagaattgcagaaactgcttagagaagctattcagaacaccatcaattcagtcaccatggtagcaaccctgattgcctccattgccttcgttgtcatattcaatttgccaggtcaatacttccaagatgtgaatagtgggggagacattgattgtgagtgaggcggtggtggtggacacgcgcaggacgggacggacgaagcatcttccaagccggggcagagcgctgtcgaagcagccagcaacaaaagctttcgctggagccgctggtggagtacagagacgtgggaaccaggtttgctgcgctgataaatgggcgatgttgcagttttaaggggcatctaaaaaattagtgggataaattttaatcttttctccaatatatcccttaaaacggcattagagacccaaaaaaacctctcatttgtagatacaaataagagagttttaagggatataaaaagttatgagtgttttagtggaaaggcacattattgttcaagtaaacgcacaagttttatgtcgctcttgcccatttgataatgttattgttgtttggtagcctgcaatcttcctgcctcacattactacctgcttcaccatactatgacccttgtcatttttcaggaagggtattgctgttgaccgattagttgggtctcaagatctcagaagtaaagacgattttctgacaagagcactggaacatattcttattctcaagacgaaagggataatcgatgagaagaagaaagatgacgaagatgacgatgaagaaagcgaggctaagaataggagggttaggtcctcaactgctcaagcctctgactcagactgaacctaagatgaggattgaggactcaccttttttgcactttggattttgtttgtttgttctgtgatgtgctgtattgtactgtaattgatttgtgtaaccatgtatcggtaccagacaccacaacaagaacatgtacaagagattctttagcatccattgtgtgtaaaagttagggtttgtggctgccttttatttcatttttccttagctgtcataggatggtacaacacaacaagaacatgtacaagtatgtcatagcttgtctttcttgcttcttaagacattgttctgccttttggcacttatggcatatgactttttcacaaatagattacgaaacattttctcataacagtataacacacattcacatataaattattttagtattatatatgtttccgttgcaacgcacgggcactcacctagtttaaacttatgagcaattgaccatcgctctgttaaaattcttcggcatagcatcggtgcactgcttcctagtcagacatagaagaatctaaaaaaagggatgctaaaaagaaagaaagaaaaattaataatcctttccttgatcgtacacacatacaaactgcttcaagaaaggcacgatcttgacggagcgatcaccagccagcctacttcttatccttcacaatggagagctcttcgagccagtccaggatcctgctacggcgggcgacgccccggccgcggccgcacttggcgccgtgcttctccctgctccgcctcgccgcctccggcacgcgcgcgcgcacgggctcgatgatggcgtcgggcgagcacttgcagccgagcctgtccccgaacagcgccgccaatccaagcttcctgtcgacggcggcggccacctgttcgaaccgcgcgctcctgctgcctccgcccctcgctgcggcggtgaccttggcatcggccgcggggcgcggcggcggcggagggtacacgtccggggcgccgacgacgccgaggcggaagcgaaacaggccccacgccgccgcggcgggctgcgcggacccggtgctgcggcgcgggcgcgccgagcgcagccgcggcgacgggctcgggtgcgcgtagaacaggctgctcgacagcgagcgccgcggcggaggcgccccggcgccgtggtcggaggaggcgctcttggacgactggctccggctcacgcacccgctgctgctgccgctcgagctcgagctcgcgctgcggctgccggaccgcgacaccaggcccacggtggaggccactgactccgacctcggcagcgtggcgccgtcggcggccgcggccgaggaggcgcggagcgggaggagcttgccctggcagaagacctcgtcggccacgcacatgtccgtccccgcgctctctccggccgggacgatgccgccggacgacaggatgcagaactcgaagtcgtcggccgagtccgaggtggggccgtcggccgagtccgaggcgcggcactctgtctctgccatggtcggattcttttcctggtccaaggagaacggggagaagaaatggtcaggttttcgttgtgttctggtcttccttttggcttgttcggttttatattggaagaaaagaggggatgcaaatgcagagggagagagagagaggtcatggtcatgcggtggtctctttccgtcttt

SEQ ID NO: 67049 - DNA, 5538 bp, Zea Mays
aaggaagcaaaatctttctggggttgatttggcttgaaggaagcgggatctttctggacaatggctgtctagcttcatccattctgagggatggagtcttgtaagaaggtagctgcaagcttgaagtcgtgtgagccatgggggaacagggcatcctggacaaacgccgttgggccaggttggaagttgagctttgctgttgagccatggactaagggctttagcgcgtcgtgtgcggcgccatattctgctggagccacagagcatcaattatcgctcgatgagaaggtggataactccaccgttgcatctggttttgatggtggcaattctgtgaagcccaaaggttccaagtcaccatgaaaaaattgaaatgacgagatctcttaatctaattgttgcaccttggaaggtctgaaccatcatagtttaattgtatcacccatttacacaagttcctaccatcagagttcaactgtatcacccatccataagcaattccttttgttgaaatttatgagaagacatatgcctctgttaagtctcaggaacttttttgctgggaagccaattccttactgatctgagggacaacatttttgtttgcctgatataaggtaaagtgtgaaagggaaacgcgaaaagaaacgtgtcctggtcccaagtcacctgccatactgaacacgattgatcgcagaaagaaacacgttctggtctagactgacagttttggagctggagccggccatgcgctcgatcagagttccgctgcagccacgacctctctcccgaacgcgcacgaggagaccaggtggaacatatgcaagcaggttctagagcaataaccccatgaatccagatcgggggtctgcatctacacgggcgtgtactccgcaccgctcccctccggccccgaccgccgtgtgctcgttgtagccggggtcgacctcaaccacgacgacgatgcggtctcctcgccccaggctcgacctcctcgctgacctcgccctgctccacctcaactcgcgatgaggattgtcggcacgttcacaccgcgccgttgcagaacgttggagcctctcagaactctagaagctgcctaccaccacgcaccctaagataggggcatatctgtgttagtcgcctgcacacatactgaaatatgggcatatccaccatgtattcttctcttagttatgttagataagacttttactctgtcatttactgatctggtctgtttttagctccattagcttgttcacaagcttatgttagagaaggcgttatggcttttctcaagattataacatttctgaataactgttctgcgtaggcatggtaccatcttcatcatgtagctgggatgagctggcaccatgaaagaattcaagtggttaaatcatgcatctgcagaaatattgtactctcaaatggtgggttgctgcgtcatgggagtttgggtgaaggcctgaaggatgtgatgcaaaacgtcgatgcaggtctgggatgtccgcctcattatggatcaaaattcatgacgttctaaaggtgtcggatgagtacctatatactccctcccagaaaacaaggcgcctcattacactattggaagctggacgacatggatgactctggcaagatgcggtgggagcacgacgacatggatgactccgaccatgagttcgacaggaagcctagcaacagtacgcagtagcaaggttgaccagaggggcagtggagactaacccaacaccccctcctccgaccgtcatagcgcttctttcctctggcttcatttcttacctatgtatggatggtcttcaccactggttacatctagcaagtcctcctagggtgacatgaaggagattgtcatgctgccaaagcacatcaaggacaatgcaaacaaggacagaggaagaccggacatgccatttccaggaaatggaggcagcatgctgctgacaagcgattacttagggagcagaagaatgctcttgctgttgcagcattgtgttctctatcacttggcccaccagttcataaaagtacaacggtgtctaagctagcagttgaagaactagatattggccacgcctttaaagaaagacaagcaagaaagcaaaggtcctggtcacggctaaatgtttcggagttgtctggtcccattctaaatgaaaataaccctgatgctagatgcctctgctggatgttgcttgtacttgttccaccgggtatggaatcccagaccaacagttttgtctcaaaatggttacttagaaagctcatgggttatggaaccggatatattggattggttgtttcttcagcaggcctatcaatttggacagagtggatcagttttccaaatgcatgttgtttgtctgttgttagggccagcgatcagcaagttattgataatgatatttggtcgtgttttggtcagtatgacatggcggcagtggtatccacaatgttgctcgtcaccggggtgactacattgctgcacatgtttgttggaacgagactatccacttgtgcagggtccatcctttttatacctggctcctgcccttgcgatcatcaactcacaagaattctttgggatcaatgataataattctaaacacataatgaagcacctgcagggagctataataattggaggtgcattccaagtgtttttgggatatagaggcctcatgtcactatttcttaggttgataaatccagtggcgatgagctccacctgctgctgcttataaggtaggtggagatggtcgagaaattgagacacatggttctgctgtcctgggtaacttctgcgacaagcgcattcgatggtacaaaagacataatggaagctcttagcaacaaacatactaatctagccaatgagcttgagctttagggtggtgctgctggagctcatgataggcagacggtcaatggacaagagccgatcagcaggtctgccaccagaagtttcttttatgctggatttgtggtatgaagaaactttgttgaggtattatgcaccagctttggggttcttgatgtttgctgttggtgtaaactcaagcgccaaggatttgattgaaacaataaaaaggccagatgctattgctgcgggctatatcagacagtttgtcaagctcgtcaccgtcgacgaccctttcatcaccacggactacatggtttcgggaggatcaacgggctcgtggccagggtccccctctagaaatgtggggaaaattgatgaggcatcagaactgaggagaactgtgagtgatatcaagcacaatgttcagacacagcttagcgagaatgctaagaccaataaacgagtgattgggattcacaaagaattgcagaaactgcttagagaagctattcagaacaccatcaattcagtcaccatggtagcaaccctgattgcctccattgccttcgttgtcatattcaatttgccaggtcaatacttccaagatgtgaatagtgggggagacattgattgtgagtgaggcggtggtggtggacacgcgcaggacgggacggacgaagcatcttccaagccggggcagagcgctgtcgaagcagccagcaacaaaagctttcgctggagccgctggtggagtacagagacgtgggaaccaggaagggtattgctgttgaccgattagttgggtctcaagatctcagaagtaaagacgattttctgacaagagcactggaacatattcttattctcaagacgaaagggataatcgatgagaagaagaaagatgacgaagatgacgatgaagaaagcgaggctaagaataggagggttaggtcctcaactgctcaagcctctgactcagactgaacctaagatgaggattgaggactcaccttttttgcactttggattttgtttgtttgttctgtgatgtgctgtattgtactgtaattgatttgtgtaaccatgtatcggtaccagacaccacaacaagaacatgtacaagagattctttagcatccattgtgtgtaaaagttagggtttgtggctgccttttatttcatttttccttagctgtcataggatggtacaacacaacaagaacatgtacaagtatgtcatagcttgtctttcttgcttcttaagacattgttctgccttttggcacttatggcatatgactttttcacaaatagattacgaaacattttctcataacagtataacacacattcacatataaattattttagtattatatatgtttccgttgcaacgcacgggcactcacctagtttaaacttatgagcaattgaccatcgctctgttaaaattcttcggcatagcatcggtgcactgcttcctagtcagacatagaagaatctaaaaaaagggatgctaaaaagaaagaaagaaaaattaataatcctttccttgatcgtacacacatacaaactgcttcaagaaaggcacgatcttgacggagcgatcaccagccagcctacttcttatccttcacaatggagagctcttcgagccagtccaggatcctgctacggcgggcgacgccccggccgcggccgcacttggcgccgtgcttctccctgctccgcctcgccgcctccggcacgcgcgcgcgcacgggctcgatgatggcgtcgggcgagcacttgcagccgagcctgtccccgaacagcgccgccaatccaagcttcctgtcgacggcggcggccacctgttcgaaccgcgcgctcctgctgcctccgcccctcgctgcggcggtgaccttggcatcggccgcggggcgcggcggcggcggagggtacacgtccggggcgccgacgacgccgaggcggaagcgaaacaggccccacgccgccgcggcgggctgcgcggacccggtgctgcggcgcgggcgcgccgagcgcagccgcggcgacgggctcgggtgcgcgtagaacaggctgctcgacagcgagcgccgcggcggaggcgccccggcgccgtggtcggaggaggcgctcttggacgactggctccggctcacgcacccgctgctgctgccgctcgagctcgagctcgcgctgcggctgccggaccgcgacaccaggcccacggtggaggccactgactccgacctcggcagcgtggcgccgtcggcggccgcggccgaggaggcgcggagcgggaggagcttgccctggcagaagacctcgtcggccacgcacatgtccgtccccgcgctctctccggccgggacgatgccgccggacgacaggatgcagaactcgaagtcgtcggccgagtccgaggtggggccgtcggccgagtccgaggcgcggcactctgtctctgccatggtcggattcttttcctggtccaaggagaacggggagaagaaatggtcaggttttcgttgtgttctggtcttccttttggcttgttcggttttatattggaagaaaagaggggatgcaaatgcagagggagagagagagaggtcatggtcatgcggtggtctctttccgtcttt

SEQ ID NO: 67050 - DNA, 3430 bp, Zea Mays
atccattctgacgtctcttttaggtacagagggatggagtcttgtaagaaggtagctgcaagcttgaagtcgtgtgagccatgggggaacagggcatcctggacaaacgccgttgggccaggttggaagttgagctttgctgttgagccatggactaagggctttagcgcgtcgtgtgcggcgccatattctgctggagccacagagcatcaattatcgctcgatgagaaggtggataactccaccgttgcatctggttttgatgggtaaagttatctatcagctagattcatggcaggaaaggttttttctattgtcggtatccagcacctaagtaggcctaggatttttttcttctatctttaattagcaattgcctttttcagcaacccgttcttatgaatttcttttattgacaacatgaattagtctattttagttcatctctttcttgtcacaaatttaaatgaatataattgtttgtttcagtggcaattctgtgaagcccaaaggttccaagtcaccatgaaaaaattgaaatgacgagatctcttaatctaattgttgcaccttggaaggtctgaaccatcatagtttaattgtatcacccatttacacaagttcctaccatcagagttcaactgtatcacccatccataagcaattccttttgttgaaatttatgagaagacatatgcctctgttaagtctcaggaacttttttgctgggaagccaattccttactgatctgagggacaacatttttgtttgcctgatataaggtaaagtgtgaaagggaaacgcgaaaagaaacgtgtcctggtcccaagtcacctgccatactgaacacgattgatcgcagaaagaaacacgttctggtctagactgacagttttggagctggagccggccatgcgctcgatcagagttccgctgcagccacgacctctctcccgaacgcgcacgaggagaccaggtggaacatatgcaagcaggttctagagcaataaccccatgaatccagatcgggggtctgcatctacacgggcgtgtactccgcaccgctcccctccggccccgaccgccgtgtgctcgttgtagccggggtcgacctcaaccacgacgacgatgcggtctcctcgccccaggctcgacctcctcgctgacctcgccctgctccacctcaactcgcgatgaggattgtcggcacgttcacaccgcgccgttgcagaacgttggagcctctcagaactctagaagctgcctaccaccacgcaccctaagataggggcatatctgtgcatggtaccatcttcatcatgtagctgggatgagctggcaccatgaaagaattcaagtggttaaatcatgcatctgcagaaatattgtactctcaaatggtgggttgctgcgtcatgggagtttgggtgaaggcctgaaggatgtgatgcaaaacgtcgatgcaggtctgggatgtccgcctcattatggatcaaaattcatgacgttctaaaggtgtcggatgagtacctatatactccctcccagaaaacaaggcgcctcattacactattggaagctggacgacatggatgactctggcaagatgcggtgggagcacgacgacatggatgactccgaccatgagttcgacaggaagcctagcaacagtacgcagtagcaaggttgaccagaggggcagtggagactaacccaacaccccctcctccgaccgtcatagcgcttctttcctctggcttcatttcttacctatgtatggatggtcttcaccactggttacatctagcaagtcctcctagggtgacatgaaggagattgtcatgctgccaaagcacatcaaggacaatgcaaacaaggacagaggaagaccggacatgccatttccaggaaatggaggcagcatgctgctgacaagcgattacttagggagcagaagaatgctcttgctgttgcagcattgtgttctctatcacttggcccaccagttcataaaagtacaacggtgtctaagctagcagttgaagaactagatattggccacgcctttaaagaaagacaagcaagaaagcaaaggtcctggtcacggctaaatgtttcggagttgtctggtcccattctaaatgaaaataaccctgatgctagatgcctctgctggatgttgcttgtacttgttccaccgggtatggaatcccagaccaacagttttgtctcaaaatggttacttagaaagctcatgggttatggaaccggatatattggattggttgtttcttcagcaggcctatcaatttggacagagtggatcagttttccaaatgcatgttgtttgtctgttgttagggccagcgatcagcaagttattgataatgatatttggtcgtgttttggtcagtatgacatggcggcagtggtatccacaatgttgctcgtcaccggggtgactacattgctgcacatgtttgttggaacgagactatccacttgtgcagggtccatcctttttatacctggctcctgcccttgcgatcatcaactcacaagaattctttgggatcaatgataataattctaaacacataatgaagcacctgcagggagctataataattggaggtgcattccaagtgtttttgggatatagaggcctcatgtcactatttcttaggttgataaatccagtggcgatgagctccacctgctgctgcttataaggtaggtggagatggtcgagaaattgagacacatggttctgctgtcctgggtaacttctgcgacaagcgcattcgatggtacaaaagacataatggaagctcttagcaacaaacatactaatctagccaatgagcttgaggtcacttgacatccaagagcaatgtgtgcagctttagggtggtgctgctggagctcatgataggcagacggtcaatggacaagagccgatcagcagggtattatgcaccagctttggggttcttgatgtttgctgttggtgtaaactcaagcgccaaggatttgattgaaacaataaaaaggccagatgctattgctgcgggctatatcagacagtttgtcaagctcgtcaccgtcgacgaccctttcatcaccacggactacatggtttcgggaggatcaacgggctcgtggccagggtccccctctagaaatgtggggaaaattgatgaggcatcagaactgaggagaactgtgagtgatatcaagcacaatgttcagacacagcttagcgagaatgctaagaccaataaacgagtgattgggattcacaaagaattgcagaaactgcatagagaagctattcagaacaccatcaattcagtcaccatggtagcaaacctgatgcctccattgccttcgttgtcatatcaattgccagacgaatctctgggatcg

SEQ ID NO: 67051 - DNA, 3010 bp, Zea Mays
ctcgtccccaccgggcaccggccgaagaagataaccccaaaaccccgccggtccccaccggctacgccatggccgaaatgctcgcccttccgctgcccctccgagctccggcgccaccgccgcgtcctacaattcccaaccccatcgtcacccatcgccaacctcacacaccgtcctcctcccctcctcgcctcttctccccgaactccctcctctccacttcccgccccactccagcctcatcctcccgcaaaccgcgcctcggccgcccgctcgacaccttccgcggcgaacagccgtggcacctgcctccgtccctgtccctccccgcccgccgcgcgctcctcgccctgctcgccgacccggcggaacacgcttccccgcgcgacgtcctctcggcgctcccggagaccgatctccccgccgtcgtgaacacgctcgcctcccgagggggccaccccggcatcgctgtcgccgtggtccgcgccgcgcgggacctccacggtgaccgcgctctccatcacccgcgcgtgctgcctactgccatccgcgtgtttgcgcgcgccggctgcctcgccgaggcctctgctatcctcgaggccgcgccggcgcccgacgccagcgcatacactgcgctcgtgtccgcgttctcccgcgccgggaggttccgggacgcggtcgccgtgttccagcgcatggtggatggaggcgtgcagcccgcgctcgtcacctacaacgttgtgttccatgcctactccaagatgtctgtcccgtggaaagaggtcgtggcgctcgtggactcaatgaaggaggacggcattgagcgggacaggtatacgtacaacacgctcattagttgttgccgtcgaagggggcttcacagggaggcagcgcaggtgttcgatgagatgaaggctgctggattcgaacctgacaaggtcacattcaattccctgctggatgtatatggtaaggcgcggaagcatgaggaggcaattggggtgctaaagaggatggagaatgccggatgtacacccagcgtggtgacctacaactcgctcatctcggcttatgtgaaggatgggttgttagaagaggctctggagctaaaacaggagatggagttcaggggtatgaagccggatgtggttacatacacgacattgatctctggccttgacagagttggcaaaattgacgcagcacttgctacatacagtgaaatggtgaggaacggatgtagcccgaacttatgcacctataatgcattgatcaagttgcacggggtgagggggaaattcacagagatgatggctgtctttgatgacctcaggtctgctgggtatgtgccagatgttgtcacctggaacacgctcttgtccgtgtttgggcagaatggtctagattctgaggtttcaggggtgttcaaggagatgaagaaagctggctatatccctgagagggacacatatgtttcactaattagttcatatagtcgatgtggtttgtttgatcaagcaatggagatatacaagaggatgatagaagccggtatatatccagatatttcgacttataatgctgttctatctgcattggctcgtggtggtcgctgggaacaagcagaaaagttgtttgctgagatggtggatcgagattgtaagccagatgagctcagttattcctcattgcttcatgcatatgctaatgctaagaagttggacaaaatgaaaactttatcagaagatatatatgcagagaggattgaacgacacaactggctagtaaaaacattggtcctggtcaataacaaagttaataatttacctgagacagaaaaggcgtttcaggaactgaggaggcggcgttgctccctggacattaatgttcttaacgccatggtatccatatacgggaaaaataagatggttaagaaggtggaggaggtcctttcactcatgatggagaattctatcaaccacagtgctgcaacctataatagtttgatgcatatgtattctcgtttaggtgattgtgaaaagtgtgaatcaatcctcactgagatcaagtcaagtggcatgcgccctgatagatactcttataacactgtgatatatgcatatggaagaaaaggacagatgaaagaagcctcaaggttgttctctgaaatgaaatgttcaggcgtgaaaccagatattgtaacatacaatattttcatcaagagctatgttgccaacataatgtttgaagaagctattgatttagtacgctatttggttacacaaggttgcaggccaaatgagagaactttcaattcaatactgcagggctactctagacatggaaggatggtagaggcgaaatcattccttagcaaccttcctaagatttatcctggaatatcgaaacaagaaaaacaacgactgtcggaactgctggcaaaacacacttcgtaagatggttgatattataagaaccaaaccctttttgtgagcatgataggttgattcttttccatgggagctccgtgtaaacacagcatgaatatgttgttcccaaagataagtggcaatgcatcattttaaaaagatgcacattggtttgtaggcgcaagcgcaagaagccatgaacctgtgcgaagtcaaggtcagcattcattgtacacgttccatctcgtgtacattgtacttattactcccccctgtccccgaagaatctcgtgtactttggattgaccttaacatgagcaagatgaagttggtttatttaccggccgttacaccaacgtttcacttacattcgcgtggtgtgcagtcagtatatcggatgaggagttgaggacatcaacttttttttgcggcaggtacgtatgtagttggtaatacagattacagtgactcagttaatgtcgatgtaccggatcatgtgttccttacttttgcaatagtgctcgatcgttccgatcaacttttgcgtgcatctcgaacgaaagacaagtgatgtagtccct

SEQ ID NO: 67052 - DNA, 3480 bp, Zea Mays
ccccaccgggcaccggccgaagaagataaccccaaaaccccgccggtccccaccggctacgccatggccgaaatgctcgcccttccgctgcccctccgagctccggcgccaccgccgcgtcctacaattcccaaccccatcgtcacccatcgccaacctcacacaccgtcctcctcccctcctcgcctcttctccccgaactccctcctctccacttcccgccccactccagcctcatcctcccgcaaaccgcgcctcggccgcccgctcgacaccttccgcggcgaacagccgtggcacctgcctccgtccctgtccctccccgcccgccgcgcgctcctcgccctgctcgccgacccggcggaacacgcttccccgcgcgacgtcctctcggcgctcccggagaccgatctccccgccgtcgtgaacacgctcgcctcccgagggggccaccccggcatcgctgtcgccgtggtccgcgccgcgcgggacctccacggtgaccgcgctctccatcacccgcgcgtgctgcctactgccatccgcgtgtttgcgcgcgccggctgcctcgccgaggcctctgctatcctcgaggccgcgccggcgcccgacgccagcgcatacactgcgctcgtgtccgcgttctcccgcgccgggaggttccgggacgcggtcgccgtgttccagcgcatggtggatggaggcgtgcagcccgcgctcgtcacctacaacgttgtgttccatgcctactccaagatgtctgtcccgtggaaagaggtcgtggcgctcgtggactcaatgaaggaggacggcattgagcgggacaggtatacgtacaacacgctcattagttgttgccgtcgaagggggcttcacagggaggcagcgcaggtgttcgatgagatgaaggctgctggattcgaacctgacaaggtcacattcaattccctgctggatgtatatggtaaggcgcggaagcatgaggaggcaattggggtgctaaagaggatggagaatgccggatgtacacccagcgtggtgacctacaactcgctcatctcggcttatgtgaaggatgggttgttagaagaggctctggagctaaaacaggagatggagttcaggggtatgaagccggatgtggttacatacacgacattgatctctggccttgacagagttggcaaaattgacgcagcacttgctacatacagtgaaatggtgaggaacggatgtagcccgaacttatgcacctataatgcattgatcaagttgcacggggtgagggggaaattcacagagatgatggctgtctttgatgacctcaggtctgctgggtatgtgccagatgttgtcacctggaacacgctcttgtccgtgtttgggcagaatggtctagattctgaggtttcaggggtgttcaaggagatgaagaaagctggctatatccctgagagggacacatatgtttcactaattagttcatatagtcgatgtggtttgtttgatcaagcaatggagatatacaagaggatgatagaagccggtatatatccagatatttcgacttataatgctgttctatctgcattggctcgtggtggtcgctgggaacaagcagaaaagttgtttgctgagatggtggatcgagattgtaagccagatgagctcagttattcctcattgcttcatgcatatgctaatgctaagaagttggacaaaatgaaaactttatcagaagatatatatgcagagaggattgaacgacacaactggctagtaaaaacattggtcctggtcaataacaaagttaataatttacctgagacagaaaaggcgtttcaggaactgaggaggcggcgttgctccctggacattaatgttcttaacgccatggtatccatatacgggaaaaataagatggttaagaaggtggaggaggtcctttcactcatgatggagaattctatcaaccacagtgctgcaacctataatagtttgatgcatatgtattctcgtttaggtgattgtgaaaagtgtgaatcaatcctcactgagatcaagtcaagtggcatgcgccctgatagatactcttataacactgtgatatatgcatatggaagaaaaggacagatgaaagaagcctcaaggttgttctctgaaatgaaatgttcaggcgtgaaaccagatattgtaacatacaatattttcatcaagagctatgttgccaacataatgtttgaagaagctattgatttagtacgctatttggttacacaaggttgcaggccaaatgagagaactttcaattcaatactgcagggctactctagacatggaaggatggtagaggcgaaatcattccttagcaaccttcctaagatttatcctggaatatcgaaacaagaaaaacaacgactgtcggaactgctggcaaaacacacttcgtaagatggttgatattataagaaccaaaccctttttgtgagcatgataggttgattcttttccatgggagctccgtgtaaacacagcatgaatatgttgttcccaaagataagtggcaatgcatcattttaaaaagatgcacattggtttgtaggcgcaagcgcaagaagccatgaacctgtgcgaagtcaaggtaagaggttcggcactattgtgttctgattttatacactgtactcattggaagtccgttgtttcgtttttcttggtgttatccttgtattacgattttcttcatttttttaaatggtttctcgaatattttcatccttgttgccgaggatcccgtttgggacgatagttggtttccatattgccagctggtgccagtatggttaccgtgaaatctgagtgagagcacaccgtccgcatcttccatcagctggcacatcgcaaaattgtatactgttttgctcttgggtgttgcattgcatgtatagttttagcttgagcggttgattggccattcgcatacggtgacaaggcaggtaggcattaggtatcgtttcccgtgctgttctaagttgtgtgagtaggctgcgttgcttctttgtttttgtctagccttgctttctttccatgcctgtgcatagttatttctttttcaggtcagcattcattgtacacgttccatctcgtgtacattgtacttattactcccccctgtccccgaagaatctcgtgtactttggattgaccttaacatgagcaagatgaagttggtttatttaccggccgttacaccaacgtttcacttacattcgcgtggtgtgcagtcagtatatcggatgaggagttgaggacatcaacttttttttgcggcaggtacgtatgtagttggtaatacagattacagtgactcagttaatgtcgatgtaccggatcatgtgttccttacttttgcaatagtgctcgatcgttccgatcaacttttgcgtgcatctcgaacgaaagacaagtgatgtagtccct

SEQ ID NO: 67053 - DNA, 251 bp, Zea Mays
cacagattcagcatttttagtactaggaacatcaagtgccgttgacagtaaacacgaacagaactggaccagtactacatctttctcatggcctgcacgagctctctctctctctttctctcaagatcaaaacaaggtctgcaagactaggggaacggaggatggtgctaaaacttctgcgttttcagaggataaaagattcatccagcccgaggacaagacatcagtgacggacggcctgggatcgttta

SEQ ID NO: 67054 - DNA, 682 bp, Zea Mays
aatgggggttcccttgatggagaggaggggcagcggctccgccgtcttggacgggatgggcgcgagcggcgcgcccatgacgccgaggagcaggcggaggtcggaccgccggaacgagccgctcgacccgccgggaccaccaccaccacctgcggcagaggaggccatggacggcgtgcgcgtcaggtggccgcggacccagtgcccgaacccctcgcggcggccggagtcctccgcgtcggggtcgccggcggcgaggcgctcggcgtcgggcccctcgatgagcggcgccagagcctccccgccggggcgcaggctgccggagcgcgcgacgagctgctcgcccaggtactgctccagcaccttctccggcggcggcggcggcggagccgcgggcgccttgcgccggcgcgggatcagcatcctcgccggcgacgcgctccgcggcggcgccggggacttccccctggacctcgacggcgacagcccccgtacgacctcctccttgagcgcggcgaagaaaccctgcttcctctccttatccatatctcacaatgccgtcgccctcgtccggcgccgcgaccaaggagagaacggggacgactagctagtaaagtgatgtagcaaaggggtttttggttttcgcttcgccttcacggggtgggcatggagagtgcggcga

SEQ ID NO: 67055 - DNA, 1474 bp, Zea Mays
aatcaaagtgccttcatctgtggcggacccaggatttgaacctagggtagtcgatgacaaaaaaatgttgacatttaacaccgcggataattcggtaccacatatatttagtttccatcagttcgatacatggttagaaaataaacaaaatgtcacataatgatttaagtcatcaaattaagttacaagttgaataaatttgtttctttggatctaaacgttgagtactagtttgttttttgatcaaatttcatggtagtcggaggcctatctaaaacacccctaggtccgcccctatccttcatacgtggcagatatattcatgacaatttcctaatggttactcatagcgctcaatgtccctaaatggtgtatcaaagctattgacaaaataaggagttttttatggaaaggcataagggaggctagagggggtaactgtcttatcgcttgggataaaattgttagacccgtggagcttggaggtctgggcgttcctgacctcctcactataaattgggctctgcagttgagatggttgtggctctagaagacggagccctctaaaccttgggctggctcaaacctcaatatttccacaaaagctagagcccactttcagtctgcagtaactaccactattggcattggaagggagtttttcctttgatccaggttgagagaagggaggagtttttccattgagttgttttaagtgtgttctcaggcgggtttgagtgtcctgggcgtggtgttgtgattggtgttgtgttggtgtttgtgtgtgtgtttctggttcctgtttctgagtgggcttatgcccctcatctatttttcttatccttataatacaatgatacatagctctcctacgtatttgagaaaaaataaacagtcctcaccttcttgacaagggctgcacattccactcgagcaattgataattgccaagattttcaggcaactgaacatgatgctgagttaaccgatagatgataccctggcataaatcaatataataaattaataagtgaaaaaaactgagcccgaaatagttataatggttcaagaatatatgctaccatcgctgttgcgttggacatagcattatcagatcctgctggaaaaataccccatttaatcagagtagaatttccttgggctcgtaatattcataactcgaacctgtcaaattaaatagcagcgtcagccaaaccatattgaagcaatataaaaacaactatgtgatagtgcaggctgaagtaaatgaatgtagaatacaaacacagatgttcttcaatcttgactgagaagtgttagagtgtgtgttcctatatgtatccgactatccgtagacggggctggcaccgctgctaggctgccagcccattagggttagggttccttgggtctctatatatatgtaatgtaaccttctcctatgcaatacatcaagcacttcacaatcttacaa

SEQ ID NO: 67056 - DNA, 302 bp, Zea Mays
tcagaatatagtttcggttgtctctcccgctaaaaggccaatgcgaacagttaaaagaagacgccgtatccagctgcacaggaagaaaaaaaaagcataatcatttgcgctttgagtgcgtcacccacttgctttgcttcccagcagaaagcttccgttctttacctcaagagtttgtccaatgccaatggcacgtaggctttggctagaaacaagtggcaacggcacttgcttgaagtcatctgaaatccactcatgtggtggactggtggtgcagtttgagaaggctgagctaaggcttt

SEQ ID NO: 67057 - DNA, 2405 bp, Zea Mays
tttcagtatatattcctatacctatctcgacaaatacaaattataaatgtgagcagtagctcccctgcatgaggtttcaggactgtacctgatagaaatgtataacgctactatctagagcaggtgcgaacctgatagggagtgagctggacaggaaactgaagtttgttgaagccggtcactactgagtactgatgacaggtataccatctcgaagaataacaaggaccaacatgtttgccactactgaagctagcatatcctctggtccacttcaaagtaccgatggctcgccttttctgctgaattattgctgcccgcagacccctgcttctttttatagcaatagcaaagcagggggaggcacgacaacacaaacttcagaaaaccctctctaaacacagcaatggagagagtacctggagtggaagagcagaagtcagcagaccaagttaaccaagctggtctagctgatgagagtaccacagtaccgtggctgaagttgggtcttgatgcgccaaaaagtgaagaagtcaagcctcaagaggcgaaaccagtggccactccacataggactttctcctgcaactactgcatgagaaagtttttcagttcgcaggctctcggtgggcaccagaatgcgcacaagagggagaggtgtgcagcaagaaggacatacagacttcagatgatgatgggccttcctccatccgcttcctttctccaacctttgagagtgaactcgcactccacgattctgaagggtcatggtgaaagagctgcggttgccgtagcaagattcgacggaggccaaatgagtggatggatgccttttgcagttgaagaacctggagggttagtatggccagggagcttcacagcaagttcagatgagtccaagaagcaaatggagaaaaatcttgacctaaccctgcgcttgtaaattaaactgtaataagaagtaggtcatcatatgtaaccattttctgagtcgtgtcatctttttcataatttctgttcggtgaacaaatataggctatgcctcccccctccccccccccccccaacggctgcactttatctgctcttacgttacttgtagcaggttgaaagaaggacgaaaataaatgtttattagttactctgcatttttgtgataactactccagttcgaaaatcatacattttgtttcattggttaagattgtttcacaagacaaaccatattcaagtcatttgcttctttacaaataacaaagattcacatgttgttaagtcttactcatgcagttcggactggtgcagctgcaattcatagagacaaaacactatagaagtagtagaagccggtatggattaaagcaagcgaacagacttacaaatacatgattatacattgagaccttcaaagcaggtactacttacaaatacaagattgtaataaaatgatatgacctgaaattgtttcatcaaagtacaggtatcacacagacataagataagagactaagagccatggactctttacatataaatgaatccgtgcaaagtaatgtgaaagaatatgaaaaagagtggtaacaaattgacatatcaataaaagtacacatggaaagaacaagaacccattctttttcagttgaaaaggaaatgcgtagcaatgaatctttaatgaaagcataagaaggtgaggcaatggtaaatacttgacaagagagataatatgactatcacatcatgattaaacagaattgcaaataagagcacaacaacgcaatgacaagatctccactgcagctcttcaaaagattacatgtagagaaacttttgggtaagcctctaaggtgttgactgtgggatcagaaaccaatttcatggaaacacaagttacacagttctctgaaatgctatccccttagaaatccaccggtgctaaaggtactagttacaaacacataaagttagcagcagtgttatggaattcagtacatttgctaccaaaagaaaactcaaaacagttcataacaacaatcaaaattagaaggtattgttataaatgcaatacttagcaaatttggagctatcttgaacatgttaaaatatggcagactaaggatttcagttctcaagacactaaaccaaaggtattcaatatctcaatgcattagctgtcatcctgatgccatcctgtagaattcaattcagtattacttattgtggaatatatctatccatatgaggcacaagtgccaacatcttcaagttggaaaaatcttggatttttcgaacaaatctcattgtgcgctattatatcttctcccccctgtcactaaagcattgctacagcaagaccacattgagactagagaaataacattatactttcagaagaggatataatacac

SEQ ID NO: 67058 - DNA, 640 bp, Zea Mays
ccagactacaccgctcttctcccgattcccgaactccacgccacagatctctcgcttttctctcttcttttctctccgtactcttacccccgcaggtcgcagctatggcggaggacgcccccaacgcagccgccgagggcggccagcccgctcctcccgagggatctgccgatgccgccccgtcggctactgcgggcgccaaggccgcggaggcgctgctcccgtcgctcagcatctggccgccgtcgcagcgcacgcgcgacgccgtggtgcgccgcctcgtgcagacgctcgcggcgcccagcgtcctctcccagcgctacggcgccgtcccggagtccgaggccgagcgcgccgccgcggccgtcgaggccgaggctttcgcggccgcctccaagtccgccgccgccgagtccccggcctctatcgaggaggggattgaggtgctccaggcgtactccaaggaggtcagccgccgcctcctcgagcttgccaagacccggtccgccgctgcgacggtgcccgccgaggggagcgcgcaggaggccgaggactcgtcggcgacttctccagccgccgaggaggctgccgtaaaagaggagacatagacgacacccagcagctggtatttcatcccgag

SEQ ID NO: 67059 - DNA, 2689 bp, Zea Mays
ggggagtccattctcacgggcagcagttctgccagttcaacttgatccgcgcttctcgtgtcccctgccccttctgtcctcgccaccgcccagcttctcctcagtcctcaccctcgtgtgccttcggatccgcggttctcggagtcggagatagttgcaggtggtgtctggtcgcttgcggtagccggtaggcgggttcgctgcgggtggtcggcggcgcgatggtttccttcgagatgaacgacctcaagagtaagcgactcctcgcccacccgctctagttccctctcccttttgctggcggtttgtgaggccgtctggactctggcctctagtgctgcgtgtttgtgagatcatgagatgatcgggtcgcttttgcttgtacgtttcgcttgcccgtgagctgtttgggaggggagatttggtcgtgctcgcttcgctctctcgctcagtttgttgttcgtgcatgtgaaggaccggccgcgttggctgcctctcggttttgcgctgtttttatgcatgaatcgtttggtggagattgggcttattgggatggctgcctcgcatccaaatcatgaattcatgatgattatccgcgaccattggtagtaccgcagggcttaatgtgtaacctgtcttccttcagggtgaagaattctcatcaaaattcactgatcttctgcatttcattgtacctgcctgcgttcgtgtagtgtttagcatatgcattcgatacaacgtgctattagaaagattgcgtcactattaatgaggaaagctatgttctgaatattaacattgcgtccctggtctctgccgtctgcgcactgcctgcagtccggttagagttcagaaaatgagtttacctctacgaattctgcatatattcagaggaagaatttgaccataaaattatgtttgctcatctactaataatcagtagtctccggagtccggatgtagttcagcaatacaccgtatgttcagtacattggcttccttatttgactttgtgacaacttgcagttatctagtttaaaaaacgtttgaatgtttgataaactgttgctatatataatcatgtttgttggtcagccactgatgagagattgctagatgtagtagcaacactatgtttcaccactgtccattggtaaaggaggaaaactatgctctgagagaattacacggtatctccaggcacatttcatacagtctggttaaacaggtttgcctctacgaatccgacacacatttagattaataatttcagtcatgcatgttgatatctggtcatccattggtgagcaactgtcagatatagttcaccaacatggcacatggtttctgtttctgattacttgatcaggaggtatcacccattattagagaaccatggctactgacatagcacactatattgagtaaactggctttcttgtcgacgtttgtgatactctagctccttgtgctatgcttatgttgcaaacttgcaatgtacaacgcatccatttctcccaacttttactgaaccgtttatgtcctctttttgccaagtgtcaacagagattgggctgggcttgactggatttggagttctattcacattgctcgggatcattatgttgtttgacaagggattcctggcgatggggaatattctcttcgtttctggcgtcttactgaccattgggttgaagccaactgtgcagttcttcaccaagcctaagaatcacaagggttcaatatttttcgggtttggctttttcctggttctcattggatggcctgtctcaggaatgctggtggagtcgtatggcttcatcacgctcttcagcggcttctggccaacagctgctgtttacctgcaaaagagcccctccttcggttggatattccaccaccctcttgtgacttcgctgatcactcggttcagaggaagacgggtcccggtgtgagtggataggatcaccccgagggcatgcgaaatcgcctctactgtacagaagtccctgaaaagttggtaacggccctgcgtcgatatgagtcccggtgtcttcattggagccgcgttgtacttcaccatcaccgtcaatggcgggcaaagaatcctcaagtatgatctgctgcacggacatgggctatccgtcatcgaaacaccgcctgtgacttggactactcttgtcatgaagggagaggaggatggagggctagagcttgtcaccttatctgacaattgcatttacatgtggtcgtcgcaacaagatgtttctgatggaattggtggttgggtgaaacacatggtcatggagctccccgcgctactaccagaacatggatcatacacgcgaaaggtgattggcttatcgttttcattaccacgtatgaaggaatattcacactctgcctcaagtcaaggcaagtgaggaaggtatttgaaagagagacctagaacttcatggtgtaaacatgagatgacattttatgcaaggaatcatagagcagttttggccagttgcccttaaaacgaagaatcatagagcaaaagcttatcacaccattcccatcatcattacacagttattgagtatatatttgccacagggtcacttcctatcgggaagggcagtatctttacagatgaattgtcccaaacagcttacattcataaacccatgagagattcaag

SEQ ID NO: 67060 - DNA, 2972 bp, Zea Mays
atcccagcccaaacccctcaggactgatttgggcctcaggcagcccgcagccggtcagtccttccttttcctgttcgcgtccacgatcctgccgccgccgccgctcgcacctccacgatcctgcccagcgccgtgcgcctccacccccgccccgtccgccgcccgcctggtccatccccgtcccgtctggccggcgttgccaccccgggtcccgcgcgcgtggagccccggcctctaccagccgcacgtcgcaaccgacgaggacgcgcgcgcctgcagctcctgcccggtcccggctggccggccgccggcactccggctgcccctcagcggctcagcccctgagcttgtctgcttgaatgcttcagtgcgggtgcagcacagcggcagtgccccctgtcagtgccagccgccttagctactgcttactacgttgcattttttttcctgttttgtggactgtggtaattggtaaggcactacattacttcaattcacatgtcacgtatatgcgtatatgttaagaaaagaatattctctgcaatgatctttgtgaagaatcattagaggaatcttacggatgatagtttattgaatgattgtttggttacttttattgagcatgctattttctccaatgtaagtgaagatgacataattcacctcttcatggccataaagaagcgtaaatcaaaagccttagagtgttaggctagtatttttctagtatttaatatttatataagatcttatctactttacagaaaaaaacctccttaggccatgttcgtttgatcccaaaaccatagggattaaggtggattggaagggattgaaaaagattttgacttataggggatttgatccccctcaatccctatggatcagcacaaaacgaacagagccttatggagaccagaaacaggtgtacaaatatagatccataaggggataaaaaaacatactactcaaacttcctaagtctctatcacgggtgcagccaaatgaacaaggccttttgcaccagctacttcccattttcttctttcctcattcgcagctctgagacttaaggacaaacttggattgcagccataaaaaatgcatttatttcggtgattacataaagtccaagctcccaaaattatgagagagttaaggcctttttttgtgagtccaataactgctccccccaccacttcccaccatcccaggaaggagtttgcagtcggctgtggtgcaagtgaatgaagaccaaatttcctaagtaaaaggtaccagaattctcgtgagaaggaacattgtacaaggaggtggtctgtagtttcttcctcttgatcacataggagacacctatctggatgatttaggcctcgctttgccaatctatcagctgtccagcatctcttatgagcaaccaaccaaaggaagaagcgacattttggcaatgcccaagacttctagattcttttatagtgtccaaatgtcacagatcccaggaacagaccttcatatgctgatttggctgagtatacaccattcggggcaatactgaagatatgcctgtcttcaacctccggctgcagctcgatgccagaaatcaattcccaaagctgaatgtaatctgtcaaaacccccactgacaaggctcctctgatgtcagaaatccatttggcactaacaattgcttcctggactgtcctacaattaattagccgcttcggaattgcgccgatcagccttggaaacaaatctgcaattctttttccattcagccatttatccttccagaatttggtattgattctgttccccacttcagtggtcactacttcagaaaagaaggctctagccttttttgggacttgtatttgaagatcagaccaggggcgagagtgatcagtcttttataaccaaagccaccttagtcgaagtgcccaacataattctggaagactagaaataccaagcccaccaagcttttagggggcggcaaacttttccccaggcaacaagacaatgaccacctttagcttctttgcggcctctccatagaaaacctcttctaattttatcaatagcatccaaaccccactgtgggatatctactgtctcttctgcttaatatataatggggcgcagttctcctgcgcgtctcgagaaaaaagatcttatctactttgaatgtttatgttgtaagctatgtaatataatttgactaattgaatgcaatatgagacattttgagtatttcccgtccatatatcgaattgatgaaaattatatatgtgcgctattgaattatacatggtattgcatgtcatttttttaatcctcgactaccctagattcaagtcctgggtccgccactgatagtggccctagcctctaggcgtcaaaactgaccggcgacaccactggttgagggcatttgccgtgggaacaaaggactgtgtatcgagcaggcataccctgttaaaaatcctggttccactactagtcaggccatggctgcagcagaggcatgggtgcggcaggagaaagttaggaagtttgaggagttcgtggaccagcggttgaaacccgacctcaccaatgccatcgcacagcgtaacaaggtgtttgagcagcagaagaccttcttggatttgaagaggaacattgaaaatttggagaggaatggtgttaccagcatgcggtccatggtcaatcttggctcagaggtgtacatgcaagcagaagtaccagatacaaggcatatttttgtggatatcggtctaggttttcatgtggaatttacttggcaagaagctttacagttcatatctgtaagagaggcaaggttgactaggaggggtgagcgtcaaatatattgaaaataagagtatttacaaaatgttaacagagcaatctatattacaacctaatttatgtcaattggttacaccaatgcctaatggttggaatttttt

SEQ ID NO: 67061 - DNA, 3295 bp, Zea Mays
atcccagcccaaacccctcaggactgatttgggcctcaggcagcccgcagccggtcagtccttccttttcctgttcgcgtccacgatcctgccgccgccgccgctcgcacctccacgatcctgcccagcgccgtgcgcctccacccccgccccgtccgccgcccgcctggtccatccccgtcccgtctggccggcgttgccaccccgggtcccgcgcgcgtggagccccggcctctaccagccgcacgtcgcaaccgacgaggacgcgcgcgcctgcagctcctgcccggtcccggctggccggccgccggcactccggctgcccctcagcggctcagcccctgagcttgtctgcttgaatgcttcagtgcgggtgcagcacagcggcagtgccccctgtcagtgccagccgccttagctactgcttactacgttgcattttttttcctgttttgtggactgtggtaattggtaaggcactacattacttcaattcacatgtcacgtatatgcgtatatgttaagaaaagaatattctctgcaatgatctttgtgaagaatcattagaggaatcttacggatgatagtttattgaatgattgtttggttacttttattgagcatgctattttctccaatgtaagtgaagatgacataattcacctcttcatggccataaagaagcgtaaatcaaaagccttagagtgttaggctagtatttttctagtatttaatatttatataagatcttatctactttacagaaaaaaacctccttaggccatgttcgtttgatcccaaaaccatagggattaaggtggattggaagggattgaaaaagattttgacttataggggatttgatccccctcaatccctatggatcagcacaaaacgaacagagccttatggagaccagaaacaggtgtacaaatatagatccataaggggataaaaaaacatactactcaaacttcctaagtctctatcacgggtgcagccaaatgaacaaggccttttgcaccagctacttcccattttcttctttcctcattcgcagctctgagacttaaggacaaacttggattgcagccataaaaaatgcatttatttcggtgattacataaagtccaagctcccaaaattatgagagagttaaggcctttttttgtgagtccaataactgctccccccaccacttcccaccatcccaggaaggagtttgcagtcggctgtggtgcaagtgaatgaagaccaaatttcctaagtaaaaggtaccagaattctcgtgagaaggaacattgtacaaggaggtggtctgtagtttcttcctcttgatcacataggagacacctatctggatgatttaggcctcgctttgccaatctatcagctgtccagcatctcttatgagcaaccaaccaaaggaagaagcgacattttggcaatgcccaagacttctagattcttttatagtgtccaaatgtcacagatcccaggaacagaccttcatatgctgatttggctgagtatacaccattcggggcaatactgaagatatgcctgtcttcaacctccggctgcagctcgatgccagaaatcaattcccaaagctgaatgtaatctgtcaaaacccccactgacaaggctcctctgatgtcagaaatccatttggcactaacaattgcttcctggactgtcctacaattaattagccgcttcggaattgcgccgatcagccttggaaacaaatctgcaattctttttccattcagccatttatccttccagaatttggtattgattctgttccccacttcagtggtcactacttcagaaaagaaggctctagccttttttgggacttgtatttgaagatcagaccaggggcgagagtgatcagtcttttataaccaaagccaccttagtcgaagtgcccaacataattctggaagactagaaataccaagcccaccaagcttttagggggcggcaaacttttccccaggcaacaagacaatgaccacctttagcttctttgcggcctctccatagaaaacctcttctaattttatcaatagcatccaaaccccactgtgggatatctactgtctcttctgcttaatatataatggggcgcagttctcctgcgcgtctcgagaaaaaagatcttatctactttgaatgtttatgttgtaagctatgtaatataatttgactaattgaatgcaatatgagacattttgagtatttcccgtccatatatcgaattgatgaaaattatatatgtgcgctattgaattatacatggtattgcatgtcatttttttaatcctcgactaccctagattcaagtcctgggtccgccactgatagtggccctagcctctaggcgtcaaaactgaccggcgacaccactggttgagggcatttgccgtgggaacaaaggactgtgtatcgagcaggcataccctgttaaaaatcctggttccactactagtcaggccatggctgcagcagaggcatgggtgcggcaggagaaagttaggaagtttgaggagttcgtggaccagcggttgaaacccgacctcaccaatgccatcgcacagcgtaacaagcttggatttgaagaggaacattgaaaatttggagaggaatggtgttaccagcatgcggtccatggtcaatcttggctcagaggtgtacatgcaagcagaagtaccagatacaaggcatatttttgtggatatcggtctaggttttcatgtggaatttacttggcaagaagctttacagttcatatctgtaagagaggcaaggttgactaggcaaatagacgaatacacgcatctcatcgcaagcataaaagcacagatcaagttggtatgtgaaggtatccgcgaagtgctgcagctgcctgcggagaaagagttatcgcccaggaatacgtggtagaatttggttctcaatggagcagggggtggtgttctttaaacgtggttccgtttcaactcttgcagttgaaattattgtggtgccgacagtattttagagcagagaatgaggttccccttcgtacaacaatctcttcgacgacaccacgtacaactcatactgatttctatgtattcattacgttggcatatggccttgccgatttgcagtttatttgagcctcttttccaagttaggttgagctcacaccaccgggccttccctgaccccgacgcgcgcagttgcgcacacttacccattctcggcccacgacaagttcttataacgattaatgatccag

SEQ ID NO: 67062 - DNA, 3318 bp, Zea Mays
atcccagcccaaacccctcaggactgatttgggcctcaggcagcccgcagccggtcagtccttccttttcctgttcgcgtccacgatcctgccgccgccgccgctcgcacctccacgatcctgcccagcgccgtgcgcctccacccccgccccgtccgccgcccgcctggtccatccccgtcccgtctggccggcgttgccaccccgggtcccgcgcgcgtggagccccggcctctaccagccgcacgtcgcaaccgacgaggacgcgcgcgcctgcagctcctgcccggtcccggctggccggccgccggcactccggctgcccctcagcggctcagcccctgagcttgtctgcttgaatgcttcagtgcgggtgcagcacagcggcagtgccccctgtcagtgccagccgccttagctactgcttactacgttgcattttttttcctgttttgtggactgtggtaattggtaaggcactacattacttcaattcacatgtcacgtatatgcgtatatgttaagaaaagaatattctctgcaatgatctttgtgaagaatcattagaggaatcttacggatgatagtttattgaatgattgtttggttacttttattgagcatgctattttctccaatgtaagtgaagatgacataattcacctcttcatggccataaagaagcgtaaatcaaaagccttagagtgttaggctagtatttttctagtatttaatatttatataagatcttatctactttacagaaaaaaacctccttaggccatgttcgtttgatcccaaaaccatagggattaaggtggattggaagggattgaaaaagattttgacttataggggatttgatccccctcaatccctatggatcagcacaaaacgaacagagccttatggagaccagaaacaggtgtacaaatatagatccataaggggataaaaaaacatactactcaaacttcctaagtctctatcacgggtgcagccaaatgaacaaggccttttgcaccagctacttcccattttcttctttcctcattcgcagctctgagacttaaggacaaacttggattgcagccataaaaaatgcatttatttcggtgattacataaagtccaagctcccaaaattatgagagagttaaggcctttttttgtgagtccaataactgctccccccaccacttcccaccatcccaggaaggagtttgcagtcggctgtggtgcaagtgaatgaagaccaaatttcctaagtaaaaggtaccagaattctcgtgagaaggaacattgtacaaggaggtggtctgtagtttcttcctcttgatcacataggagacacctatctggatgatttaggcctcgctttgccaatctatcagctgtccagcatctcttatgagcaaccaaccaaaggaagaagcgacattttggcaatgcccaagacttctagattcttttatagtgtccaaatgtcacagatcccaggaacagaccttcatatgctgatttggctgagtatacaccattcggggcaatactgaagatatgcctgtcttcaacctccggctgcagctcgatgccagaaatcaattcccaaagctgaatgtaatctgtcaaaacccccactgacaaggctcctctgatgtcagaaatccatttggcactaacaattgcttcctggactgtcctacaattaattagccgcttcggaattgcgccgatcagccttggaaacaaatctgcaattctttttccattcagccatttatccttccagaatttggtattgattctgttccccacttcagtggtcactacttcagaaaagaaggctctagccttttttgggacttgtatttgaagatcagaccaggggcgagagtgatcagtcttttataaccaaagccaccttagtcgaagtgcccaacataattctggaagactagaaataccaagcccaccaagcttttagggggcggcaaacttttccccaggcaacaagacaatgaccacctttagcttctttgcggcctctccatagaaaacctcttctaattttatcaatagcatccaaaccccactgtgggatatctactgtctcttctgcttaatatataatggggcgcagttctcctgcgcgtctcgagaaaaaagatcttatctactttgaatgtttatgttgtaagctatgtaatataatttgactaattgaatgcaatatgagacattttgagtatttcccgtccatatatcgaattgatgaaaattatatatgtgcgctattgaattatacatggtattgcatgtcatttttttaatcctcgactaccctagattcaagtcctgggtccgccactgatagtggccctagcctctaggcgtcaaaactgaccggcgacaccactggttgagggcatttgccgtgggaacaaaggactgtgtatcgagcaggcataccctgttaaaaatcctggttccactactagtcaggccatggctgcagcagaggcatgggtgcggcaggagaaagttaggaagtttgaggagttcgtggaccagcggttgaaacccgacctcaccaatgccatcgcacagcgtaacaaggtgtttgagcagcagaagaccttcttggatttgaagaggaacattgaaaatttggagaggaatggtgttaccagcatgcggtccatggtcaatcttggctcagaggtgtacatgcaagcagaagtaccagatacaaggcatatttttgtggatatcggtctaggttttcatgtggaatttacttggcaagaagctttacagttcatatctgtaagagaggcaaggttgactaggcaaatagacgaatacacgcatctcatcgcaagcataaaagcacagatcaagttggtatgtgaaggtatccgcgaagtgctgcagctgcctgcggagaaagagttatcgcccaggaatacgtggtagaatttggttctcaatggagcagggggtggtgttctttaaacgtggttccgtttcaactcttgcagttgaaattattgtggtgccgacagtattttagagcagagaatgaggttccccttcgtacaacaatctcttcgacgacaccacgtacaactcatactgatttctatgtattcattacgttggcatatggccttgccgatttgcagtttatttgagcctcttttccaagttaggttgagctcacaccaccgggccttccctgaccccgacgcgcgcagttgcgcacacttacccattctcggcccacgacaagttcttataacgattaatgatccag

SEQ ID NO: 67063 - DNA, 1023 bp, Zea Mays
atcccagcccaaacccctcaggactgatttgggcctcaggcagcccgcagccgattcaagtcctgggtccgccactgatagtggccctagcctctaggcgtcaaaactgaccggcgacaccactggttgagggcatttgccgtgggaacaaaggactgtgtatcgagcaggcataccctgttaaaaatcctggttccactactagtcaggccatggctgcagcagaggcatgggtgcggcaggagaaagttaggaagtttgaggagttcgtggaccagcggttgaaacccgacctcaccaatgccatcgcacagcgtaacaaggtgtttgagcagcagaagaccttcttggatttgaagaggaacattgaaaatttggagaggaatggtgttaccagcatgcggtccatggtcaatcttggctcagaggtgtacatgcaagcagaagtaccagatacaaggcatatttttgtggatatcggtctaggttttcatgtggaatttacttggcaagaagctttacagttcatatctgtaagagaggcaaggttgactaggcaaatagacgaatacacgcatctcatcgcaagcataaaagcacagatcaagttggtatgtgaaggtatccgcgaagtgctgcagctgcctgcggagaaagagttatcgcccaggaatacgtggtagaatttggttctcaatggagcagggggtggtgttctttaaacgtggttccgtttcaactcttgcagttgaaattattgtggtgccgacagtattttagagcagagaatgaggttccccttcgtacaacaatctcttcgacgacaccacgtacaactcatactgatttctatgtattcattacgttggcatatggccttgccgatttgcagtttatttgagcctcttttccaagttaggttgagctcacaccaccgggccttccctgaccccgacgcgcgcagttgcgcacacttacccattctcggcccacgacaagttcttataacgattaatgatccag

SEQ ID NO: 67064 - DNA, 922 bp, Zea Mays
atcccagcccaaacccctcaggactgatttgggcctcaggcagcccgcagccgactgtgtatcgagcaggcataccctgttaaaaatcctggttccactactagtcaggccatggctgcagcagaggcatgggtgcggcaggagaaagttaggaagtttgaggagttcgtggaccagcggttgaaacccgacctcaccaatgccatcgcacagcgtaacaaggtgtttgagcagcagaagaccttcttggatttgaagaggaacattgaaaatttggagaggaatggtgttaccagcatgcggtccatggtcaatcttggctcagaggtgtacatgcaagcagaagtaccagatacaaggcatatttttgtggatatcggtctaggttttcatgtggaatttacttggcaagaagctttacagttcatatctgtaagagaggcaaggttgactaggcaaatagacgaatacacgcatctcatcgcaagcataaaagcacagatcaagttggtatgtgaaggtatccgcgaagtgctgcagctgcctgcggagaaagagttatcgcccaggaatacgtggtagaatttggttctcaatggagcagggggtggtgttctttaaacgtggttccgtttcaactcttgcagttgaaattattgtggtgccgacagtattttagagcagagaatgaggttccccttcgtacaacaatctcttcgacgacaccacgtacaactcatactgatttctatgtattcattacgttggcatatggccttgccgatttgcagtttatttgagcctcttttccaagttaggttgagctcacaccaccgggccttccctgaccccgacgcgcgcagttgcgcacacttacccattctcggcccacgacaagttcttataacgattaatgatccag

SEQ ID NO: 67065 - DNA, 1647 bp, Zea Mays
atcccagcccaaacccctcaggactgatttgggcctcaggcagcccgcagccggtcagtccttccttttcctgttcgcgtccacgatcctgccgccgccgccgctcgcacctccacgatcctgcccagcgccgtgcgcctccacccccgccccgtccgccgcccgcctggtccatccccgtcccgtctggccggcgttgccaccccgggtcccgcgcgcgtggagccccggcctctaccagccgcacgtcgcaaccgacgaggacgcgcgcgcctgcagctcctgcccggtcccggctggccggccgccggcactccggctgcccctcagcggctcagcccctgagcttgtctgcttgaatgcttcagtgcgggtgcagcacagcggcagtgccccctattcaagtcctgggtccgccactgatagtggccctagcctctaggcgtcaaaactgaccggcgacaccactggttgagggcatttgccgtgggaacaaagggttagtacttttcagttgtttcctctgcttgtatggtccttggtaagctgcagtagcttatttgtatttggcaacgtaaataccattgactgatagaccagttgggtttgtggctatcatcaaatgccctagtgaggtttgtgtatcttctaggaaatgcatcatgcaccatggaacgtcaaattgccctgcattatttattttattcttttgctttagcagtaggatgtaatataaatacaatcatgatactgaacaggattaatattttgttgccagactgtgtatcgagcaggcataccctgttaaaaatcctggttccactactagtcaggccatggctgcagcagaggcatgggtgcggcaggagaaagttaggaagtttgaggagttcgtggaccagcggttgaaacccgacctcaccaatgccatcgcacagcgtaacaaggtgtttgagcagcagaagaccttcttggatttgaagaggaacattgaaaatttggagaggaatggtgttaccagcatgcggtccatggtcaatcttggctcagaggtgtacatgcaagcagaagtaccagatacaaggcatatttttgtggatatcggtctaggttttcatgtggaatttacttggcaagaagctttacagttcatatctgtaagagaggcaaggttgactaggcaaatagacgaatacacgcatctcatcgcaagcataaaagcacagatcaagttggtatgtgaaggtatccgcgaagtgctgcagctgcctgcggagaaagagttatcgcccaggaatacgtggtagaatttggttctcaatggagcagggggtggtgttctttaaacgtggttccgtttcaactcttgcagttgaaattattgtggtgccgacagtattttagagcagagaatgaggttccccttcgtacaacaatctcttcgacgacaccacgtacaactcatactgatttctatgtattcattacgttggcatatggccttgccgatttgcagtttatttgagcctcttttccaagttaggttgagctcacaccaccgggccttccctgaccccgacgcgcgcagttgcgcacacttacccattctcggcccacgacaagttcttataacgattaatgatccag

SEQ ID NO: 67066 - DNA, 488 bp, Zea Mays
aaaaagcttgatctgacagaggcaaatagacgaatacacgcatctcatcgcaagcataaaagcacagatcaagttggtatgtgaaggtatccgcgaagtgctgcagctgcctgcggagaaagagttatcgcccaggaatacgtggtagaatttggttctcaatggagcagggggtggtgttctttaaacgtggttccgtttcaactcttgcagttgaaattattgtggtgccgacagtattttagagcagagaatgaggttccccttcgtacaacaatctcttcgacgacaccacgtacaactcatactgatttctatgtattcattacgttggcatatggccttgccgatttgcagtttatttgagcctcttttccaagttaggttgagctcacaccaccgggccttccctgaccccgacgcgcgcagttgcgcacacttacccattctcggcccacgacaagttcttataacgattaatgatccag

SEQ ID NO: 67067 - DNA, 1482 bp, Zea Mays
ggaggtggcacacctggtgcacgtccacttggtggtggaggtggaggaggaccaccaagatgccctctaggtgcaggaggtggtggaggtcctcttccaccacctccaggtgggggtgggggaggtggagctcctggaggaggcggtggtggtggagctcctgtccgtgaacctggaggaggtggtggtggtggagctcctggtcgtgcacctggagggggcggaggaggtggaggtccagagcgagcacctggaggaggcggaggtggtggtggacctgcacgtgaagcaagaggtgggggtgggggtgggggtgctcctcgaccagggggaggaggtggtggaggtggtgctcctcgtccagagggaagagggggaggagggggtgctcctcggccaggtggagggggcgggggtgggggtgctcctcggccagaaagtgtgcatgaaagaggaggcaatgggacattagaatacaatgatggtggtggcggggggtgtggcggatgagcagaacgtgacattgatggtggtggtggtggtggaggaggaggaggagcacttgatcgtgttatggtggatgggggtggaggtggtggcggtggagcgattgcattgttatttaaccttggaggtggaggtggaggtggaggtggaggtgtggtaatgccaccacctgttatccttggaggaggaggaggaggaggaggaggaggaggaggtggtggaggtggagtatttccaccaacacccgacctcgggggtggaggtgggggtgggggaggagggggaggggcaaatgcctgtttttgtgctcccgacgacctaggtggagatgcaccttgaggtaagtttggcaaacatgttgaagctagacccctgtgcataggcgtagaacttgaagaatagttagttggaggtggaggcaaagaaggtagtgaaacctggtttcttgatgcaatttgtgcacctggtaacaaggattgttgtggaggcgatgaagcagacagtgcagatgttacttctcgtgtaaagttgcagccatatggttgtttcaatgataataaaggtgcatcatttactgcactgatcttaacatctgtaggcatggatcgaatagccagtgcagctggtgaactgtcgtatctagatggagggtgagatggcctatgcacagaggtagcatcagattccttctttggtgagatccatctacgtattgtttttggtttggcaagctttggttgctcttccatctttgcattgcctactgccatcttcttcaatactgatgacacagctttatcagggatttgccctcggtcatcactttcaagccttggactcctagccctggctactgttcgactttgaggaagaactataccaaaatcctgcttgtcaccaagcccctcttgcttggtttttatctcagttcctacatcagtggctggtaagacaacaatcctgtcatggacagtg

SEQ ID NO: 67068 - DNA, 2204 bp, Zea Mays
caccacttttacgaaccactccgcgagtagccgagcaccccagcgctcaccgacctttctccaaaccgtcgtcgcgcccgccccgtgccgcccgccatggcgccgccggagccggagatgttcgacgtcgtcatattcggggcctcgggcttcaccggcaagtacgtcatccgcgaggccctcaagttcctcaacgcctcctcatccgcctccccgctccgctccctcgcggtcgccggccgcagcagggaccgcatcgcagccgcgctccgctgggccgcggccccggccccgccgcccgaggacgtgcccatcctcgtcgccgacacctccgacccggcctccctcgcggcgctcgcctctcgcgcccgcgtcgtgctctcctgcgcggggcccttccgcctccacggccacgccgtggcggcggcctgcgcggccgcgggcgccgactgcctcgacatctccggggagcccgagttcatggagcgcgtcgagtccgagctccacgagcccgccgccaggagcggctccctcatcatctccgcctgcgggttcgactctgtccccgccgagctcggcttcctgttccactccaggcagtgggagcccccgtccgcgccggccaccgtagaggcgtacgtgagcctgcagtcgaccaagaggatcgtcgggaacatcggcacctacgagtcagctgtgctcggagtggccaacgctggccagctgcaggcgctgcgccggtccagacccaggcgaccccggcccaatattccaggccctccacctcccaaagggtcgctgattgaaggtcacaatcctctgggaatgtgggctatgaaactgccttccgctgacacagtggtcgtgaagagaactctatcaaccttgactgagcatcctgagggccttcctggcgcagaagaaaccccagagtacgctgatcataggaagaaattatggtcttctgtcaaacctgcccattttggcgtgaagatcgcctccagatccctgctgatccttcagagccggcccgaccgaggaagaggtgaagagcgcctcgttcaagatgtggtttgtcggtcacggctacagcaacgtggatagctcgttggagctcggaagaagcaagccggacaaggaggtgatcaccaaggtttcgggacccgaggtcggttacgtcacaactccgatcgtgctggtgcagtgcgccctcgtcctgctgagccagcgtgccaacctgcccaagggcggggtatacacgcctggcaccgtctttggccctactgatctccagcagcgcctccaggataacgggctgtctttcgaggttaacaccactagagccatgcattgaagttcactggctccactcagtgcatcctgtggaaaaacttggcagaaggatgcaacttgagcaataagaagcgccaattagcaacttaaagggcttgtttggaagtaaggataccgccggagaggagctgaaaccccttgctattcaattttgaatataaggggattttagctccttaaatcccgtcgggtataattgcttccaaaagccataactgtgtgtgtcgtaccaacagtcctatggagtcttactagttactaccgctgtaccttctgaattacctagttccttattcttatgctgtgtttatatagaggtgacaataggaaaacgttgtgatcgtgtgctgcagagaggatcatatgggttgcaatgcgcaatgccagactcggcgtgctgtggaaggaaagatgctattcgtgccacacaaacgtaatcctgcagttcaaataccgaccagggcccacgacatggatccgaacaaatcgcaagaacgtccacgacatggattcgaacaagaaccaagaccaactatctcccaagaaccaagaccaactatctccgttctctctctccaccaaagcaaatgccaaaggaaccaatgtgttgcttgtgtcacatgaaattacaactaacaatgtgcctttatacttagaaaacagaaaagtatcattaatagagagcacgagacgacaatgtctgaaggtctctacgcactgcaagaaacaccagaaagcacgaaagaacatctctctgtcattcctccatttgttaggtttagggatgtactcgtaatgcatgcatgagttttttgcttttaatgcattgaacaatgctggcaacttctcgt

SEQ ID NO: 67069 - DNA, 789 bp, Zea Mays
ctcacagcccatctgtcttcaacacgtgtgtcgttctgctcggactcgaaatacagttttcgacagtcgtcgcatacagtcgtcacagtccctcgcgtagacgcgcacccacctccatccctcccatcctagacctgctcccccgccgccatgacgatccgccgtcgcacacccgccgaccctaccatcgcagacctcctccccattgccagatcgatccttcatcgcccctcgatgacaacggcttctcagaactaggcatcctgttcactctatatccatggaggcggcgatgcagacgattctcgtcgggatggcgcacatggagttccgcttgactgcggcgctggcgggcagtggcggcgaacaggcttccacctcctcttccttcgcctcgctattcggctcgttcgagtcagagtccgctcctcctcccgtcctctacgactgctacgacgagccgaacgacgacgagattgccgaggtgctcgcgctactagagtacaacgaggggacttcgtcggccacagtcctcgtcgactgtaacaccaccagcaagtcgcctaccaagtgttcgacaatggagttctccgacgccgacagcagcgccaggactcgcgctgtcacctacgatgagcctagcttccaccgcttcattccgccgcccttccgtgccggggaaaccaacgaggaagaggactcctctgccgaggaggccatggcggcgatgggagcggccgcctcaccatcccctttccttctcaccgtggggaatctgctactgcccta

SEQ ID NO: 67070 - DNA, 4084 bp, Zea Mays
caggactctcatagtggatcctgctgtgcgcttcgcctccaacagcgtcagcaacagtacgcttcagcgccttctgctcatgcccaaaccccgaagcggaagccccccgaccccaaacctcgcaagcgaccccagtaatggcgaccaaggcgctatccgtctcctcgctcacctccacggcctttgcctccttttccttgccgcggccccgcaggccttcaccttcgcctcccctcctccgccttctcggtcctcgcccccgcgcctccactctctccgccgccgctcccgacgacgaggacggcgtcgacaccgtggagcagctcctccacccacgcccgcctgagacctcagcccccgccggatcccgcggccggatcgaccgcctcatgaagctccagcgccgcgccgacggcgacgccgtgcccggggggcggaggaggtggttcccttacctggacgcgttccggcccgcggccgggggcgcggagctgtccagcggggaggtcatagatgtgctggagccgcacatcctagaggcgcggcgggaccggattcgacaagccgttggcaaccggagctacgccgtttgcctcgtggtggaaggcctctccgacttcggcaacgtctcggccgcgttccgctccgcggacgcgctcggcgtgcagtccgtgcacgtcatttcctgtgatagcagcaaaaggtatagagacaacaggcatgtgagcatgggtgctgagaaatggcttgacattgagatatggaactcacctgcagaatgtttcagtgcattaaaaaaacgcggttatcgcattgcgaccacttatttgggaactgattcggtttgtgtgtatgatatggattggtctcaaccaacagctattgttgtgggcaatgagcttaggggtataagtgatgatgctctagaattgtcagatttgcactgcagcattccaatgaaaggcatggtggattcgtttaatgtatctgttgcagctggaatcctcatgcaccatgctgtttgtgatagagtttcccgcctgggccatcacggtgatctcttgcctgaagaaaataggatattgcttgctgagttctatctgcgacacagagaaagcacggctactatagttcatgaatatgccaaaatgaaggcaggaaaagttatgaccagactttgaaaacatcctgagaagctgagtgacgtgtctgccaatcaagtcttggattatctggtgcatttttctaacagaaaacgaggctattttttcctggagtttaccgctgatccctaccagattgctgggaagacgaggatccaagcccaatcattgagcagagctgttaacgattacgcatatggttttcagtgacgtggacttttgctcccaaaacagtcgcccgttaactatttttgtatgtttttgttaggatgaaagcttaatatgtttccacttgtttttcacaaacgttggcggtggttgggtttgggcggcaacgctccatgttctacagacggttacgaccggaagcttggtgtaaccgtaccagtataacctgtccttggagggttgagagcttgagatgtaaacgaactgcacttgtctacggcaggatgatgcgtctgtaacgcaaagctgtgcaactggtgaatctcgccaccgaattctgctagggaaagctacggacgtgttgaaaactggaacataaaagtcgtgccattgattctggcctcaacgatgctcgattgcatagccactcctttttctagagaatatgcaacgcgatcactgatcaggattgaaggggggatgagaaggtggacatcgttgctctagtgatttgatcaccagagatggtgttggtggtgaagcagcatcgctgcacgcactctgtgagctgtgtttgcatcaagggccatctcagtgaggatgctctgttcctcgtcttccgccacatgaactggaacccaaggctgattgctatcctgtcatgtgtgtgcaagtggtttgacgaggttgccaagcaggtgctgtggaaggagttctgtcatgcaagggcttcaaagatgatgctggatttgcattcaggtggtagccacattgttgatgggaactggaaagcgctggggaagctgctcatctattgcaatggctgcacaaaaggggggctcttcaataacatccatgttccaggccattttgtgttcaggacacgcttttctaggactgcgggcaggagtttcctgcctctgccatgcaagtcagacgtgttgtatgtgtcagatccatgtgagcatcttgatcaaggggaagaaggcgacttaggtttctttcgaggcatctttaagtcattcgccacttcaagagtgaagaagatgttgattgagaagcgggctaggtttcatccaagggagttgtgctcttattgtaagtcgaagctatggaacatgttccaggaaaatatgattccaaggagtgcttctgctagactgggtgcctatgatgattccgtcgagtattttgtatgcttgaatgggcatgttattggacttggtaccctgctaccactctcagactcggaggaggcagcagatgagtaatcatcaagaatgagtcaggttggtctatctctattccatggcaaatttcttcttgaaacttttcagtaaacatcaagtttcatgcgcagacatgtctggatgtacaacatagactggttcctcttcaatattagtttgtgtttgcatacacttaatgcttaatcctatttatttaatgcatagcttgatcagcatttcatattgtataccaacattttctccttggaacagcgaaggaactttgcataagcttgttgggatatcatatcacataatgcttatttgagattttttaggaatttttgacatttaaaaaggaaacattagtagcaaaactattctcaagggtttgtatgcttattttgtgatggcatcagagttagtgaatcgattcttagaatcccaaatgtttaacgtggtctctgtctatttctcacacccttatgtttgcctctacttttgaagttatatatactagtagatatttgtatggtacagcaagtcacaattggtgatcattatcttcattttagaagtggcagtacacaagtttcgggtggcagttagaatgctttgacccaaacaaaattcaccatttaaattctcacttcttgcactcgacaaatagtagagcactagagaagtaaatctatgttgatggtataatgcagttgttttgaattctgtttaatcaaatatctacatgacaacaattcgttaatataaatctagacgtactggttatcttcagaagagccatattgtccggtcagtttgttctttttattttatttgtgaaaaatatgaggaaaatgtgcattgctgacatcctgttttatttgtgattgctactttacgttgctttatctactaggccataacaaattaacaacatccggtgacaagtgcgccagtttaaggaaggtagcagagtctctgtctcaaataaaagggtgccagggctatgatctagtttggaagattgaagcccaggacttgcgaaaatggtactgaatcttggttgtgactagcagagagtgggatgacattggttcagcaaactgttgcacgacaagaatctgtggtgggctctgcgtcggactacccctgtgttcttgcacctgataacaaaaaaagaacccaatttcgaaggacgagaaagaaccaaatgcacacggttcagctcatccttttgaattgatcatccatcagagctagcataacataactatatacattgataagtaggttaaaatagatcaaacaatctcggagataaataatgtactcttgtagtcttgtgagtagctaacacgatatttggtataagtttcatatccttacttttcacatatgagcattcatatctgctagttataagcagcatgttgtaaaagtgttgtggaaatgattgagtaaatttgacggtggttgatagttagacaccattttctatatattgtgcacaaagagaagtatgcc

SEQ ID NO: 67071 - DNA, 3130 bp, Zea Mays
caggactctcatagtggatcctgctgtgcgcttcgcctccaacagcgtcagcaacagtacgcttcagcgccttctgctcatgcccaaaccccgaagcggaagccccccgaccccaaacctcgcaagcgaccccagtaatggcgaccaaggcgctatccgtctcctcgctcacctccacggcctttgcctccttttccttgccgcggccccgcaggccttcaccttcgcctcccctcctccgccttctcggtcctcgcccccgcgcctccactctctccgccgccgctcccgacgacgaggacggcgtcgacaccgtggagcagctcctccacccacgcccgcctgagacctcagcccccgccggatcccgcggccggatcgaccgcctcatgaagctccagcgccgcgccgacggcgacgccgtgcccggggggcggaggaggtggttcccttacctggacgcgttccggcccgcggccgggggcgcggagctgtccagcggggaggtcatagatgtgctggagccgcacatcctagaggcgcggcgggaccggattcgacaagccgttggcaaccggagctacgccgtttgcctcgtggtggaaggcctctccgacttcggcaacgtctcggccgcgttccgctccgcggacgcgctcggcgtgcagtccgtgcacgtcatttcctgtgatagcagcaaaaggtatagagacaacaggcatgtgagcatgggtgctgagaaatggcttgacattgagatatggaactcacctgcagaatgtttcagtgcattaaaaaaacgcggttatcgcattgcgaccacttatttgggaactgattcggtttgtgtgtatgatatggattggtctcaaccaacagctattgttgtgggcaatgagcttaggggtataagtgatgatgctctagaattgtcagatttgcactgcagcattccaatgaaaggcatggtggattcgtttaatgtatctgttgcagctggaatcctcatgcaccatgctgtttgtgatagagtttcccgcctgggccatcacggtgatctcttgcctgaagaaaataggatattgcttgctgagttctatctgcgacacagagaaagcacggctactatagttcatgaatatgccaaaatgaaggcaggaaaagttatgaccagactttgaaaacatcctgagaagctgagtgacgtgtctgccaatcaagtcttggattatctggtgcatttttctaacagaaaacgaggctattttttcctggagtttaccgctgatccctaccagattgctgggaagacgaggatccaagcccaatcattgagcagagctgttaacgattacgcatatggttttcagtgacgtggacttttgctcccaaaacagtcgcccgttaactatttttgtatgtttttgttaggatgaaagcttaatatgtttccacttgtttttcacaaacgttggcggtggttgggtttgggcggcaacgctccatgttctacagacggttacgaccggaagcttggtgtaaccgtaccagtataacctgtccttggagggttgagagcttgagatgtaaacgaactgcacttgtctacggcaggatgatgcgtctgtaacgcaaagctgtgcaactggtgaatctcgccaccgaattctgctagggaaagctacggacgtgttgaaaactggaacataaaagtcgtgccattgattctggcctcaacgatgctcgattgcatagccactcctttttctagagaatatgcaacgcgatcactgatcaggattgaaggggggatgagaaggtggacatcgttgctctagtgatttgatcaccagagatggtgttggtggtgaagcagcatcgctgcacgcactctgtgagctgtgtttgcatcaagggccatctcagtgaggatgctctgttcctcgtcttccgccacatgaactggaacccaaggctgattgctatcctgtcatgtgtgtgcaagtggtttgacgaggttgccaagcaggtgctgtggaaggagttctgtcatgcaagggcttcaaagatgatgctggatttgcattcaggtggtagccacattgttgatgggaactggaaagcgctggggaagctgctcatctattgcaatggctgcacaaaaggggggctcttcaataacatccatgttccaggccattttgtgttcaggacacgcttttctaggactgcgggcaggagtttcctgcctctgccatgcaagtcagacgtgttgtatgtgtcagatccatgtgagcatcttgatcaaggggaagaaggcgacttaggtttctttcgaggcatctttaagtcattcgccacttcaagagtgaagaagatgttgattgagaagcgggctaggtttcatccaagggagttgtgctcttattgtaagtcgaagctatggaacatgttccaggaaaatatgattccaaggagtgcttctgctagactgggtgcctatgatgattccgtcgagtattttgtatgcttgaatgggcatgttattggacttggtaccctgctaccactctcagactcggaggaggcagcagatgagtaatcatcaagaatgagtcaggtttggaagattgaagcccaggacttgcgaaaatggtactgaatcttggttgtgactagcagagagtgggatgacattggttcagcaaactgttgcacgacaagaatctgtggtgggctctgcgtcggactacccctgtgttcttgcacctgataacaaaaaaagaacccaatttcgaaggacgagaaagaaccaaatgcacacggttcagctcatccttttgaattgatcatccatcagagctagcataacataactatatacattgataagtaggttaaaatagatcaaacaatctcggagataaataatgtactcttgtagtcttgtgagtagctaacacgatatttggtataagtttcatatccttacttttcacatatgagcattcatatctgctagttataagcagcatgttgtaaaagtgttgtggaaatgattgagtaaatttgacggtggttgatagttagacaccattttctatatattgtgcacaaagagaagtatgcc

SEQ ID NO: 67072 - DNA, 2061 bp, Zea Mays
ctgctgtgcgcttcgcctccaacagcgtcagcaacagtacgcttcagcgccttctgctcatgcccaaaccccgaagcggaagccccccgaccccaaacctcgcaagcgaccccagtaatggcgaccaaggcgctatccgtctcctcgctcacctccacggcctttgcctccttttccttgccgcggccccgcaggccttcaccttcgcctcccctcctccgccttctcggtcctcgcccccgcgcctccactctctccgccgccgctcccgacgacgaggacggcgtcgacaccgtggagcagctcctccacccacgcccgcctgagacctcagcccccgccggatcccgcggccggatcgaccgcctcatgaagctccagcgccgcgccgacggcgacgccgtgcccggggggcggaggaggtggttcccttacctggacgcgttccggcccgcggccgggggcgcggagctgtccagcggggaggtcatagatgtgctggagccgcacatcctagaggcgcggcgggaccggattcgacaagccgttggcaaccggagctacgccgtttgcctcgtggtggaaggcctctccgacttcggcaacgtctcggccgcgttccgctccgcggacgcgctcggcgtgcagtccgtgcacgtcatttcctgtgatagcagcaaaaggtgcagaggtatagagacaacaggcatgtgagcatgggtgctgagaaatggcttgacattgagatatggaactcacctgcagaatgtttcagtgcattaaaaaaacgcggttatcgcattgcgaccacttatttgggaactgattcggtatttttttcacacttcaacattttggggatttggtatccttttcactcttgtacatcgttatctatcggtttccttggaaatctacgatccactattctgcacgaatttcagatgccatgtgtcattgaatgcacggtcatatgttcttttctgtgaaaaactgcagttgttttgtacaaacagtgaaaatagtatgtccagtgatttatagagacaagatgcgtctattaaagaaaatatttgctgtcaaactgtattgtttgtgcgtttggtcatcaagaatacccagagtattaagttatgcgtgtcacaaatggatggttgaagtgaaattgatgacatatgtatccgtttttcaccattcatcaggatttaacttttctgactaaaggtggtttattctggctgaagggataattgtgttccaaattttcttaggtttgtgtgtatgatatggattggtctcaaccaacagctattgttgtgggcaatgagcttaggggtataagtgatgatgctctagaattgtcagatttgcactgcagcattccaatgaaaggcatggtggattcgtttaatgtatctgttgcagctggaatcctcatgcaccatgctgtttgtgatagagtttcccgcctgggccatcacggtgatctcttgcctgaagaaaataggatattgcttgctgagttctatctgcgacacagagaaagcacggctactatagttcatgaatatgccaaaatgaaggcaggaaaagttatgaccagactttgaaaacatcctgagaagctgagtgacgtgtctgccaatcaagtcttggattatctggtgcatttttctaacagaaaacgaggctattttttcctggagtttaccgctgatccctaccagattgctgggaagacgaggatccaagcccaatcattgagcagagctgttaacgattacgcatatggttttcaacggttacgaccggaagcttggtgtaaccgtaccagtataacctgtccttggagggttgagagcttgagatgtaaacgaactgcacttgtctacggcaggatgatgcgtctgtaacgcaaagctgtgcaactggtgaatctcgccaccgaattctgctagggaaagctacggacgtgttgaaaactggaacataaaagtcgtgccattgattctggcctcaacgatgctcggtaaaacaacgaaacctaagaagaaaataaaa

SEQ ID NO: 67073 - DNA, 2199 bp, Zea Mays
ctgctgtgcgcttcgcctccaacagcgtcagcaacagtacgcttcagcgccttctgctcatgcccaaaccccgaagcggaagccccccgaccccaaacctcgcaagcgaccccagtaatggcgaccaaggcgctatccgtctcctcgctcacctccacggcctttgcctccttttccttgccgcggccccgcaggccttcaccttcgcctcccctcctccgccttctcggtcctcgcccccgcgcctccactctctccgccgccgctcccgacgacgaggacggcgtcgacaccgtggagcagctcctccacccacgcccgcctgagacctcagcccccgccggatcccgcggccggatcgaccgcctcatgaagctccagcgccgcgccgacggcgacgccgtgcccggggggcggaggaggtggttcccttacctggacgcgttccggcccgcggccgggggcgcggagctgtccagcggggaggtcatagatgtgctggagccgcacatcctagaggcgcggcgggaccggattcgacaagccgttggcaaccggagctacgccgtttgcctcgtggtggaaggcctctccgacttcggcaacgtctcggccgcgttccgctccgcggacgcgctcggcgtgcagtccgtgcacgtcatttcctgtgatagcagcaaaaggtatagagacaacaggcatgtgagcatgggtgctgagaaatggcttgacattgagatatggaactcacctgcagaatgtttcagtgcattaaaaaaacgcggttatcgcattgcgaccacttatttgggaactgattcggtatttttttcacacttcaacattttggggatttggtatccttttcactcttgtacatcgttatctatcggtttccttggaaatctacgatccactattctgcacgaatttcagatgccatgtgtcattgaatgcacggtcatatgttcttttctgtgaaaaactgcagttgttttgtacaaacagtgaaaatagtatgtccagtgatttatagagacaagatgcgtctattaaagaaaatatttgctgtcaaactgtattgtttgtgcgtttggtcatcaagaatacccagagtattaagttatgcgtgtcacaaatggatggttgaagtgaaattgatgacatatgtatccgtttttcaccattcatcaggatttaacttttctgactaaaggtggtttattctggctgaagggataattgtgttccaaattttcttaggtttgtgtgtatgatatggattggtctcaaccaacagctattgttgtgggcaatgagcttaggggtataagtgatgatgctctagaattgtcagatttgcactgcagcattccaatgaaaggcatggtggattcgtttaatgtatctgttgcagctggaatcctcatgcaccatgctgtttgtgatagagtttcccgcctgggccatcacggtgatctcttgcctgaagaaaataggatattgcttgctgagttctatctgcgacacagagaaagcacggctactatagttcatgaatatgccaaaatgaaggcaggaaaagttatgaccagactttgaaaacatcctgagaagctgagtgacgtgtctgccaatcaagtcttggattatctggtgcatttttctaacagaaaacgaggctattttttcctggagtttaccgctgatccctaccagattgctgggaagacgaggatccaagcccaatcattgagcagagctgttaacgattacgcatatggttttcagtgacgtggacttttgctcccaaaacagtcgcccgttaactatttttgtatgtttttgttaggatgaaagcttaatatgtttccacttgtttttcacaaacgttggcggtggttgggtttgggcggcaacgctccatgttctacagacggttacgaccggaagcttggtgtaaccgtaccagtataacctgtccttggagggttgagagcttgagatgtaaacgaactgcacttgtctacggcaggatgatgcgtctgtaacgcaaagctgtgcaactggtgaatctcgccaccgaattctgctagggaaagctacggacgtgttgaaaactggaacataaaagtcgtgccattgattctggcctcaacgatgctcggtaaaacaacgaaacctaagaagaaaataaaa

SEQ ID NO: 67074 - DNA, 1728 bp, Zea Mays
cggcctcaccgcaccaagtcggacgccgactggcgcaggggcgtttccgtaaaccccgcgcctcgcccggtcgcttccgccgtcccgtccccgcatcgcgcctcggactgcggaccatgcctcgtcacggtcccgcgtggatggtcggttatgcccctggctcccgcgcggcgcaacgcaccccgcctgagggctatctggtgcggtgcggctcgatccggcccgacgattccgatcccttcgcgtccaccatcccgtctcgctctcggtctcgcgctccacgccggcgaccggagaaggggccgcgcatgtgacgcccacggcgaatccctcccctcctctccggtgccgccttcagccgacccgcggcgacgtgccagcacttctgtacaacaggattgaaggggggatgagaaggtggacatcgttgctctagtgatttgatcaccagagatggtgttggtggtgaagcagcatcgctgcacgcactctgtgagctgtgtttgcatcaagggccatctcagtgaggatgctctgttcctcgtcttccgccacatgaactggaacccaaggctgattgctatcctgtcatgtgtgtgcaagtggtttgacgaggttgccaagcaggtgctgtggaaggagttctgtcatgcaagggcttcaaagatgatgctggatttgcattcaggtggtagccacattgttgatgggaactggaaagcgctggggaagctgctcatctattgcaatggctgcacaaaaggggggctcttcaataacatccatgttccaggccattttgtgttcaggacacgcttttctaggactgcgggcaggagtttcctgcctctgccatgcaagtcagacgtgttgtatgtgtcagatccatgtgagcatcttgatcaaggggaagaaggcgacttaggtttctttcgaggcatctttaagtcattcgccacttcaagagtgaagaagatgttgattgagaagcgggctaggtttcatccaagggagttgtgctcttattgtaagtcgaagctatggaacatgttccaggaaaatatgattccaaggagtgcttctgctagactgggtgcctatgatgattccgtcgagtattttgtatgcttgaatgggcatgttattggacttggtaccctgctaccactctcagactcggaggaggcagcagatgagtaatcatcaagaatgagtcaggtttggaagattgaagcccaggacttgcgaaaatggtactgaatcttggttgtgactagcagagagtgggatgacattggttcagcaaactgttgcacgacaagaatctgtggtgggctctgcgtcggactacccctgtgttcttgcacctgataacaaaaaaagaacccaatttcgaaggacgagaaagaaccaaatgcacacggttcagctcatccttttgaattgatcatccatcagagctagcataacataactatatacattgataagtaggttaaaatagatcaaacaatctcggagataaataatgtactcttgtagtcttgtgagtagctaacacgatatttggtataagtttcatatccttacttttcacatatgagcattcatatctgctagttataagcagcatgttgtaaaagtgttgtggaaatgattgagtaaatttgacggtggttgatagttagacaccattttctatatattgtgcacaaagagaagtatgcc

SEQ ID NO: 67075 - DNA, 2666 bp, Zea Mays
cggcctcaccgcaccaagtcggacgccgactggcgcaggggcgtttccgtaaaccccgcgcctcgcccggtcgcttccgccgtcccgtccccgcatcgcgcctcggactgcggaccatgcctcgtcacggtcccgcgtggatggtcggttatgcccctggctcccgcgcggcgcaacgcaccccgcctgagggctatctggtgcggtgcggctcgatccggcccgacgattccgatcccttcgcgtccaccatcccgtctcgctctcggtctcgcgctccacgccggcgaccggagaaggggccgcgcatgtgacgcccacggcgaatccctcccctcctctccggtgccgccttcagccgacccgcggcgacgtgccaggattgaaggggggatgagaaggtggacatcgttgctctagtgatttgatcaccagagatggtgttggtggtgaagcagcatcgctgcacgcactctgtgagctgtgtttgcatcaagggccatctcagtgaggatgctctgttcctcgtcttccgccacatgaactggaacccaaggctgattgctatcctgtcatgtgtgtgcaagtggtttgacgaggttgccaagcaggtgctgtggaaggagttctgtcatgcaagggcttcaaagatgatgctggatttgcattcaggtggtagccacattgttgatgggaactggaaagcgctggggaagctgctcatctattgcaatggctgcacaaaaggggggctcttcaataacatccatgttccaggccattttgtgttcaggacacgcttttctaggactgcgggcaggagtttcctgcctctgccatgcaagtcagacgtgttgtatgtgtcagatccatgtgagcatcttgatcaaggggaagaaggcgacttaggtttctttcgaggcatctttaagtcattcgccacttcaagagtgaagaagatgttgattgagaagcgggctaggtttcatccaagggagttgtgctcttattgtaagtcgaagctatggaacatgttccaggaaaatatgattccaaggagtgcttctgctagactgggtgcctatgatgattccgtcgagtattttgtatgcttgaatgggcatgttattggacttggtaccctgctaccactctcagactcggaggaggcagcagatgagtaatcatcaagaatgagtcaggttggtctatctctattccatggcaaatttcttcttgaaacttttcagtaaacatcaagtttcatgcgcagacatgtctggatgtacaacatagactggttcctcttcaatattagtttgtgtttgcatacacttaatgcttaatcctatttatttaatgcatagcttgatcagcatttcatattgtataccaacattttctccttggaacagcgaaggaactttgcataagcttgttgggatatcatatcacataatgcttatttgagattttttaggaatttttgacatttaaaaaggaaacattagtagcaaaactattctcaagggtttgtatgcttattttgtgatggcatcagagttagtgaatcgattcttagaatcccaaatgtttaacgtggtctctgtctatttctcacacccttatgtttgcctctacttttgaagttatatatactagtagatatttgtatggtacagcaagtcacaattggtgatcattatcttcattttagaagtggcagtacacaagtttcgggtggcagttagaatgctttgacccaaacaaaattcaccatttaaattctcacttcttgcactcgacaaatagtagagcactagagaagtaaatctatgttgatggtataatgcagttgttttgaattctgtttaatcaaatatctacatgacaacaattcgttaatataaatctagacgtactggttatcttcagaagagccatattgtccggtcagtttgttctttttattttatttgtgaaaaatatgaggaaaatgtgcattgctgacatcctgttttatttgtgattgctactttacgttgctttatctactaggccataacaaattaacaacatccggtgacaagtgcgccagtttaaggaaggtagcagagtctctgtctcaaataaaagggtgccagggctatgatctagtttggaagattgaagcccaggacttgcgaaaatggtactgaatcttggttgtgactagcagagagtgggatgacattggttcagcaaactgttgcacgacaagaatctgtggtgggctctgcgtcggactacccctgtgttcttgcacctgataacaaaaaaagaacccaatttcgaaggacgagaaagaaccaaatgcacacggttcagctcatccttttgaattgatcatccatcagagctagcataacataactatatacattgataagtaggttaaaatagatcaaacaatctcggagataaataatgtactcttgtagtcttgtgagtagctaacacgatatttggtataagtttcatatccttacttttcacatatgagcattcatatctgctagttataagcagcatgttgtaaaagtgttgtggaaatgattgagtaaatttgacggtggttgatagttagacaccattttctatatattgtgcacaaagagaagtatgcc

SEQ ID NO: 67076 - DNA, 1797 bp, Zea Mays
cggcctcaccgcaccaagtcggacgccgactggcgcaggggcgtttccgtaaaccccgcgcctcgcccggtcgcttccgccgtcccgtccccgcatcgcgcctcggactgcggaccatgcctcgtcacggtcccgcgtggatggtcggttatgcccctggctcccgcgcggcgcaacgcaccccgcctgagggctatctggtgcggtgcggctcgatccggcccgacgattccgatcccttcgcgtccaccatcccgtctcgctctcggtctcgcgctccacgccggcgaccggagaaggggccgcgcatgtgacgcccacggcgaatccctcccctcctctccggtgccgccttcagccgacccgcggcgacgtgccaggattgaaggggggatgagaaggtggacatcgttgctctagtgatttgatcaccagagatggtgttggtggtgaagcagcatcgctgcacgcactctgtgagctgtgtttgcatcaagggccatctcagtgaggatgctctgttcctcgtcttccgccacatgaactggaacccaaggctgattgctatcctgtcatgtgtgtgcaagtggtttgacgaggttgccaagcaggtgctgtggaaggagttctgtcatgcaagggcttcaaagatgatgctggatttgcattcaggtggtagccacattgttgatgggaactggaaagcgctggggaagctgctcatctattgcaatggctgcacaaaaggggggctcttcaataacatccatgttccaggccattttgtgttcaggacacgcttttctaggactgcgggcaggagtttcctgcctctgccatgcaagtcagacgtgttgtatgtgtcagatccatgtgagcatcttgatcaaggggaagaaggcgacttaggtttctttcgaggcatctttaagtcattcgccacttcaagagtgaagaagatgttgattgagaagcgggctaggtttcatccaagggagttgtgctcttattgtaagtcgaagctatggaacatgttccaggaaaatatgattccaaggagtgcttctgctagactgggtgcctatgatgattccgtcgagtattttgtatgcttgaatgggcatgttattggacttggtaccctgctaccactctcagactcggaggaggcagcagatgagtaatcatcaagaatgagtcaggtgatcatatattttctgttggctatttgtgaagaatagatagattctttacatgatgtattaaaatatatacactgaaatacaggtttggaagattgaagcccaggacttgcgaaaatggtactgaatcttggttgtgactagcagagagtgggatgacattggttcagcaaactgttgcacgacaagaatctgtggtgggctctgcgtcggactacccctgtgttcttgcacctgataacaaaaaaagaacccaatttcgaaggacgagaaagaaccaaatgcacacggttcagctcatccttttgaattgatcatccatcagagctagcataacataactatatacattgataagtaggttaaaatagatcaaacaatctcggagataaataatgtactcttgtagtcttgtgagtagctaacacgatatttggtataagtttcatatccttacttttcacatatgagcattcatatctgctagttataagcagcatgttgtaaaagtgttgtggaaatgattgagtaaatttgacggtggttgatagttagacaccattttctatatattgtgcacaaagagaagtatgcc

SEQ ID NO: 67077 - DNA, 1810 bp, Zea Mays
cggcctcaccgcaccaagtcggacgccgactggcgcaggggcgtttccgtaaaccccgcgcctcgcccggtcgcttccgccgtcccgtccccgcatcgcgcctcggactgcggaccatgcctcgtcacggtcccgcgtggatggtcggttatgcccctggctcccgcgcggcgcaacgcaccccgcctgagggctatctggtgcggtgcggctcgatccggcccgacgattccgatcccttcgcgtccaccatcccgtctcgctctcggtctcgcgctccacgccggcgaccggagaaggggccgcgcatgtgacgcccacggcgaatccctcccctcctctccggtgccgccttcagccgacccgcggcgacgtgccaggattgaaggggggatgagaaggtggacatcgttgctctagtgatttgatcaccagagatggtgttggtggtgaagcagcatcgctgcacgcactctgtgagctgtgtttgcatcaagggccatctcagtgaggatgctctgttcctcgtcttccgccacatgaactggaacccaaggctgattgctatcctgtcatgtgtgtgcaagtggtttgacgaggttgccaagcaggtgctgtggaaggagttctgtcatgcaagggcttcaaagatgatgctggatttgcattcaggtggtagccacattgttgatgggaactggaaagcgctggggaagctgctcatctattgcaatggctgcacaaaaggggggctcttcaataacatccatgttccaggccattttgtgttcaggacacgcttttctaggactgcgggcaggagtttcctgcctctgccatgcaagtcagacgtgttgtatgtgtcagatccatgtgagcatcttgatcaaggggaagaaggcgacttaggtttctttcgaggcatctttaagtcattcgccacttcaagagtgaagaagatgttgattgagaagcgggctaggtttcatccaagggagttgtgctcttattgtaagtcgaagctatggaacatgttccaggaaaatatgattccaaggagtgcttctgctagactgggtgcctatgatgattccgtcgagtattttgtatgcttgaatgggcatgttattggacttggtaccctgctaccactctcagactcggaggaggcagcagatgagtaatcatcaagaatgagtcaggccataacaaattaacaacatccggtgacaagtgcgccagtttaaggaaggtagcagagtctctgtctcaaataaaagggtgccagggctatgatctagtttggaagattgaagcccaggacttgcgaaaatggtactgaatcttggttgtgactagcagagagtgggatgacattggttcagcaaactgttgcacgacaagaatctgtggtgggctctgcgtcggactacccctgtgttcttgcacctgataacaaaaaaagaacccaatttcgaaggacgagaaagaaccaaatgcacacggttcagctcatccttttgaattgatcatccatcagagctagcataacataactatatacattgataagtaggttaaaatagatcaaacaatctcggagataaataatgtactcttgtagtcttgtgagtagctaacacgatatttggtataagtttcatatccttacttttcacatatgagcattcatatctgctagttataagcagcatgttgtaaaagtgttgtggaaatgattgagtaaatttgacggtggttgatagttagacaccattttctatatattgtgcacaaagagaagtatgcc

SEQ ID NO: 67078 - DNA, 2862 bp, Zea Mays
tatttgcaattttgccgtgggggtaacccatggagatcacggaggagcagcggcgtcgcgccgaggccaaccgcctcgccgccctcgagaagcgcaagcgctacgcagaggccgcggctgccaccgcctttcccacctccggtgcctccacattccctgcctacgacactgccgccgccgccgagtggaggctcgccaaatgcccaagaatcgccccgcccgcgcgccagttaccgtttgtaccgctgccccctcgtccttccccaccgccgctgccgccgactccgcctcagccgccggtggggttccaggttgtgctggaggtatgcggccccgacgagttctgggtggcggtggtgccggtagaaggcagggcctaccctggggaggccgagtgcctcggcgccgtccaggactgcctcgctgcggcttcggttgtacaatactctgcaacacagtcgctaagtcaaagcacacatcttcgtcctgtatttaagcttgtggactatggtgtggtgttgaaatgccttaagaaattacctggagcttctgtgcaagaaataccttctagcacaaagagaattattcagaatatacctaggtatcacgtccaaaagtgggcttctgatgaagaagtacatgagcttctcaagaaactgccacagcaaataaaagatgcgcttttacccttccaacttgaaggagtgatgtttgggcttcgaaggcgtggacgttgcctaattgcagatgagatggggctcggcaagactctccaggcgattgcaatagcatgctgtttcaaggacgagggctctatattaatagtatgtccagctgtattgcgttattcttgggcagaggaattggaacgctgggatccttcatttatgccaaaagatattcatattgtatttggtcgtcaagacagtcttgaacatctaaatgctactccaagggcagtgattatatcttaccagatgctaagtcgccttagagaaagtatggtgaatagaacatgggcactgatgattgttgatgaatcacataacatacgctgcacgaagaaactagaagaaaaatatgagacaaaagctgtgctacatctagcttcaaaaactgaacgcatcatattgctctcggggacaccctctttctcaagaccttttgatatctaccaccagataaatatgctatggccccacatgcttggtactgataaatttgattatgcgaaaaaatattgcttgctgcatgttgcacgaagttatcaggggaaaatgtttaaggacttctctaagggcacacggttgacagagttaaatgttttgctcagtcaaactgtcatgattaggcgactgaaggagcatttgttgaatgaactgccccccaagcggcgacaaattattaggttgaagctaaaggcaccagatatcagggcagccacatcttcatgcggcaaaagggtgaaccctaacagttgtaatggaactcttacaattgaattgcccagtaaaagcaatgatgatgaaaatacaaaagaggaagaagaagatgattgcaagaaatctccaaggagtctcaccccacaagagattggtatcgcaaagttatctggatttagtgaatggttctcaaatcatttcatcatgaatggatttgatgctaaccataacctggatccccagtctagctgtcagaaaacaataatatttgcacatcacttaaaggttctagatggaatacaggtgtttatctctgagaatgagatcagatttgttcgcattgatggaagcacacttcaaagggaaaggaaagaagctgttgattctttccgtttggatccagaggtgaaggttgcaataattggaattactgctggtggtgttggcttagacttctcatctgctcagaatgttatttttgtggagctcccaaaatcagcttcagaattgcttcaggctgaggatagagctcatagacgtggccaaagaaatgcggtcaacatatatatattctgtggaaagaacacattggatgaatcacactggctccagttaaaccagagtctgttccgtgtctcgtctttgatgaatggaaaaaaggatgctgtaagggagattgaggttgatcaagtgtgccaacttgaagaaatcaaggacaccgaggaaacacaacgcaaactgcatcctttggagaatcataatgcagatttgacccacgtaccaaaaaaacttctggaaagtgatgatttgtccattgatggttttcttggcatcgaagatttggaatttgacttggatttcaccattaggacaattcctcttgaatttgaggatgaaaaccccggcacatccttgaaaaataatccaactccaacagtacttgaagacagatcttgtattgatgtttctctttcaccagctgcagtcttttgctctgtactatctagttgtaaatcaataaagaggctttctggaaattctgggtccttgagtcaagctgcatctgttccagattttccaattcaagtggagtctctgcgttttgaggttagccggcacacaggacgaatccacttgtacagttgtgttcctggacatgattcaagacccaaaccactttgtgaaaattttctgccagaagaattgaattcacctttatgttctcccagtgatgttaaaacaagaactcttctcttgaaaaagattccttcattttgcaatgtgttcaatgcattcatcaaagagtggttggcactaagaccaattgatcaaaataaattgcttggaaagccattacaacttccgttgaaccttgagttgtgttttctgaaagatagcatcaatcatagcacagaaggat

SEQ ID NO: 67079 - DNA, 3873 bp, Zea Mays
tatttgcaattttgccgtgggggtaacccatggagatcacggaggagcagcggcgtcgcgccgaggccaaccgcctcgccgccctcgagaagcgcaagcgctacgcagaggccgcggctgccaccgcctttcccacctccggtgcctccacattccctgcctacgacactgccgccgccgccgagtggaggctcgccaaatgcccaagaatcgccccgcccgcgcgccagttaccgtttgtaccgctgccccctcgtccttccccaccgccgctgccgccgactccgcctcagccgccggtggggttccaggttgtgctggaggtatgcggccccgacgagttctgggtggcggtggtgccggtagaaggcagggcctaccctggggaggccgagtgcctcggcgccgtccaggactgcctcgctgcggcttcggttgtacaatactctgcaacacagtcgctaagtcaaagcacacatcttcgtcctgtatttaagcttgtggactatggtgtggtgttgaaatgccttaagaaattacctggagcttctgtgcaagaaataccttctagcacaaagagaattattcagaatatacctaggtatcacgtccaaaagtgggcttctgatgaagaagtacatgagcttctcaagaaactgccacagcaaataaaagatgcgcttttacccttccaacttgaaggagtgatgtttgggcttcgaaggcgtggacgttgcctaattgcagatgagatggggctcggcaagactctccaggcgattgcaatagcatgctgtttcaaggacgagggctctatattaatagtatgtccagctgtattgcgttattcttgggcagaggaattggaacgctgggatccttcatttatgccaaaagatattcatattgtatttggtcgtcaagacagtcttgaacatctaaatgctactccaagggcagtgattatatcttaccagatgctaagtcgccttagagaaagtatggtgaatagaacatgggcactgatgattgttgatgaatcacataacatacgctgcacgaagaaactagaagaaaaatatgagacaaaagctgtgctacatctagcttcaaaaactgaacgcatcatattgctctcggggacaccctctttctcaaggcgataatagaccttttgatatctaccaccagataaatatgctatggccccacatgcttggtactgataaatttgattatgcgaaaaaatattgcttgctgcatgttgcacgaagttatcaggggaaaatgtttaaggacttctctaagggcacacggttgacagagttaaatgttttgctcagtcaaactgtcatgattaggcgactgaaggagcatttgttgaatgaactgccccccaagcggcgacaaattattaggttgaagctaaaggcaccagatatcagggcagccacatcttcatgcggcaaaagggtgaaccctaacagttgtaatggaactcttacaattgaattgcccagtaaaagcaatgatgatgaaaatacaaaagaggaagaagaagatgattgcaagaaatctccaaggagtctcaccccacaagagattggtatcgcaaagttatctggatttagtgaatggttctcaaatcatttcatcatgaatggatttgatgctaaccataacctggatccccagtctagctgtcagaaaacaataatatttgcacatcacttaaaggttctagatggaatacaggtgtttatctctgagaatgagatcagatttgttcgcattgatggaagcacacttcaaagggaaaggaaagaagctgttgattctttccgtttggatccagaggtgaaggttgcaataattggaattactgctggtggtgttggcttagacttctcatctgctcagaatgttatttttgtggagctcccaaaatcagcttcagaattgcttcaggctgaggatagagctcatagacgtggccaaagaaatgcggtcaacatatatatattctgtggaaagaacacattggatgaatcacactggctccagttaaaccagagtctgttccgtgtctcgtctttgatgaatggaaaaaaggatgctgtaagggagattgaggttgatcaagtgtgccaacttgaagaaatcaaggacaccgaggaaacacaacgcaaactgcatcctttggagaatcataatgcagatttgacccacgtaccaaaaaaacttctggaaagtgatgatttgtccattgatggttttcttggcatcgaagatttggaatttgacttggatttcaccattaggacaattcctcttgaatttgaggatgaaaaccccggcacatccttgaaaaataatccaactccaacagtacttgaagacagatcttgtattgatgtttctctttcaccagctgcagtcttttgctctgtactatctagttgtaaatcaataaagtctcgtaagaggctttctggaaattctgggtccttgagtcaagctgcatctgttccagattttccaattcaagtggagtctctgcgttttgaggttagccggcacacaggacgaatccacttgtacagttgtgttcctggacatgattcaagacccaaaccactttgtgaaaattttctgccagaagaattgaattcacctttatgttctcccagtgatgttaaaacaagaactcttctcttgaaaaagattccttcattttgcaatgtgttcaatgcattcatcaaagagtggttggcactaagaccaattgatcaaaataaattgcttggaaagccattacaacttccgttgaaccttgagttgtgttttctgaaagatagcatcaatcatagcacagaagggatacttaaagggggaagtaagaggcgtgctgcatcattgaatgatgtcagtaatcctttgccagaaaatgctgaatggagacaggtggtgttgcgtaatggcacctgtaaagagagacagtacactcagggctggaccattgatgatgaacctctctgcaaactttgtcaaggactttgcaatggaaggcttgcaaagtcaccagaatattttgaagatctattctgtagtttagcttgtttccaggaatacagattaagaaccagtggcagggccctccggcaggcactgtttcaaatagaacgtggcaagtgctcccaatgcaagctcgattgttgcaagcttgtcaaacacattaaactcttacctttgggaaagcgagaagaatacatcagaaaggttgctccaaacattgcaagtagaaagaaactcctagataaacttgtccgtgaaccaattgatggaaatgcttggcatgcagatcacataatacctgtttataaaggaggaggggaatgtaaactcgagaacatgagaacactgtgtgtggcttgtcattatgaggtcaccagaactcagcacaaggaactaaaagaaataagaaagaaggctaaagagcacttgaaaaacgccttgaataaacaaaaggataaaccaagtgaagcaacagaagaactagatgacgaatcgttgctgatagctgtcccgggtagtgcctactccttaggatttcctggcaacggatctgatgaaaaggctgctgaatagggcatgtttcatttaccttgattattgttcaaaaagggcgctggtattttttagctcgcgtcctttttttgtacatgttaaatgctaccaagcgtttgtaagctgttcggctgctcttataagcagcactgataagcaacactattgcagctgcagagctagaattatctcacatttttgggcttgttcgttttgatgctaaaccatgtggattgagttggattg

SEQ ID NO: 67080 - DNA, 3863 bp, Zea Mays
tatttgcaattttgccgtgggggtaacccatggagatcacggaggagcagcggcgtcgcgccgaggccaaccgcctcgccgccctcgagaagcgcaagcgctacgcagaggccgcggctgccaccgcctttcccacctccggtgcctccacattccctgcctacgacactgccgccgccgccgagtggaggctcgccaaatgcccaagaatcgccccgcccgcgcgccagttaccgtttgtaccgctgccccctcgtccttccccaccgccgctgccgccgactccgcctcagccgccggtggggttccaggttgtgctggaggtatgcggccccgacgagttctgggtggcggtggtgccggtagaaggcagggcctaccctggggaggccgagtgcctcggcgccgtccaggactgcctcgctgcggcttcggttgtacaatactctgcaacacagtcgctaagtcaaagcacacatcttcgtcctgtatttaagcttgtggactatggtgtggtgttgaaatgccttaagaaattacctggagcttctgtgcaagaaataccttctagcacaaagagaattattcagaatatacctaggtatcacgtccaaaagtgggcttctgatgaagaagtacatgagcttctcaagaaactgccacagcaaataaaagatgcgcttttacccttccaacttgaaggagtgatgtttgggcttcgaaggcgtggacgttgcctaattgcagatgagatggggctcggcaagactctccaggcgattgcaatagcatgctgtttcaaggacgagggctctatattaatagtatgtccagctgtattgcgttattcttgggcagaggaattggaacgctgggatccttcatttatgccaaaagatattcatattgtatttggtcgtcaagacagtcttgaacatctaaatgctactccaagggcagtgattatatcttaccagatgctaagtcgccttagagaaagtatggtgaatagaacatgggcactgatgattgttgatgaatcacataacatacgctgcacgaagaaactagaagaaaaatatgagacaaaagctgtgctacatctagcttcaaaaactgaacgcatcatattgctctcggggacaccctctttctcaagaccttttgatatctaccaccagataaatatgctatggccccacatgcttggtactgataaatttgattatgcgaaaaaatattgcttgctgcatgttgcacgaagttatcaggggaaaatgtttaaggacttctctaagggcacacggttgacagagttaaatgttttgctcagtcaaactgtcatgattaggcgactgaaggagcatttgttgaatgaactgccccccaagcggcgacaaattattaggttgaagctaaaggcaccagatatcagggcagccacatcttcatgcggcaaaagggtgaaccctaacagttgtaatggaactcttacaattgaattgcccagtaaaagcaatgatgatgaaaatacaaaagaggaagaagaagatgattgcaagaaatctccaaggagtctcaccccacaagagattggtatcgcaaagttatctggatttagtgaatggttctcaaatcatttcatcatgaatggatttgatgctaaccataacctggatccccagtctagctgtcagaaaacaataatatttgcacatcacttaaaggttctagatggaatacaggtgtttatctctgagaatgagatcagatttgttcgcattgatggaagcacacttcaaagggaaaggaaagaagctgttgattctttccgtttggatccagaggtgaaggttgcaataattggaattactgctggtggtgttggcttagacttctcatctgctcagaatgttatttttgtggagctcccaaaatcagcttcagaattgcttcaggctgaggatagagctcatagacgtggccaaagaaatgcggtcaacatatatatattctgtggaaagaacacattggatgaatcacactggctccagttaaaccagagtctgttccgtgtctcgtctttgatgaatggaaaaaaggatgctgtaagggagattgaggttgatcaagtgtgccaacttgaagaaatcaaggacaccgaggaaacacaacgcaaactgcatcctttggagaatcataatgcagatttgacccacgtaccaaaaaaacttctggaaagtgatgatttgtccattgatggttttcttggcatcgaagatttggaatttgacttggatttcaccattaggacaattcctcttgaatttgaggatgaaaaccccggcacatccttgaaaaataatccaactccaacagtacttgaagacagatcttgtattgatgtttctctttcaccagctgcagtcttttgctctgtactatctagttgtaaatcaataaagtctcgtaagaggctttctggaaattctgggtccttgagtcaagctgcatctgttccagattttccaattcaagtggagtctctgcgttttgaggttagccggcacacaggacgaatccacttgtacagttgtgttcctggacatgattcaagacccaaaccactttgtgaaaattttctgccagaagaattgaattcacctttatgttctcccagtgatgttaaaacaagaactcttctcttgaaaaagattccttcattttgcaatgtgttcaatgcattcatcaaagagtggttggcactaagaccaattgatcaaaataaattgcttggaaagccattacaacttccgttgaaccttgagttgtgttttctgaaagatagcatcaatcatagcacagaagggatacttaaagggggaagtaagaggcgtgctgcatcattgaatgatgtcagtaatcctttgccagaaaatgctgaatggagacaggtggtgttgcgtaatggcacctgtaaagagagacagtacactcagggctggaccattgatgatgaacctctctgcaaactttgtcaaggactttgcaatggaaggcttgcaaagtcaccagaatattttgaagatctattctgtagtttagcttgtttccaggaatacagattaagaaccagtggcagggccctccggcaggcactgtttcaaatagaacgtggcaagtgctcccaatgcaagctcgattgttgcaagcttgtcaaacacattaaactcttacctttgggaaagcgagaagaatacatcagaaaggttgctccaaacattgcaagtagaaagaaactcctagataaacttgtccgtgaaccaattgatggaaatgcttggcatgcagatcacataatacctgtttataaaggaggaggggaatgtaaactcgagaacatgagaacactgtgtgtggcttgtcattatgaggtcaccagaactcagcacaaggaactaaaagaaataagaaagaaggctaaagagcacttgaaaaacgccttgaataaacaaaaggataaaccaagtgaagcaacagaagaactagatgacgaatcgttgctgatagctgtcccgggtagtgcctactccttaggatttcctggcaacggatctgatgaaaaggctgctgaatagggcatgtttcatttaccttgattattgttcaaaaagggcgctggtattttttagctcgcgtcctttttttgtacatgttaaatgctaccaagcgtttgtaagctgttcggctgctcttataagcagcactgataagcaacactattgcagctgcagagctagaattatctcacatttttgggcttgttcgttttgatgctaaaccatgtggattgagttggattg

SEQ ID NO: 67081 - DNA, 4263 bp, Zea Mays
tatttgcaattttgccgtgggggtaacccatggagatcacggaggagcagcggcgtcgcgccgaggccaaccgcctcgccgccctcgagaagcgcaagcgctacgcagaggccgcggctgccaccgcctttcccacctccggtgcctccacattccctgcctacgacactgccgccgccgccgagtggaggctcgccaaatgcccaagaatcgccccgcccgcgcgccagttaccgtttgtaccgctgccccctcgtccttccccaccgccgctgccgccgactccgcctcagccgccggtggggttccaggttgtgctggaggtatgcggccccgacgagttctgggtggcggtggtgccggtagaaggcagggcctaccctggggaggccgagtgcctcggcgccgtccaggactgcctcgctgcggcttcggttgtacaatactctgcaacacagtcgctaagtcaaagcacacatcttcgtcctgtatttaagcttgtggactatggtgtggtgttgaaatgccttaagaaattacctggagcttctgtgcaagaaataccttctagcacaaagagaattattcagaatatacctaggtatcacgtccaaaagtgggcttctgatgaagaagtacatgagcttctcaagaaactgccacagcaaataaaagatgcgcttttacccttccaacttgaaggagtgatgtttgggcttcgaaggcgtggacgttgcctaattgcagatgagatggggctcggcaagactctccaggcgattgcaatagcatgctgtttcaaggacgagggctctatattaatagtatgtccagctgtattgcgttattcttgggcagaggaattggaacgctgggatccttcatttatgccaaaagatattcatattgtatttggtcgtcaagacagtcttgaacatctaaatgctactccaagggcagtgattatatcttaccagatgctaagtcgccttagagaaagtatggtgaatagaacatgggcactgatgattgttgatgaatcacataacatacgctgcacgaagaaactagaagaaaaatatgagacaaaagctgtgctacatctagcttcaaaaactgaacgcatcatattgctctcggggacaccctctttctcaagaccttttgatatctaccaccagataaatatgctatggccccacatgcttggtactgataaatttgattatgcgaaaaaatattgcttgctgcatgttgcacgaagttatcaggggaaaatgtttaaggacttctctaagggcacacggttgacagagttaaatgttttgctcagtcaaactgtcatgattaggcgactgaaggagcatttgttgaatgaactgccccccaagcggcgacaaattattaggttgaagctaaaggcaccagatatcagggcagccacatcttcatgcggcaaaagggtgaaccctaacagttgtaatggaactcttacaattgaattgcccagtaaaagcaatgatgatgaaaatacaaaagaggaagaagaagatgattgcaagaaatctccaaggagtctcaccccacaagagattggtatcgcaaagttatctggatttagtgaatggttctcaaatcatttcatcatgaatggatttgatgctaaccataacctggatccccagtctagctgtcagaaaacaataatatttgcacatcacttaaaggttctagatggaatacaggtgtttatctctgagaatgagatcagatttgttcgcattgatggaagcacacttcaaagggaaaggaaagaagctgttgattctttccgtttggatccagaggtgaaggttgcaataattggaattactgctggtggtgttggcttagacttctcatctgctcagaatgttatttttgtggagctcccaaaatcagcttcagaattgcttcaggctgaggatagagctcatagacgtggccaaagaaatgcggtcaacatatatatattctgtggaaagttaaaccagagtctgttccgtgtctcgtctttgatgaatggaaaaaaggatgctgtaagggagattgaggttgatcaagtgtgccaacttgaagaaatcaaggacaccgaggaaacacaacgcaaactgcatcctttggagaatcataatgcagatttgacccacgtaccaaaaaaacttctggaaagtgatgatttgtccattgatggttttcttggcatcgaagatttggaatttgacttggatttcaccattaggacaattcctcttgaatttgaggatgaaaaccccggcacatccttgaaaaataatccaactccaacagtacttgaagacagatcttgtattgatgtttctctttcaccagctgcagtcttttgctctgtactatctagttgtaaatcaataaagtctcgtaagaggctttctggaaattctgggtccttgagtcaagctgcatctgttccagattttccaattcaagtggagtctctgcgttttgaggttagccggcacacaggacgaatccacttgtacagttgtgttcctggacatgattcaagacccaaaccactttgtgaaaattttctgccagaagaattgaattcacctttatgttctcccagtgatgttaaaacaagaactcttctcttgaaaaagattccttcattttgcaatgtgttcaatgcattcatcaaagagtggttggcactaagaccaattgatcaaaataaattgcttggaaagccattacaacttccgttgaaccttgagttgtgttttctgaaagatagcatcaatcatagcacagaagggatacttaaagggggaagtaagaggcgtgctgcatcattgaatgatgtcagtaatcctttgccagaaaatgctgaatggagacaggtggtgttgcgtaatggcacctgtaaagagagacagtacactcagggctggaccattgatgatgaacctctctgcaaactttgtcaaggactttgcaatggaaggcttgcaaagtcaccagaatattttgaagatctattctgtagtttagcttgtttccaggaatacagattaagaaccagtggcagggccctccggcaggcactgtttcaaatagaacgtggcaagtgctcccaatgcaagctcgattgttgcaagcttgtcaaacacattaaactcttacctttgggaaagcgagaagaatacatcagaaaggttgctccaaacattgcaagtagaaagaaactcctagataaacttgtccgtgaaccaattgatggaaatgcttggcatgcagatcacataatacctgtttataaaggaggaggggaatgtaaactcgagaacatgagaacactgtgtgtggcttgtcattatgaggtcaccagaactcagcacaaggaactaaaagaaataagaaagaaggctaaagagcacttgaaaaacgccttgaataaacaaaaggataaagttagtagtctctcctctagacttcaattatctttgaaccatttttgcaaataaaaaatagcaaatgttctttgagcaacgagcttctctgtgaaaactaatagaatgagtagaatggtttctccattactatatggtttacttatacaacagtgagtgtacatgtaaggaaaaaaagaattaaattgctctaatagtctaatgtcatctattgtaatcaatacatattgcacatgcatatatgatctgctattaggaccaaaaattgttgagatatgagaactagtaatggttaggatattgcctttcttacattctgggcaaccatatgcaaattatgtatcgttgtccccttttgtgtatttgtttctcctatacattagttttttgttgttgctattattccttcttctctttcctttcgttgtagccaagtgaagcaacagaagaactagatgacgaatcgttgctgatagctgtcccgggtagtgcctactccttaggatttcctggcaacggatctgatgaaaaggctgctgaatagggcatgtttcatttaccttgattattgttcaaaaagggcgctggtattttttagctcgcgtcctttttttgtacatgttaaatgctaccaagcgtttgtaagctgttcggctgctcttataagcagcactgataagcaacactattgcagctgcagagctagaattatctcacatttttgggcttgttcgttttgatgctaaaccatgtggattgagttggattg

SEQ ID NO: 67082 - DNA, 3807 bp, Zea Mays
tatttgcaattttgccgtgggggtaacccatggagatcacggaggagcagcggcgtcgcgccgaggccaaccgcctcgccgccctcgagaagcgcaagcgctacgcagaggccgcggctgccaccgcctttcccacctccggtgcctccacattccctgcctacgacactgccgccgccgccgagtggaggctcgccaaatgcccaagaatcgccccgcccgcgcgccagttaccgtttgtaccgctgccccctcgtccttccccaccgccgctgccgccgactccgcctcagccgccggtggggttccaggttgtgctggaggtatgcggccccgacgagttctgggtggcggtggtgccggtagaaggcagggcctaccctggggaggccgagtgcctcggcgccgtccaggactgcctcgctgcggcttcggttgtacaatactctgcaacacagtcgctaagtcaaagcacacatcttcgtcctgtatttaagcttgtggactatggtgtggtgttgaaatgccttaagaaattacctggagcttctgtgcaagaaataccttctagcacaaagagaattattcagaatatacctaggtatcacgtccaaaagtgggcttctgatgaagaagtacatgagcttctcaagaaactgccacagcaaataaaagatgcgcttttacccttccaacttgaaggagtgatgtttgggcttcgaaggcgtggacgttgcctaattgcagatgagatggggctcggcaagactctccaggcgattgcaatagcatgctgtttcaaggacgagggctctatattaatagtatgtccagctgtattgcgttattcttgggcagaggaattggaacgctgggatccttcatttatgccaaaagatattcatattgtatttggtcgtcaagacagtcttgaacatctaaatgctactccaagggcagtgattatatcttaccagatgctaagtcgccttagagaaagtatggtgaatagaacatgggcactgatgattgttgatgaatcacataacatacgctgcacgaagaaactagaagaaaaatatgagacaaaagctgtgctacatctagcttcaaaaactgaacgcatcatattgctctcggggacaccctctttctcaaggcgataatagaccttttgatatctaccaccagataaatatgctatggccccacatgcttggtactgataaatttgattatgcgaaaaaatattgcttgctgcatgttgcacgaagttatcaggggaaaatgtttaaggacttctctaagggcacacggttgacagagttaaatgttttgctcagtcaaactgtcatgattaggcgactgaaggagcatttgttgaatgaactgccccccaagcggcgacaaattattaggttgaagctaaaggcaccagatatcagggcagccacatcttcatgcggcaaaagggtgaaccctaacagttgtaatggaactcttacaattgaattgcccagtaaaagcaatgatgatgaaaatacaaaagaggaagaagaagatgattgcaagaaatctccaaggagtctcaccccacaagagattggtatcgcaaagttatctggatttagtgaatggttctcaaatcatttcatcatgaatggatttgatgctaaccataacctggatccccagtctagctgtcagaaaacaataatatttgcacatcacttaaaggttctagatggaatacaggtgtttatctctgagaatgagatcagatttgttcgcattgatggaagcacacttcaaagggaaaggaaagaagctgttgattctttccgtttggatccagaggtgaaggttgcaataattggaattactgctggtggtgttggcttagacttctcatctgctcagaatgttatttttgtggagctcccaaaatcagcttcagaattgcttcagaacacattggatgaatcacactggctccagttaaaccagagtctgttccgtgtctcgtctttgatgaatggaaaaaaggatgctgtaagggagattgaggttgatcaagtgtgccaacttgaagaaatcaaggacaccgaggaaacacaacgcaaactgcatcctttggagaatcataatgcagatttgacccacgtaccaaaaaaacttctggaaagtgatgatttgtccattgatggttttcttggcatcgaagatttggaatttgacttggatttcaccattaggacaattcctcttgaatttgaggatgaaaaccccggcacatccttgaaaaataatccaactccaacagtacttgaagacagatcttgtattgatgtttctctttcaccagctgcagtcttttgctctgtactatctagttgtaaatcaataaagtctcgtaagaggctttctggaaattctgggtccttgagtcaagctgcatctgttccagattttccaattcaagtggagtctctgcgttttgaggttagccggcacacaggacgaatccacttgtacagttgtgttcctggacatgattcaagacccaaaccactttgtgaaaattttctgccagaagaattgaattcacctttatgttctcccagtgatgttaaaacaagaactcttctcttgaaaaagattccttcattttgcaatgtgttcaatgcattcatcaaagagtggttggcactaagaccaattgatcaaaataaattgcttggaaagccattacaacttccgttgaaccttgagttgtgttttctgaaagatagcatcaatcatagcacagaagggatacttaaagggggaagtaagaggcgtgctgcatcattgaatgatgtcagtaatcctttgccagaaaatgctgaatggagacaggtggtgttgcgtaatggcacctgtaaagagagacagtacactcagggctggaccattgatgatgaacctctctgcaaactttgtcaaggactttgcaatggaaggcttgcaaagtcaccagaatattttgaagatctattctgtagtttagcttgtttccaggaatacagattaagaaccagtggcagggccctccggcaggcactgtttcaaatagaacgtggcaagtgctcccaatgcaagctcgattgttgcaagcttgtcaaacacattaaactcttacctttgggaaagcgagaagaatacatcagaaaggttgctccaaacattgcaagtagaaagaaactcctagataaacttgtccgtgaaccaattgatggaaatgcttggcatgcagatcacataatacctgtttataaaggaggaggggaatgtaaactcgagaacatgagaacactgtgtgtggcttgtcattatgaggtcaccagaactcagcacaaggaactaaaagaaataagaaagaaggctaaagagcacttgaaaaacgccttgaataaacaaaaggataaaccaagtgaagcaacagaagaactagatgacgaatcgttgctgatagctgtcccgggtagtgcctactccttaggatttcctggcaacggatctgatgaaaaggctgctgaatagggcatgtttcatttaccttgattattgttcaaaaagggcgctggtattttttagctcgcgtcctttttttgtacatgttaaatgctaccaagcgtttgtaagctgttcggctgctcttataagcagcactgataagcaacactattgcagctgcagagctagaattatctcacatttttgggcttgttcgttttgatgctaaaccatgtggattgagttggattg

SEQ ID NO: 67083 - DNA, 4293 bp, Zea Mays
tatttgcaattttgccgtgggggtaacccatggagatcacggaggagcagcggcgtcgcgccgaggccaaccgcctcgccgccctcgagaagcgcaagcgctacgcagaggccgcggctgccaccgcctttcccacctccggtgcctccacattccctgcctacgacactgccgccgccgccgagtggaggctcgccaaatgcccaagaatcgccccgcccgcgcgccagttaccgtttgtaccgctgccccctcgtccttccccaccgccgctgccgccgactccgcctcagccgccggtggggttccaggttgtgctggaggtatgcggccccgacgagttctgggtggcggtggtgccggtagaaggcagggcctaccctggggaggccgagtgcctcggcgccgtccaggactgcctcgctgcggcttcggttgtacaatactctgcaacacagtcgctaagtcaaagcacacatcttcgtcctgtatttaagcttgtggactatggtgtggtgttgaaatgccttaagaaattacctggagcttctgtgcaagaaataccttctagcacaaagagaattattcagaatatacctaggtatcacgtccaaaagtgggcttctgatgaagaagtacatgagcttctcaagaaactgccacagcaaataaaagatgcgcttttacccttccaacttgaaggagtgatgtttgggcttcgaaggcgtggacgttgcctaattgcagatgagatggggctcggcaagactctccaggcgattgcaatagcatgctgtttcaaggacgagggctctatattaatagtatgtccagctgtattgcgttattcttgggcagaggaattggaacgctgggatccttcatttatgccaaaagatattcatattgtatttggtcgtcaagacagtcttgaacatctaaatgctactccaagggcagtgattatatcttaccagatgctaagtcgccttagagaaagtatggtgaatagaacatgggcactgatgattgttgatgaatcacataacatacgctgcacgaagaaactagaagaaaaatatgagacaaaagctgtgctacatctagcttcaaaaactgaacgcatcatattgctctcggggacaccctctttctcaagaccttttgatatctaccaccagataaatatgctatggccccacatgcttggtactgataaatttgattatgcgaaaaaatattgcttgctgcatgttgcacgaagttatcaggggaaaatgtttaaggacttctctaagggcacacggttgacagagttaaatgttttgctcagtcaaactgtcatgattaggcgactgaaggagcatttgttgaatgaactgccccccaagcggcgacaaattattaggttgaagctaaaggcaccagatatcagggcagccacatcttcatgcggcaaaagggtgaaccctaacagttgtaatggaactcttacaattgaattgcccagtaaaagcaatgatgatgaaaatacaaaagaggaagaagaagatgattgcaagaaatctccaaggagtctcaccccacaagagattggtatcgcaaagttatctggatttagtgaatggttctcaaatcatttcatcatgaatggatttgatgctaaccataacctggatccccagtctagctgtcagaaaacaataatatttgcacatcacttaaaggttctagatggaatacaggtgtttatctctgagaatgagatcagatttgttcgcattgatggaagcacacttcaaagggaaaggaaagaagctgttgattctttccgtttggatccagaggtgaaggttgcaataattggaattactgctggtggtgttggcttagacttctcatctgctcagaatgttatttttgtggagctcccaaaatcagcttcagaattgcttcaggctgaggatagagctcatagacgtggccaaagaaatgcggtcaacatatatatattctgtggaaagaacacattggatgaatcacactggctccagttaaaccagagtctgttccgtgtctcgtctttgatgaatggaaaaaaggatgctgtaagggagattgaggttgatcaagtgtgccaacttgaagaaatcaaggacaccgaggaaacacaacgcaaactgcatcctttggagaatcataatgcagatttgacccacgtaccaaaaaaacttctggaaagtgatgatttgtccattgatggttttcttggcatcgaagatttggaatttgacttggatttcaccattaggacaattcctcttgaatttgaggatgaaaaccccggcacatccttgaaaaataatccaactccaacagtacttgaagacagatcttgtattgatgtttctctttcaccagctgcagtcttttgctctgtactatctagttgtaaatcaataaagtctcgtaagaggctttctggaaattctgggtccttgagtcaagctgcatctgttccagattttccaattcaagtggagtctctgcgttttgaggttagccggcacacaggacgaatccacttgtacagttgtgttcctggacatgattcaagacccaaaccactttgtgaaaattttctgccagaagaattgaattcacctttatgttctcccagtgatgttaaaacaagaactcttctcttgaaaaagattccttcattttgcaatgtgttcaatgcattcatcaaagagtggttggcactaagaccaattgatcaaaataaattgcttggaaagccattacaacttccgttgaaccttgagttgtgttttctgaaagatagcatcaatcatagcacagaagggatacttaaagggggaagtaagaggcgtgctgcatcattgaatgatgtcagtaatcctttgccagaaaatgctgaatggagacaggtggtgttgcgtaatggcacctgtaaagagagacagtacactcagggctggaccattgatgatgaacctctctgcaaactttgtcaaggactttgcaatggaaggcttgcaaagtcaccagaatattttgaagatctattctgtagtttagcttgtttccaggaatacagattaagaaccagtggcagggccctccggcaggcactgtttcaaatagaacgtggcaagtgctcccaatgcaagctcgattgttgcaagcttgtcaaacacattaaactcttacctttgggaaagcgagaagaatacatcagaaaggttgctccaaacattgcaagtagaaagaaactcctagataaacttgtccgtgaaccaattgatggaaatgcttggcatgcagatcacataatacctgtttataaaggaggaggggaatgtaaactcgagaacatgagaacactgtgtgtggcttgtcattatgaggtcaccagaactcagcacaaggaactaaaagaaataagaaagaaggctaaagagcacttgaaaaacgccttgaataaacaaaaggataaagttagtagtctctcctctagacttcaattatctttgaaccatttttgcaaataaaaaatagcaaatgttctttgagcaacgagcttctctgtgaaaactaatagaatgagtagaatggtttctccattactatatggtttacttatacaacagtgagtgtacatgtaaggaaaaaaagaattaaattgctctaatagtctaatgtcatctattgtaatcaatacatattgcacatgcatatatgatctgctattaggaccaaaaattgttgagatatgagaactagtaatggttaggatattgcctttcttacattctgggcaaccatatgcaaattatgtatcgttgtccccttttgtgtatttgtttctcctatacattagttttttgttgttgctattattccttcttctctttcctttcgttgtagccaagtgaagcaacagaagaactagatgacgaatcgttgctgatagctgtcccgggtagtgcctactccttaggatttcctggcaacggatctgatgaaaaggctgctgaatagggcatgtttcatttaccttgattattgttcaaaaagggcgctggtattttttagctcgcgtcctttttttgtacatgttaaatgctaccaagcgtttgtaagctgttcggctgctcttataagcagcactgataagcaacactattgcagctgcagagctagaattatctcacatttttgggcttgttcgttttgatgctaaaccatgtggattgagttggattg

SEQ ID NO: 67084 - DNA, 3857 bp, Zea Mays
tatttgcaattttgccgtgggggtaacccatggagatcacggaggagcagcggcgtcgcgccgaggccaaccgcctcgccgccctcgagaagcgcaagcgctacgcagaggccgcggctgccaccgcctttcccacctccggtgcctccacattccctgcctacgacactgccgccgccgccgagtggaggctcgccaaatgcccaagaatcgccccgcccgcgcgccagttaccgtttgtaccgctgccccctcgtccttccccaccgccgctgccgccgactccgcctcagccgccggtggggttccaggttgtgctggaggtatgcggccccgacgagttctgggtggcggtggtgccggtagaaggcagggcctaccctggggaggccgagtgcctcggcgccgtccaggactgcctcgctgcggcttcggttgtacaatactctgcaacacagtcgctaagtcaaagcacacatcttcgtcctgtatttaagcttgtggactatggtgtggtgttgaaatgccttaagaaattacctggagcttctgtgcaagaaataccttctagcacaaagagaattattcagaatatacctaggtatcacgtccaaaagtgggcttctgatgaagaagtacatgagcttctcaagaaactgccacagcaaataaaagatgcgcttttacccttccaacttgaaggagtgatgtttgggcttcgaaggcgtggacgttgcctaattgcagatgagatggggctcggcaagactctccaggcgattgcaatagcatgctgtttcaaggacgagggctctatattaatagtatgtccagctgtattgcgttattcttgggcagaggaattggaacgctgggatccttcatttatgccaaaagatattcatattgtatttggtcgtcaagacagtcttgaacatctaaatgctactccaagggcagtgattatatcttaccagatgctaagtcgccttagagaaagtatggtgaatagaacatgggcactgatgattgttgatgaatcacataacatacgctgcacgaagaaactagaagaaaaatatgagacaaaagctgtgctacatctagcttcaaaaactgaacgcatcatattgctctcggggacaccctctttctcaagaccttttgatatctaccaccagataaatatgctatggccccacatgcttggtactgataaatttgattatgcgaaaaaatattgcttgctgcatgttgcacgaagttatcaggggaaaatgtttaaggacttctctaagggcacacggttgacagagttaaatgttttgctcagtcaaactgtcatgattaggcgactgaaggagcatttgttgaatgaactgccccccaagcggcgacaaattattaggttgaagctaaaggcaccagatatcagggcagccacatcttcatgcggcaaaagggtgaaccctaacagttgtaatggaactcttacaattgaattgcccagtaaaagcaatgatgatgaaaatacaaaagaggaagaagaagatgattgcaagaaatctccaaggagtctcaccccacaagagattggtatcgcaaagttatctggatttagtgaatggttctcaaatcatttcatcatgaatggatttgatgctaaccataacctggatccccagtctagctgtcagaaaacaataatatttgcacatcacttaaaggttctagatggaatacaggtgtttatctctgagaatgagatcagatttgttcgcattgatggaagcacacttcaaagggaaaggaaagaagctgttgattctttccgtttggatccagaggttgcaataattggaattactgctggtggtgttggcttagacttctcatctgctcagaatgttatttttgtggagctcccaaaatcagcttcagaattgcttcaggctgaggatagagctcatagacgtggccaaagaaatgcggtcaacatatatatattctgtggaaagaacacattggatgaatcacactggctccagttaaaccagagtctgttccgtgtctcgtctttgatgaatggaaaaaaggatgctgtaagggagattgaggttgatcaagtgtgccaacttgaagaaatcaaggacaccgaggaaacacaacgcaaactgcatcctttggagaatcataatgcagatttgacccacgtaccaaaaaaacttctggaaagtgatgatttgtccattgatggttttcttggcatcgaagatttggaatttgacttggatttcaccattaggacaattcctcttgaatttgaggatgaaaaccccggcacatccttgaaaaataatccaactccaacagtacttgaagacagatcttgtattgatgtttctctttcaccagctgcagtcttttgctctgtactatctagttgtaaatcaataaagtctcgtaagaggctttctggaaattctgggtccttgagtcaagctgcatctgttccagattttccaattcaagtggagtctctgcgttttgaggttagccggcacacaggacgaatccacttgtacagttgtgttcctggacatgattcaagacccaaaccactttgtgaaaattttctgccagaagaattgaattcacctttatgttctcccagtgatgttaaaacaagaactcttctcttgaaaaagattccttcattttgcaatgtgttcaatgcattcatcaaagagtggttggcactaagaccaattgatcaaaataaattgcttggaaagccattacaacttccgttgaaccttgagttgtgttttctgaaagatagcatcaatcatagcacagaagggatacttaaagggggaagtaagaggcgtgctgcatcattgaatgatgtcagtaatcctttgccagaaaatgctgaatggagacaggtggtgttgcgtaatggcacctgtaaagagagacagtacactcagggctggaccattgatgatgaacctctctgcaaactttgtcaaggactttgcaatggaaggcttgcaaagtcaccagaatattttgaagatctattctgtagtttagcttgtttccaggaatacagattaagaaccagtggcagggccctccggcaggcactgtttcaaatagaacgtggcaagtgctcccaatgcaagctcgattgttgcaagcttgtcaaacacattaaactcttacctttgggaaagcgagaagaatacatcagaaaggttgctccaaacattgcaagtagaaagaaactcctagataaacttgtccgtgaaccaattgatggaaatgcttggcatgcagatcacataatacctgtttataaaggaggaggggaatgtaaactcgagaacatgagaacactgtgtgtggcttgtcattatgaggtcaccagaactcagcacaaggaactaaaagaaataagaaagaaggctaaagagcacttgaaaaacgccttgaataaacaaaaggataaaccaagtgaagcaacagaagaactagatgacgaatcgttgctgatagctgtcccgggtagtgcctactccttaggatttcctggcaacggatctgatgaaaaggctgctgaatagggcatgtttcatttaccttgattattgttcaaaaagggcgctggtattttttagctcgcgtcctttttttgtacatgttaaatgctaccaagcgtttgtaagctgttcggctgctcttataagcagcactgataagcaacactattgcagctgcagagctagaattatctcacatttttgggcttgttcgttttgatgctaaaccatgtggattgagttggattg

SEQ ID NO: 67085 - DNA, 4237 bp, Zea Mays
tatttgcaattttgccgtgggggtaacccatggagatcacggaggagcagcggcgtcgcgccgaggccaaccgcctcgccgccctcgagaagcgcaagcgctacgcagaggccgcggctgccaccgcctttcccacctccggtgcctccacattccctgcctacgacactgccgccgccgccgagtggaggctcgccaaatgcccaagaatcgccccgcccgcgcgccagttaccgtttgtaccgctgccccctcgtccttccccaccgccgctgccgccgactccgcctcagccgccggtggggttccaggttgtgctggaggtatgcggccccgacgagttctgggtggcggtggtgccggtagaaggcagggcctaccctggggaggccgagtgcctcggcgccgtccaggactgcctcgctgcggcttcggttgtacaatactctgcaacacagtcgctaagtcaaagcacacatcttcgtcctgtatttaagcttgtggactatggtgtggtgttgaaatgccttaagaaattacctggagcttctgtgcaagaaataccttctagcacaaagagaattattcagaatatacctaggtatcacgtccaaaagtgggcttctgatgaagaagtacatgagcttctcaagaaactgccacagcaaataaaagatgcgcttttacccttccaacttgaaggagtgatgtttgggcttcgaaggcgtggacgttgcctaattgcagatgagatggggctcggcaagactctccaggcgattgcaatagcatgctgtttcaaggacgagggctctatattaatagtatgtccagctgtattgcgttattcttgggcagaggaattggaacgctgggatccttcatttatgccaaaagatattcatattgtatttggtcgtcaagacagtcttgaacatctaaatgctactccaagggcagtgattatatcttaccagatgctaagtcgccttagagaaagtatggtgaatagaacatgggcactgatgattgttgatgaatcacataacatacgctgcacgaagaaactagaagaaaaatatgagacaaaagctgtgctacatctagcttcaaaaactgaacgcatcatattgctctcggggacaccctctttctcaaggcgataatagaccttttgatatctaccaccagataaatatgctatggccccacatgcttggtactgataaatttgattatgcgaaaaaatattgcttgctgcatgttgcacgaagttatcaggggaaaatgtttaaggacttctctaagggcacacggttgacagagttaaatgttttgctcagtcaaactgtcatgattaggcgactgaaggagcatttgttgaatgaactgccccccaagcggcgacaaattattaggttgaagctaaaggcaccagatatcagggcagccacatcttcatgcggcaaaagggtgaaccctaacagttgtaatggaactcttacaattgaattgcccagtaaaagcaatgatgatgaaaatacaaaagaggaagaagaagatgattgcaagaaatctccaaggagtctcaccccacaagagattggtatcgcaaagttatctggatttagtgaatggttctcaaatcatttcatcatgaatggatttgatgctaaccataacctggatccccagtctagctgtcagaaaacaataatatttgcacatcacttaaaggttctagatggaatacaggtgtttatctctgagaatgagatcagatttgttcgcattgatggaagcacacttcaaagggaaaggaaagaagctgttgattctttccgtttggatccagaggtgaaggttgcaataattggaattactgctggtggtgttggcttagacttctcatctgctcagaatgttatttttgtggagctcccaaaatcagcttcagaattgcttcagaacacattggatgaatcacactggctccagttaaaccagagtctgttccgtgtctcgtctttgatgaatggaaaaaaggatgctgtaagggagattgaggttgatcaagtgtgccaacttgaagaaatcaaggacaccgaggaaacacaacgcaaactgcatcctttggagaatcataatgcagatttgacccacgtaccaaaaaaacttctggaaagtgatgatttgtccattgatggttttcttggcatcgaagatttggaatttgacttggatttcaccattaggacaattcctcttgaatttgaggatgaaaaccccggcacatccttgaaaaataatccaactccaacagtacttgaagacagatcttgtattgatgtttctctttcaccagctgcagtcttttgctctgtactatctagttgtaaatcaataaagtctcgtaagaggctttctggaaattctgggtccttgagtcaagctgcatctgttccagattttccaattcaagtggagtctctgcgttttgaggttagccggcacacaggacgaatccacttgtacagttgtgttcctggacatgattcaagacccaaaccactttgtgaaaattttctgccagaagaattgaattcacctttatgttctcccagtgatgttaaaacaagaactcttctcttgaaaaagattccttcattttgcaatgtgttcaatgcattcatcaaagagtggttggcactaagaccaattgatcaaaataaattgcttggaaagccattacaacttccgttgaaccttgagttgtgttttctgaaagatagcatcaatcatagcacagaagggatacttaaagggggaagtaagaggcgtgctgcatcattgaatgatgtcagtaatcctttgccagaaaatgctgaatggagacaggtggtgttgcgtaatggcacctgtaaagagagacagtacactcagggctggaccattgatgatgaacctctctgcaaactttgtcaaggactttgcaatggaaggcttgcaaagtcaccagaatattttgaagatctattctgtagtttagcttgtttccaggaatacagattaagaaccagtggcagggccctccggcaggcactgtttcaaatagaacgtggcaagtgctcccaatgcaagctcgattgttgcaagcttgtcaaacacattaaactcttacctttgggaaagcgagaagaatacatcagaaaggttgctccaaacattgcaagtagaaagaaactcctagataaacttgtccgtgaaccaattgatggaaatgcttggcatgcagatcacataatacctgtttataaaggaggaggggaatgtaaactcgagaacatgagaacactgtgtgtggcttgtcattatgaggtcaccagaactcagcacaaggaactaaaagaaataagaaagaaggctaaagagcacttgaaaaacgccttgaataaacaaaaggataaagttagtagtctctcctctagacttcaattatctttgaaccatttttgcaaataaaaaatagcaaatgttctttgagcaacgagcttctctgtgaaaactaatagaatgagtagaatggtttctccattactatatggtttacttatacaacagtgagtgtacatgtaaggaaaaaaagaattaaattgctctaatagtctaatgtcatctattgtaatcaatacatattgcacatgcatatatgatctgctattaggaccaaaaattgttgagatatgagaactagtaatggttaggatattgcctttcttacattctgggcaaccatatgcaaattatgtatcgttgtccccttttgtgtatttgtttctcctatacattagttttttgttgttgctattattccttcttctctttcctttcgttgtagccaagtgaagcaacagaagaactagatgacgaatcgttgctgatagctgtcccgggtagtgcctactccttaggatttcctggcaacggatctgatgaaaaggctgctgaatagggcatgtttcatttaccttgattattgttcaaaaagggcgctggtattttttagctcgcgtcctttttttgtacatgttaaatgctaccaagcgtttgtaagctgttcggctgctcttataagcagcactgataagcaacactattgcagctgcagagctagaattatctcacatttttgggcttgttcgttttgatgctaaaccatgtggattgagttggattg

SEQ ID NO: 67086 - DNA, 3797 bp, Zea Mays
tatttgcaattttgccgtgggggtaacccatggagatcacggaggagcagcggcgtcgcgccgaggccaaccgcctcgccgccctcgagaagcgcaagcgctacgcagaggccgcggctgccaccgcctttcccacctccggtgcctccacattccctgcctacgacactgccgccgccgccgagtggaggctcgccaaatgcccaagaatcgccccgcccgcgcgccagttaccgtttgtaccgctgccccctcgtccttccccaccgccgctgccgccgactccgcctcagccgccggtggggttccaggttgtgctggaggtatgcggccccgacgagttctgggtggcggtggtgccggtagaaggcagggcctaccctggggaggccgagtgcctcggcgccgtccaggactgcctcgctgcggcttcggttgtacaatactctgcaacacagtcgctaagtcaaagcacacatcttcgtcctgtatttaagcttgtggactatggtgtggtgttgaaatgccttaagaaattacctggagcttctgtgcaagaaataccttctagcacaaagagaattattcagaatatacctaggtatcacgtccaaaagtgggcttctgatgaagaagtacatgagcttctcaagaaactgccacagcaaataaaagatgcgcttttacccttccaacttgaaggagtgatgtttgggcttcgaaggcgtggacgttgcctaattgcagatgagatggggctcggcaagactctccaggcgattgcaatagcatgctgtttcaaggacgagggctctatattaatagtatgtccagctgtattgcgttattcttgggcagaggaattggaacgctgggatccttcatttatgccaaaagatattcatattgtatttggtcgtcaagacagtcttgaacatctaaatgctactccaagggcagtgattatatcttaccagatgctaagtcgccttagagaaagtatggtgaatagaacatgggcactgatgattgttgatgaatcacataacatacgctgcacgaagaaactagaagaaaaatatgagacaaaagctgtgctacatctagcttcaaaaactgaacgcatcatattgctctcggggacaccctctttctcaagaccttttgatatctaccaccagataaatatgctatggccccacatgcttggtactgataaatttgattatgcgaaaaaatattgcttgctgcatgttgcacgaagttatcaggggaaaatgtttaaggacttctctaagggcacacggttgacagagttaaatgttttgctcagtcaaactgtcatgattaggcgactgaaggagcatttgttgaatgaactgccccccaagcggcgacaaattattaggttgaagctaaaggcaccagatatcagggcagccacatcttcatgcggcaaaagggtgaaccctaacagttgtaatggaactcttacaattgaattgcccagtaaaagcaatgatgatgaaaatacaaaagaggaagaagaagatgattgcaagaaatctccaaggagtctcaccccacaagagattggtatcgcaaagttatctggatttagtgaatggttctcaaatcatttcatcatgaatggatttgatgctaaccataacctggatccccagtctagctgtcagaaaacaataatatttgcacatcacttaaaggttctagatggaatacaggtgtttatctctgagaatgagatcagatttgttcgcattgatggaagcacacttcaaagggaaaggaaagaagctgttgattctttccgtttggatccagaggtgaaggttgcaataattggaattactgctggtggtgttggcttagacttctcatctgctcagaatgttatttttgtggagctcccaaaatcagcttcagaattgcttcagaacacattggatgaatcacactggctccagttaaaccagagtctgttccgtgtctcgtctttgatgaatggaaaaaaggatgctgtaagggagattgaggttgatcaagtgtgccaacttgaagaaatcaaggacaccgaggaaacacaacgcaaactgcatcctttggagaatcataatgcagatttgacccacgtaccaaaaaaacttctggaaagtgatgatttgtccattgatggttttcttggcatcgaagatttggaatttgacttggatttcaccattaggacaattcctcttgaatttgaggatgaaaaccccggcacatccttgaaaaataatccaactccaacagtacttgaagacagatcttgtattgatgtttctctttcaccagctgcagtcttttgctctgtactatctagttgtaaatcaataaagtctcgtaagaggctttctggaaattctgggtccttgagtcaagctgcatctgttccagattttccaattcaagtggagtctctgcgttttgaggttagccggcacacaggacgaatccacttgtacagttgtgttcctggacatgattcaagacccaaaccactttgtgaaaattttctgccagaagaattgaattcacctttatgttctcccagtgatgttaaaacaagaactcttctcttgaaaaagattccttcattttgcaatgtgttcaatgcattcatcaaagagtggttggcactaagaccaattgatcaaaataaattgcttggaaagccattacaacttccgttgaaccttgagttgtgttttctgaaagatagcatcaatcatagcacagaagggatacttaaagggggaagtaagaggcgtgctgcatcattgaatgatgtcagtaatcctttgccagaaaatgctgaatggagacaggtggtgttgcgtaatggcacctgtaaagagagacagtacactcagggctggaccattgatgatgaacctctctgcaaactttgtcaaggactttgcaatggaaggcttgcaaagtcaccagaatattttgaagatctattctgtagtttagcttgtttccaggaatacagattaagaaccagtggcagggccctccggcaggcactgtttcaaatagaacgtggcaagtgctcccaatgcaagctcgattgttgcaagcttgtcaaacacattaaactcttacctttgggaaagcgagaagaatacatcagaaaggttgctccaaacattgcaagtagaaagaaactcctagataaacttgtccgtgaaccaattgatggaaatgcttggcatgcagatcacataatacctgtttataaaggaggaggggaatgtaaactcgagaacatgagaacactgtgtgtggcttgtcattatgaggtcaccagaactcagcacaaggaactaaaagaaataagaaagaaggctaaagagcacttgaaaaacgccttgaataaacaaaaggataaaccaagtgaagcaacagaagaactagatgacgaatcgttgctgatagctgtcccgggtagtgcctactccttaggatttcctggcaacggatctgatgaaaaggctgctgaatagggcatgtttcatttaccttgattattgttcaaaaagggcgctggtattttttagctcgcgtcctttttttgtacatgttaaatgctaccaagcgtttgtaagctgttcggctgctcttataagcagcactgataagcaacactattgcagctgcagagctagaattatctcacatttttgggcttgttcgttttgatgctaaaccatgtggattgagttggattg

SEQ ID NO: 67087 - DNA, 3363 bp, Zea Mays
gaaagatgggattcagtttttcatatgtttcaccagtatgctcttgtgcacttgatatttcctattttgtacaaggaccatatgtttagatgtttaaattatatctattattttctcattttcagtatttggtcgtcaagacagtcttgaacatctaaatgctactccaagggcagtgattatatcttaccagatgctaagtcgccttagagaaagtatggtgaatagaacatgggcactgatgattgttgatgaatcacataacatacgctgcacgaagaaactagaagaaaaatatgagttggcacttactatttattttctcctaggcgataatagaccttttgatatctaccaccagataaatatgctatggccccacatgcttggtactgataaatttgattatgcgaaaaaatattgcttgctgcatgttgcacgaagttatcaggggaaaatgtttaaggacttctctaagggcaattaggcgactgaaggagcatttgttgaatgaactgccccccaagcggcgacaaattattaggttgaagctaaaggcaccagatatcagggcagccacatcttcatgcggcaaaagggtgaaccctaacagttgtaatggaactcttacaattgaattgcccagtaaaagcaatgatgatgaaaatacaaaagaggaagaagaagatgattgcaagaaatctccaaggagtctcaccccacaagagattggtatcgcaaagttatctggatttagtgaatggttctcaaatcatttcatcatgaatggatttgatgctaaccataacctggatccccagtctagctgtcagaaaacaataatatttgcacatcacttaaaggttctagatggaatacaggtgtttatctctgagaatgagatcagatttgttcgcattgatggaagcacacttcaaagggaaaggaaagaagctgttgattctttccgtttggatccagaggtgaaggttgcaataattggaattactgctggtggtgttggcttagacttctcatctgctcagaatgttatttttgtggagctcccaaaatcagcttcagaattgcttcagaacacattggatgaatcacactggctccagttaaaccagagtctgttccgtgtctcgtctttgatgaatggaaaaaaggatgctgtaagggagattgaggttgatcaagtgtgccaacttgaagaaatcaaggacaccgaggaaacacaacgcaaactgcatcctttggagaatcataatgcagatttgacccacgtaccaaaaaaacttctggaaagtgatgatttgtccattgatggttttcttggcatcgaagatttggaatttgacttggatttcaccattaggacaattcctcttgaatttgaggatgaaaaccccggcacatccttgaaaaataatccaactccaacagtacttgaagacagatcttgtattgatgtttctctttcaccagctgcagtcttttgctctgtactatctagttgtaaatcaataaagtctcgtaagaggctttctggaaattctgggtccttgagtcaagctgcatctgttccagattttccaattcaagtggagtctctgcgttttgaggttagccggcacacaggacgaatccacttgtacagttgtgttcctggacatgattcaagacccaaaccactttgtgaaaattttctgccagaagaattgaattcacctttatgttctcccagtgatgttaaaacaagaactcttctcttgaaaaagattccttcattttgcaatgtgttcaatgcattcatcaaagagtggttggcactaagaccaattgatcaaaataaattgcttggaaagccattacaacttccgttgaaccttgagttgtgttttctgaaagatagcatcaatcatagcacagaagggatacttaaagggggaagtaagaggcgtgctgcatcattgaatgatgtcagtaatcctttgccagaaaatgctgaatggagacaggtggtgttgcgtaatggcacctgtaaagagagacagtacactcagggctggaccattgatgatgaacctctctgcaaactttgtcaaggactttgcaatggaaggcttgcaaagtcaccagaatattttgaagatctattctgtagtttagcttgtttccaggaatacagattaagaaccagtggcagggccctccggcaggcactgtttcaaatagaacgtggcaagtgctcccaatgcaagctcgattgttgcaagcttgtcaaacacattaaactcttacctttgggaaagcgagaagaatacatcagaaaggttgctccaaacattgcaagtagaaagaaactcctagataaacttgtccgtgaaccaattgatggaaatgcttggcatgcagatcacataatacctgtttataaaggaggaggggaatgtaaactcgagaacatgagaacactgtgtgtggcttgtcattatgaggtcaccagaactcagcacaaggaactaaaagaaataagaaagaaggctaaagagcacttgaaaaacgccttgaataaacaaaaggataaagttagtagtctctcctctagacttcaattatctttgaaccatttttgcaaataaaaaatagcaaatgttctttgagcaacgagcttctctgtgaaaactaatagaatgagtagaatggtttctccattactatatggtttacttatacaacagtgagtgtacatgtaaggaaaaaaagaattaaattgctctaatagtctaatgtcatctattgtaatcaatacatattgcacatgcatatatgatctgctattaggaccaaaaattgttgagatatgagaactagtaatggttaggatattgcctttcttacattctgggcaaccatatgcaaattatgtatcgttgtccccttttgtgtatttgtttctcctatacattagttttttgttgttgctattattccttcttctctttcctttcgttgtagccaagtgaagcaacagaagaactagatgacgaatcgttgctgatagctgtcccgggtagtgcctactccttaggatttcctggcaacggatctgatgaaaaggctgctgaatagggcatgtttcatttaccttgattattgttcaaaaagggcgctggtattttttagctcgcgtcctttttttgtacatgttaaatgctaccaagcgtttgtaagctgttcggctgctcttataagcagcactgataagcaacactattgcagctgcagagctagaattatctcacatttttgggcttgttcgttttgatgctaaaccatgtggattgagttggattg

SEQ ID NO: 67088 - DNA, 2989 bp, Zea Mays
gaaagatgggattcagtttttcatatgtttcaccatatttggtcgtcaagacagtcttgaacatctaaatgctactccaagggcagtgattatatcttaccagatgctaagtcgccttagagaaagtatggtgaatagaacatgggcactgatgattgttgatgaatcacataacatacgctgcacgaagaaactagaagaaaaatatgagacaaaagctgtgctacatctagcttcaaaaactgaacgcatcatattgctctcggggacaccctctttctcaagaccttttgatatctaccaccagataaatatgctatggccccacatgcttggtactgataaatttgattatgcgaaaaaatattgcttgctgcatgttgcacgaagttatcaggggaaaatgtttaaggacttctctaagggcacacggttgacagagttaaatgttttgctcagtcaaactgtcatgattaggcgactgaaggagcatttgttgaatgaactgccccccaagcggcgacaaattattaggttgaagctaaaggcaccagatatcagggcagccacatcttcatgcggcaaaagggtgaaccctaacagttgtaatggaactcttacaattgaattgcccagtaaaagcaatgatgatgaaaatacaaaagaggaagaagaagatgattgcaagaaatctccaaggagtctcaccccacaagagattggtatcgcaaagttatctggatttagtgaatggttctcaaatcatttcatcatgaatggatttgatgctaaccataacctggatccccagtctagctgtcagaaaacaataatatttgcacatcacttaaaggttctagatggaatacaggtgtttatctctgagaatgagatcagatttgttcgcattgatggaagcacacttcaaagggaaaggaaagaagctgttgattctttccgtttggatccagaggtgaaggttgcaataattggaattactgctggtggtgttggcttagacttctcatctgctcagaatgttatttttgtggagctcccaaaatcagcttcagaattgcttcaggctgaggatagagctcatagacgtggccaaagaaatgcggtcaacatatatatattctgtggaaagaacacattggatgaatcacactggctccagttaaaccagagtctgttccgtgtctcgtctttgatgaatggaaaaaaggatgctgtaagggagattgaggttgatcaagtgtgccaacttgaagaaatcaaggacaccgaggaaacacaacgcaaactgcatcctttggagaatcataatgcagatttgacccacgtaccaaaaaaacttctggaaagtgatgatttgtccattgatggttttcttggcatcgaagatttggaatttgacttggatttcaccattaggacaattcctcttgaatttgaggatgaaaaccccggcacatccttgaaaaataatccaactccaacagtacttgaagacagatcttgtattgatgtttctctttcaccagctgcagtcttttgctctgtactatctagttgtaaatcaataaagtctcgtaagaggctttctggaaattctgggtccttgagtcaagctgcatctgttccagattttccaattcaagtggagtctctgcgttttgaggttagccggcacacaggacgaatccacttgtacagttgtgttcctggacatgattcaagacccaaaccactttgtgaaaattttctgccagaagaattgaattcacctttatgttctcccagtgatgttaaaacaagaactcttctcttgaaaaagattccttcattttgcaatgtgttcaatgcattcatcaaagagtggttggcactaagaccaattgatcaaaataaattgcttggaaagccattacaacttccgttgaaccttgagttgtgttttctgaaagatagcatcaatcatagcacagaagggatacttaaagggggaagtaagaggcgtgctgcatcattgaatgatgtcagtaatcctttgccagaaaatgctgaatggagacaggtggtgttgcgtaatggcacctgtaaagagagacagtacactcagggctggaccattgatgatgaacctctctgcaaactttgtcaaggactttgcaatggaaggcttgcaaagtcaccagaatattttgaagatctattctgtagtttagcttgtttccaggaatacagattaagaaccagtggcagggccctccggcaggcactgtttcaaatagaacgtggcaagtgctcccaatgcaagctcgattgttgcaagcttgtcaaacacattaaactcttacctttgggaaagcgagaagaatacatcagaaaggttgctccaaacattgcaagtagaaagaaactcctagataaacttgtccgtgaaccaattgatggaaatgcttggcatgcagatcacataatacctgtttataaaggaggaggggaatgtaaactcgagaacatgagaacactgtgtgtggcttgtcattatgaggtcaccagaactcagcacaaggaactaaaagaaataagaaagaaggctaaagagcacttgaaaaacgccttgaataaacaaaaggataaaccaagtgaagcaacagaagaactagatgacgaatcgttgctgatagctgtcccgggtagtgcctactccttaggatttcctggcaacggatctgatgaaaaggctgctgaatagggcatgtttcatttaccttgattattgttcaaaaagggcgctggtattttttagctcgcgtcctttttttgtacatgttaaatgctaccaagcgtttgtaagctgttcggctgctcttataagcagcactgataagcaacactattgcagctgcagagctagaattatctcacatttttgggcttgttcgttttgatgctaaaccatgtggattgagttggattg

SEQ ID NO: 67089 - DNA, 3014 bp, Zea Mays
gaaagatgggattcagtttttcatatgtttcaccagtatgctcttgtgcacttgatatttcctattttgtacaaggaccatatgtttagatgtttaaattatatctattattttctcattttcagtatttggtcgtcaagacagtcttgaacatctaaatgctactccaagggcagtgattatatcttaccagatgctaagtcgccttagagaaagtatggtgaatagaacatgggcactgatgattgttgatgaatcacataacatacgctgcacgaagaaactagaagaaaaatatgagacaaaagctgtgctacatctagcttcaaaaactgaacgcatcatattgctctcggggacaccctctttctcaaggcgataatagaccttttgatatctaccaccagataaatatgctatggccccacatgcttggtactgataaatttgattatgcgaaaaaatattgcttgctgcatgttgcacgaagttatcaggggaaaatgtttaaggacttctctaagggcacacggttgacagagttaaatgttttgctcagtcaaactgtcatgattaggcgactgaaggagcatttgttgaatgaactgccccccaagcggcgacaaattattaggttgaagctaaaggcaccagatatcagggcagccacatcttcatgcggcaaaagggtgaaccctaacagttgtaatggaactcttacaattgaattgcccagtaaaagcaatgatgatgaaaatacaaaagaggaagaagaagatgattgcaagaaatctccaaggagtctcaccccacaagagattggtatcgcaaagttatctggatttagtgaatggttctcaaatcatttcatcatgaatggatttgatgctaaccataacctggatccccagtctagctgtcagaaaacaataatatttgcacatcacttaaaggttctagatggaatacaggtgtttatctctgagaatgagatcagatttgttcgcattgatggaagcacacttcaaagggaaaggaaagaagctgttgattctttccgtttggatccagaggtgaaggttgcaataattggaattactgctggtggtgttggcttagacttctcatctgctcagaatgttatttttgtggagctcccaaaatcagcttcagaattgcttcagaacacattggatgaatcacactggctccagttaaaccagagtctgttccgtgtctcgtctttgatgaatggaaaaaaggatgctgtaagggagattgaggttgatcaagtgtgccaacttgaagaaatcaaggacaccgaggaaacacaacgcaaactgcatcctttggagaatcataatgcagatttgacccacgtaccaaaaaaacttctggaaagtgatgatttgtccattgatggttttcttggcatcgaagatttggaatttgacttggatttcaccattaggacaattcctcttgaatttgaggatgaaaaccccggcacatccttgaaaaataatccaactccaacagtacttgaagacagatcttgtattgatgtttctctttcaccagctgcagtcttttgctctgtactatctagttgtaaatcaataaagaggctttctggaaattctgggtccttgagtcaagctgcatctgttccagattttccaattcaagtggagtctctgcgttttgaggttagccggcacacaggacgaatccacttgtacagttgtgttcctggacatgattcaagacccaaaccactttgtgaaaattttctgccagaagaattgaattcacctttatgttctcccagtgatgttaaaacaagaactcttctcttgaaaaagattccttcattttgcaatgtgttcaatgcattcatcaaagagtggttggcactaagaccaattgatcaaaataaattgcttggaaagccattacaacttccgttgaaccttgagttgtgttttctgaaagatagcatcaatcatagcacagaagggatacttaaagggggaagtaagaggcgtgctgcatcattgaatgatgtcagtaatcctttgccagaaaatgctgaatggagacaggtggtgttgcgtaatggcacctgtaaagagagacagtacactcagggctggaccattgatgatgaacctctctgcaaactttgtcaaggactttgcaatggaaggcttgcaaagtcaccagaatattttgaagatctattctgtagtttagcttgtttccaggaatacagattaagaaccagtggcagggccctccggcaggcactgtttcaaatagaacgtggcaagtgctcccaatgcaagctcgattgttgcaagcttgtcaaacacattaaactcttacctttgggaaagcgagaagaatacatcagaaaggttgctccaaacattgcaagtagaaagaaactcctagataaacttgtccgtgaaccaattgatggaaatgcttggcatgcagatcacataatacctgtttataaaggaggaggggaatgtaaactcgagaacatgagaacactgtgtgtggcttgtcattatgaggtcaccagaactcagcacaaggaactaaaagaaataagaaagaaggctaaagagcacttgaaaaacgccttgaataaacaaaaggataaaccaagtgaagcaacagaagaactagatgacgaatcgttgctgatagctgtcccgggtagtgcctactccttaggatttcctggcaacggatctgatgaaaaggctgctgaatagggcatgtttcatttaccttgattattgttcaaaaagggcgctggtattttttagctcgcgtcctttttttgtacatgttaaatgctaccaagcgtttgtaagctgttcggctgctcttataagcagcactgataagcaacactattgcagctgcagagctagaattatctcacatttttgggcttgttcgttttgatgctaaaccatgtggattgagttggattg

SEQ ID NO: 67090 - DNA, 2624 bp, Zea Mays
gaaagatgggattcagtttttcatatgtttcaccatatttggtcgtcaagacagtcttgaacatctaaatgctactccaagggcagtgattatatcttaccagatgctaagtcgccttagagaaagtatggtgaatagaacatgggcactgatgattgttgatgaatcacataacatacgctgcacgaagaaactagaagaaaaatatgagacaaaagctgtgctacatctagcttcaaaaactgaacgcatcatattgctctcggggacaccctctttctcaaggcgataatagaccttttgatatctaccaccagataaatatgctatggccccacatgcttggtactgataaatttgattatgcgaaaaaatattgcttgctgcatgttgcacgaagttatcaggggaaaatgtttaaggacttctctaagggcacacggttgacagagttaaatgttttgctcagtcaaactgtcatgattaggcgactgaaggagcatttgttgaatgaactgccccccaagcggcgacaaattattaggttgaagctaaaggcaccagatatcagggcagccacatcttcatgcggcaaaagggtgaaccctaacagttgtaatggaactcttacaattgaattgcccagtaaaagcaatgatgatgaaaatacaaaagaggaagaagaagatgattgcaagaaatctccaaggagtctcaccccacaagagattggtatcgcaaagttatctggatttagtgaatggttctcaaatcatttcatcatgaatggatttgatgctaaccataacctggatccccagtctagctgtcagaaaacaataatatttgcacatcacttaaaggttctagatggaatacaggtgtttatctctgagaatgagatcagatttgttcgcattgatggaagcacacttcaaagggaaaggaaagaagctgttgattctttccgtttggatccagaggtgaaggttgcaataattggaattactgctggtggtgttggcttagacttctcatctgctcagaatgttatttttgtggagctcccaaaatcagcttcagaattgcttcagaacacattggatgaatcacactggctccagttaaaccagagtctgttccgtgtctcgtctttgatgaatggaaaaaaggatgctgtaagggagattgaggttgatcaagtgtgccaacttgaagaaatcaaggacaccgaggaaacacaacgcaaactgcatcctttggagaatcataatgcagatttgacccacgtaccaaaaaaacttctggaaagtgatgatttgtccattgatggttttcttggcatcgaagatttggaatttgacttggatttcaccattaggacaattcctcttgaatttgaggatgaaaaccccggcacatccttgaaaaataatccaactccaacagtacttgaagacagatcttgtattgatgtttctctttcaccagctgcagtcttttgctctgtactatctagttgtaaatcaataaagtctcgtaagaggctttctggaaattctgggtccttgagtcaagctgcatctgttccagattttccaattcaagtggagtctctgcgttttgaggggatacttaaagggggaagtaagaggcgtgctgcatcattgaatgatgtcagtaatcctttgccagaaaatgctgaatggagacaggtggtgttgcgtaatggcacctgtaaagagagacagtacactcagggctggaccattgatgatgaacctctctgcaaactttgtcaaggactttgcaatggaaggcttgcaaagtcaccagaatattttgaagatctattctgtagtttagcttgtttccaggaatacagattaagaaccagtggcagggccctccggcaggcactgtttcaaatagaacgtggcaagtgctcccaatgcaagctcgattgttgcaagcttgtcaaacacattaaactcttacctttgggaaagcgagaagaatacatcagaaaggttgctccaaacattgcaagtagaaagaaactcctagataaacttgtccgtgaaccaattgatggaaatgcttggcatgcagatcacataatacctgtttataaaggaggaggggaatgtaaactcgagaacatgagaacactgtgtgtggcttgtcattatgaggtcaccagaactcagcacaaggaactaaaagaaataagaaagaaggctaaagagcacttgaaaaacgccttgaataaacaaaaggataaaccaagtgaagcaacagaagaactagatgacgaatcgttgctgatagctgtcccgggtagtgcctactccttaggatttcctggcaacggatctgatgaaaaggctgctgaatagggcatgtttcatttaccttgattattgttcaaaaagggcgctggtattttttagctcgcgtcctttttttgtacatgttaaatgctaccaagcgtttgtaagctgttcggctgctcttataagcagcactgataagcaacactattgcagctgcagagctagaattatctcacatttttgggcttgttcgttttgatgctaaaccatgtggattgagttggattg

SEQ ID NO: 67091 - DNA, 2999 bp, Zea Mays
gaaagatgggattcagtttttcatatgtttcaccatatttggtcgtcaagacagtcttgaacatctaaatgctactccaagggcagtgattatatcttaccagatgctaagtcgccttagagaaagtatggtgaatagaacatgggcactgatgattgttgatgaatcacataacatacgctgcacgaagaaactagaagaaaaatatgagacaaaagctgtgctacatctagcttcaaaaactgaacgcatcatattgctctcggggacaccctctttctcaaggcgataatagaccttttgatatctaccaccagataaatatgctatggccccacatgcttggtactgataaatttgattatgcgaaaaaatattgcttgctgcatgttgcacgaagttatcaggggaaaatgtttaaggacttctctaagggcacacggttgacagagttaaatgttttgctcagtcaaactgtcatgattaggcgactgaaggagcatttgttgaatgaactgccccccaagcggcgacaaattattaggttgaagctaaaggcaccagatatcagggcagccacatcttcatgcggcaaaagggtgaaccctaacagttgtaatggaactcttacaattgaattgcccagtaaaagcaatgatgatgaaaatacaaaagaggaagaagaagatgattgcaagaaatctccaaggagtctcaccccacaagagattggtatcgcaaagttatctggatttagtgaatggttctcaaatcatttcatcatgaatggatttgatgctaaccataacctggatccccagtctagctgtcagaaaacaataatatttgcacatcacttaaaggttctagatggaatacaggtgtttatctctgagaatgagatcagatttgttcgcattgatggaagcacacttcaaagggaaaggaaagaagctgttgattctttccgtttggatccagaggtgaaggttgcaataattggaattactgctggtggtgttggcttagacttctcatctgctcagaatgttatttttgtggagctcccaaaatcagcttcagaattgcttcaggctgaggatagagctcatagacgtggccaaagaaatgcggtcaacatatatatattctgtggaaagaacacattggatgaatcacactggctccagttaaaccagagtctgttccgtgtctcgtctttgatgaatggaaaaaaggatgctgtaagggagattgaggttgatcaagtgtgccaacttgaagaaatcaaggacaccgaggaaacacaacgcaaactgcatcctttggagaatcataatgcagatttgacccacgtaccaaaaaaacttctggaaagtgatgatttgtccattgatggttttcttggcatcgaagatttggaatttgacttggatttcaccattaggacaattcctcttgaatttgaggatgaaaaccccggcacatccttgaaaaataatccaactccaacagtacttgaagacagatcttgtattgatgtttctctttcaccagctgcagtcttttgctctgtactatctagttgtaaatcaataaagtctcgtaagaggctttctggaaattctgggtccttgagtcaagctgcatctgttccagattttccaattcaagtggagtctctgcgttttgaggttagccggcacacaggacgaatccacttgtacagttgtgttcctggacatgattcaagacccaaaccactttgtgaaaattttctgccagaagaattgaattcacctttatgttctcccagtgatgttaaaacaagaactcttctcttgaaaaagattccttcattttgcaatgtgttcaatgcattcatcaaagagtggttggcactaagaccaattgatcaaaataaattgcttggaaagccattacaacttccgttgaaccttgagttgtgttttctgaaagatagcatcaatcatagcacagaagggatacttaaagggggaagtaagaggcgtgctgcatcattgaatgatgtcagtaatcctttgccagaaaatgctgaatggagacaggtggtgttgcgtaatggcacctgtaaagagagacagtacactcagggctggaccattgatgatgaacctctctgcaaactttgtcaaggactttgcaatggaaggcttgcaaagtcaccagaatattttgaagatctattctgtagtttagcttgtttccaggaatacagattaagaaccagtggcagggccctccggcaggcactgtttcaaatagaacgtggcaagtgctcccaatgcaagctcgattgttgcaagcttgtcaaacacattaaactcttacctttgggaaagcgagaagaatacatcagaaaggttgctccaaacattgcaagtagaaagaaactcctagataaacttgtccgtgaaccaattgatggaaatgcttggcatgcagatcacataatacctgtttataaaggaggaggggaatgtaaactcgagaacatgagaacactgtgtgtggcttgtcattatgaggtcaccagaactcagcacaaggaactaaaagaaataagaaagaaggctaaagagcacttgaaaaacgccttgaataaacaaaaggataaaccaagtgaagcaacagaagaactagatgacgaatcgttgctgatagctgtcccgggtagtgcctactccttaggatttcctggcaacggatctgatgaaaaggctgctgaatagggcatgtttcatttaccttgattattgttcaaaaagggcgctggtattttttagctcgcgtcctttttttgtacatgttaaatgctaccaagcgtttgtaagctgttcggctgctcttataagcagcactgataagcaacactattgcagctgcagagctagaattatctcacatttttgggcttgttcgttttgatgctaaaccatgtggattgagttggattg

SEQ ID NO: 67092 - DNA, 2614 bp, Zea Mays
ctttctcaaggcgataatagaccttttgatatctaccaccagataaatatgctatggccccacatgcttggtactgataaatttgattatgcgaaaaaatattgcttgctgcatgttgcacgaagttatcaggggaaaatgtttaaggacttctctaagggcaattaggcgactgaaggagcatttgttgaatgaactgccccccaagcggcgacaaattattaggttgaagctaaaggcaccagatatcagggcagccacatcttcatgcggcaaaagggtgaaccctaacagttgtaatggaactcttacaattgaattgcccagtaaaagcaatgatgatgaaaatacaaaagaggaagaagaagatgattgcaagaaatctccaaggagtctcaccccacaagagattggtatcgcaaagttatctggatttagtgaatggttctcaaatcatttcatcatgaatggatttgatgctaaccataacctggatccccagtctagctgtcagaaaacaataatatttgcacatcacttaaaggttctagatggaatacaggtgtttatctctgagaatgagatcagatttgttcgcattgatggaagcacacttcaaagggaaaggaaagaagctgttgattctttccgtttggatccagaggtgaaggttgcaataattggaattactgctggtggtgttggcttagacttctcatctgctcagaatgttatttttgtggagctcccaaaatcagcttcagaattgcttcagaacacattggatgaatcacactggctccagttaaaccagagtctgttccgtgtctcgtctttgatgaatggaaaaaaggatgctgtaagggagattgaggttgatcaagtgtgccaacttgaagaaatcaaggacaccgaggaaacacaacgcaaactgcatcctttggagaatcataatgcagatttgacccacgtaccaaaaaaacttctggaaagtgatgatttgtccattgatggttttcttggcatcgaagatttggaatttgacttggatttcaccattaggacaattcctcttgaatttgaggatgaaaaccccggcacatccttgaaaaataatccaactccaacagtacttgaagacagatcttgtattgatgtttctctttcaccagctgcagtcttttgctctgtactatctagttgtaaatcaataaagtctcgtaagaggctttctggaaattctgggtccttgagtcaagctgcatctgttccagattttccaattcaagtggagtctctgcgttttgaggttagccggcacacaggacgaatccacttgtacagttgtgttcctggacatgattcaagacccaaaccactttgtgaaaattttctgccagaagaattgaattcacctttatgttctcccagtgatgttaaaacaagaactcttctcttgaaaaagattccttcattttgcaatgtgttcaatgcattcatcaaagagtggttggcactaagaccaattgatcaaaataaattgcttggaaagccattacaacttccgttgaaccttgagttgtgttttctgaaagatagcatcaatcatagcacagaagggatacttaaagggggaagtaagaggcgtgctgcatcattgaatgatgtcagtaatcctttgccagaaaatgctgaatggagacaggtggtgttgcgtaatggcacctgtaaagagagacagtacactcagggctggaccattgatgatgaacctctctgcaaactttgtcaaggactttgcaatggaaggcttgcaaagtcaccagaatattttgaagatctattctgtagtttagcttgtttccaggaatacagattaagaaccagtggcagggccctccggcaggcactgtttcaaatagaacgtggcaagtgctcccaatgcaagctcgattgttgcaagcttgtcaaacacattaaactcttacctttgggaaagcgagaagaatacatcagaaaggttgctccaaacattgcaagtagaaagaaactcctagataaacttgtccgtgaaccaattgatggaaatgcttggcatgcagatcacataatacctgtttataaaggaggaggggaatgtaaactcgagaacatgagaacactgtgtgtggcttgtcattatgaggtcaccagaactcagcacaaggaactaaaagaaataagaaagaaggctaaagagcacttgaaaaacgccttgaataaacaaaaggataaaccaagtgaagcaacagaagaactagatgacgaatcgttgctgatagctgtcccgggtagtgcctactccttaggatttcctggcaacggatctgatgaaaaggctgctgaatagggcatgtttcatttaccttgattattgttcaaaaagggcgctggtattttttagctcgcgtcctttttttgtacatgttaaatgctaccaagcgtttgtaagctgttcggctgctcttataagcagcactgataagcaacactattgcagctgcagagctagaattatctcacatttttgggcttgttcgttttgatgctaaaccatgtggattgagttggattg

SEQ ID NO: 67093 - DNA, 934 bp, Zea Mays
cgtagcagctgcagctcttgagctttctctcgctcctgagtgcagtctctctctctgcgccctgcgctctgcgccgccgccatggaggacgacgatgactgccctcctctcgccgttgagctccctccgcgggtgccgtcccctccagagcaatctccctcagacgcctcgccagttggcatcaccgtcatcaccggctacctcggggctggcaagtcgacgctagtcaactacattctgaatgagcaacatgggaagagaattgccgtgatactaaatgagtttggagaggaaattggggtcgagagggcgatgatcaatgaggggcaaggtggtgcacttatcgaggaatgggtggagctggccaatggatgtgtctgttgctctgtaaaacacagtctggttcaagcacttgagcagcttgtgcagagaaaggatagaatggatcatatattacttgagacaacagggttggccgatcctgctccacttgtttctgttctttggctagacgatcaattggagtcgtcaattgtgctggattctattattacggttattgatgcaaaaaacttcagggttcagattgacgagcacaaaaactcttcctcattccctgaagcatttcatcaaattgcatttgcggatgttgtgatattgaacaaaattgacctagtggaagacagtcttgaggatctggaaaaacatattcgtgatgtgaatgctctggttacagtggtgcggtccgtccgttgccaggttgacttgaatgaagtatttaaccggcaagcatatggtgccaaggtggagtcttggcttgaagatcttctttgggaaaagaaatctattatggacatatatcgctgtaaagggattttatatatccatgattcagaccaagttcatacattacagggattgtcagtactgatgt

SEQ ID NO: 67094 - DNA, 1371 bp, Zea Mays
cagctcttgagctttctctcgctcctgagtgcagtctctctctctgcgccctgcgctctgcgccgccgccatggaggacgacgatgactgccctcctctcgccgttgagctccctccgcgggtgccgtcccctccagagcaatctccctcagacgcctcgccagttggcatcaccgtcatcaccggctacctcggggctggcaagtcgacgctagtcaactacattctgaatgagcaacatgggaagagaattgccgtgatactaaatgagtttggagaggaaattggggtcgagagggcgatgatcaatgaggggcaaggtggtgcacttatcgaggaatgggtggagctggccaatggatgtgtctgttgctctgtaaaacacagtctggttcaagcacttgagcagcttgtgcagagaaaggatagaatggatcatatattacttgagacaacagggttggccgatcctgctccacttgtttctgttctttggctagacgatcaattggagtcgtcaattgtgctggattctattattacggttattgatgcaaaaaacttcagggttcagattgacgagcacaaaaactcttcctcattccctgaagcatttcatcaaattgcatttgcggatgttgtgatattgaacaaaattgacctagtggaagacagtcttgaggatctggaaaaacatattcgtgatgtgaatgctctggttacagtggtgcggtccgtccgttgccaggttgacttgaatgaagtatttaaccggcaagcatatggtgccaagaattcatctcatctgcaagaactgctggactatagtaaatcagtgccacctagtcgccgtcatgataacagtatttccaccttgtgcatctatgaacaggattctgttaacttggctaaggtggagtcttggcttgaagatcttctttgggaaaagaaatctattatggacatatatcgctgtaaagggattttatatatccatgattcagaccaagttcatacattacaggcagtgagggaggtctatgaagttgtgccggctcgaaaatggtctgagacagagtctcgcatgaacaagatagttgtcataggccgcaatctggatatcaatgtacttcaagattcttttagtggttgcaagagctgataatgagtatctgtttgccttgcacaatgttagttggccatttttctgtgaggtacctctgtgcaagtgaatactgaattggaggagaatcttaggtacggtacggtgatggaaaattgaaatttgggcgaagtaggaactgtgatgtgttaggcgaattttcctcggtgaattggtggcttcatttgtggtgtgtggtccgtgttctg

SEQ ID NO: 67095 - DNA, 2209 bp, Zea Mays
attcgtgatcccatcacaccagccgccgtcttctccctcactccgccacgccactaaaaccctaatccctcgccgccatggctgcggcggcggccgccacctcgctcctcatacgccacaaccgcaacccccacctcctcctcctccgcgccgcgatctcctcctcccgcgcactgtcccagcagccggagctgtctcctgacccgaccaccggcgcccccgaccccgccggcgccgccccactccccccaaaccccagcacggggagccccttatacagccagaactggcgcaaccccgccgcagccaacccgccctcttcgcttctgcccaccgtcgccgccggcagctccttcggagcgcagcaccgcatggccgccttctacgataagcccgacgccgcggggctcaaggaaacgtttgccaagtatatggcggagcagcggtgggaggacatgaagcttctgttcgaccactgggtgcgctccctcgacgccgccacggggaagcccaaccaccccgacgtcgacctattcaatcactacctccgcgccaacctcatgacgggtgccgtaccgcacgagatgctcgatctcgccgatcacatgcgcgagttcgagctcgagcccaacagtgcatcgtacaacctcgtgctcaagagcatggtcgccgataaggagtcctacggcgccgagaagctcattgaacggatgctgcaaacaggaacagttccagatgaagaatcctacaatttggttgtaggcctgcttattagacagaaccttgttgactcatctctgaagtatttggatctgatgcttaaatcgggctacacgccatcactaactgttttcactgattatatccaagcatgtgtcagatctgggaggttggacacgttgacatcaattatacagaaatgcaagacagctgataagatcaaagttttgtgtccacaatgggcctggtgcattgacatatcagaagctgcatttgaagctaacaatagcaaattagctctttttgctctggaatttcttgcaagatggattgttcgtggtgagaatgttaaacctcctgttcagctgtcagttaatgaaggtcttgtaatatcagctctgagtgctgctggcagaacttttagtactgacctcttgaatgctgcttggtcgctactacggaagtccctgcgccagaaaagggcacccaccccagagacatatcttgccaagatctatgctcattcatcaattggccagcttcaaagggcttttggtacattgcatgaatttgaaaatgcctatgggaactccaaggacgttgatttagagctcttctcaccatttacgtccttgcatcctcttgttgttgcttgctgcaaagatggctttagcacattggatttggtacattcacatatcacatgttatacatgatccattaagttggtcatttgtacttttattttgcaaaagtactccctatgttccaaattgtgtatgttcagttggagaatctgagtcatgcagatccaccttacaaatctgttgcggctctcaactgtgttatattagggtgtgcaaacatttgggacattaatcgagcttatgaaacttttgtggctattaaggaaaaatttgaactcagtcctgacatccattcatacaatgcccttctgtgtgcatttgggaagttgaaacagacaggagaagcatgtaatgtgttccagcatgtattaactcttggtgttaagccaaatgcaacaacatactcccggcttgtcgatgcccatcttgcaaacaaagatccaaaagctgctcttgccataattgatgagatggttgatgctggcttcactccttccaaggataccctcaggaaggttcgaagacggtgctctcgtgagtcagactttgacagtgacgagaaagtccaatccctggctaagcagttcaactaccgaatgggtggtgagaatcgaagagagatgctttatagcatagaatacaatcctgtgtactgaagcggcagtttctactgagtttgctggtcgttgggagagcacggacattgtagcttatttatcctacggtccaacttatcctgttacacacaatggaagagtctttatctcctctcgatcgttgcctataaaagaaggacatcaccccgaacagagagggcatatgcgaggaaggtagcaacccta

SEQ ID NO: 67096 - DNA, 1734 bp, Zea Mays
cttttgtgacactgggatgtggttgattctgacgattgttgtcaagtctggatgctgcaaacaggaacagttccagatgaagaatcctacaatttggttgtaggcctgcttattagacagaaccttgttgactcatctctgaagtatttggatctgatgcttaaatcgggctacacgccatcactaactgttttcactgattatatccaagcatgtgtcagatctgggaggttggacacgttgacatcaattatacagaaatgcaagacagctgataagatcaaagttttgtgtccacaatgggcctggtgcattgacatatcagaagctgcatttgaagctaacaatagcaaattagctctttttgctctggaatttcttgcaagatggattgttcgtggtgagaatgttaaacctcctgttcagctgtcagttaatgaaggtcttgtaatatcagctctgagtgctgctggcagaacttttagtactgacctcttgaatgctgcttggtcgctactacggaagtccctgcgccagaaaagggcacccaccccagagacatatcttgccaagatctatgctcattcatcaattggccagcttcaaagggcttttggtacattgcatgaatttgaaaatgcctatgggaactccaaggacgttgatttagagctcttctcaccatttacgtccttgcatcctcttgttgttgcttgctgcaaagatggctttagcacattggatttggtacattcacatatcacatgttatacatgatccattaagttggtcatttgtacttttattttgcaaaagtactccctatgttccaaattgtgtatgttcagttggagaatctgagtcatgcagatccaccttacaaatctgttgcggctctcaactgtgttatattagggtgtgcaaacatttgggacattaatcgagcttatgaaacttttgtggctattaaggaaaaatttgaactcagtcctgacatccattcatacaatgcccttctgtgtgcatttgggaagttgaaacagacaggagaagcatgtaatgtgttccagcatgtattaactcttggtgttaagccaaatgcaacaacatactcccggcttgtcgatgcccatcttgcaaacaaagatccaaaagctgctcttgccataattgatgagatggttgatgctggcttcactccttccaaggataccctcaggaaggttcgaagacggtgctctcgtgagtcagactttgacagtgacgagaaagtccaatccctggctaagcagttcaactaccgaatgggtggtgagaatcgaagagagatgctttatagcatagaatacaatcctgtgtactgaagcggcagtttctactgagtttgctggtcgttgggagagcacggacattgtagcttgtaaattacttgaacgcaccaggattcttaagcaatattcagtttctcaatcattatttttgctcgcagggttgatgttaggacttgctaataagctgcatactatttgtttgcttgagaatccgaaaatgtcagttctttttcataaattgtagcatctgcgtggccccacttcttacgtgactcctaggtgttttcggctttgtttacacttgtaactaacgaagaagtcctgggatgactgggtcgcagcttcttcaaaagatgctattcttattatggaaatttaatggagactgacaatttaaagtcac

SEQ ID NO: 67097 - DNA, 1620 bp, Zea Mays
attctgacgattgttgtcaagtctggatgctgcaaacaggaacagttccagatgaagaatcctacaatttggttgtaggcctgcttattagacagaaccttgttgactcatctctgaagtatttggatctgatgcttaaatcgggctacacgccatcactaactgttttcactgattatatccaagcatgtgtcagatctgggaggttggacacgttgacatcaattatacagaaatgcaagacagctgataagatcaaagttttgtgtccacaatgggcctggtgcattgacatatcagaagctgcatttgaagctaacaatagcaaattagctctttttgctctggaatttcttgcaagatggattgttcgtggtgagaatgttaaacctcctgttcagctgtcagttaatgaaggtcttgtaatatcagctctgagtgctgctggcagaacttttagtactgacctcttgaatgctgcttggtcgctactacggaagtccctgcgccagaaaagggcacccaccccagagacatatcttgccaagatctatgctcattcatcaattggccagcttcaaagggcttttggtacattgcatgaatttgaaaatgcctatgggaactccaaggacgttgatttagagctcttctcaccatttacgtccttgcatcctcttgttgttgcttgctgcaaagatggctttagcacattggatttggtgtatgttcagttggagaatctgagtcatgcagatccaccttacaaatctgttgcggctctcaactgtgttatattagggtgtgcaaacatttgggacattaatcgagcttatgaaacttttgtggctattaaggaaaaatttgaactcagtcctgacatccattcatacaatgcccttctgtgtgcatttgggaagttgaaacagacaggagaagcatgtaatgtgttccagcatgtattaactcttggtgttaagccaaatgcaacaacatactcccggcttgtcgatgcccatcttgcaaacaaagatccaaaagctgctcttgccataattgatgagatggttgatgctggcttcactccttccaaggataccctcaggaaggttcgaagacggtgctctcgtgagtcagactttgacagtgacgagaaagtccaatccctggctaagcagttcaactaccgaatgggtggtgagaatcgaagagagatgctttatagcatagaatacaatcctgtgtactgaagcggcagtttctactgagtttgctggtcgttgggagagcacggacattgtagcttgtaaattacttgaacgcaccaggattcttaagcaatattcagtttctcaatcattatttttgctcgcagggttgatgttaggacttgctaataagctgcatactatttgtttgcttgagaatccgaaaatgtcagttctttttcataaattgtagcatctgcgtggccccacttcttacgtgactcctaggtgttttcggctttgtttacacttgtaactaacgaagaagtcctgggatgactgggtcgcagcttcttcaaaagatgctattcttattatggaaatttaatggagactgacaatttaaagtcac

SEQ ID NO: 67098 - DNA, 1072 bp, Zea Mays
aaaaaacattttctcctgaaaaagtgtttccagagggaaattagaaatccatcccgatcctatcgtccccaatttcttctgctccacctaaatagatccgtagccgtagcctaggcgcgcacattgcagaaagatcgagcggaaggtcggcagcaggcgcatagatgcaggggtgagggcacgggcggcagcgcttgacgggcgacgagtaaaccctaacgctttgattgcgggcggcgtcgtctgagccagtcccgagtcgatacgctgtcatgcctgtcaatcctcctccgccacctcctgggtcgtcgtctttggctccggcgggggccagctacttcccgctccctttccacctgcagcagcaccagccgccgccgccgcaggtgccgccgcctatggcggcgagcagctatcagcagtatcagcaacagctgcatcaggcccatcagctcttccagcgggacgcgcagaccataacccccgaagcgctgcagagcgtcaaggctgccctcgccaccagcgacgtcctcgaccccgtcgccgccgccaacgccaggctctccgatccctctaccagcaagaagcccatcccccgtcgcgctgccggacaatcctgggaggatcctaccctcactgaatggcccgaaaacgactaccggctgttctgtggagatctaggcaacgaagttaatgatgatgttctctccaaagcattttcacggtttccatccttcaacatggcaagggttgttagagataagaggactggcaaaactaaaggctatggatttgtgagcttttcaaaccctactgatctggctgcagcaataaaagagatgaatggaaagtatgttgggaaccgccctattaaattgcgtaagagtaactggaaggagaggacagatgttgaggctctggaaagacaaaagaatcatgtcaagaggaagcctaaaattcccaagaagactattcttcacaagtagagatacaaaggccctaccgagggtgaatgccagctcatgctattacacattttgctgaggtctgatggatggcttatatgatgtgt

SEQ ID NO: 67099 - DNA, 1033 bp, Zea Mays
agagggaaattagaaatccatcccgatcctatcgtccccaatttcttctgctccacctaaatagatccgtagccgtagcctaggcgcgcacattgcagaaagatcgagcggaaggtcggcagcaggcgcatagatgcaggggtgagggcacgggcggcagcgcttgacgggcgacgagtaaaccctaacgctttgattgcgggcggcgtcgtctgagccagtcccgagtcgatacgctgtcatgcctgtcaatcctcctccgccacctcctgggtcgtcgtctttggctccggcgggggccagctacttcccgctccctttccacctgcagcagcaccagccgccgccgccgcaggtgccgccgcctatggcggcgagcagctatcagcagtatcagcaacagctgcatcaggcccatcagctcttccagcgggacgcgcagaccataacccccgaagcgctgcagagcgtcaaggctgccctcgccaccagcgacgtcctcgaccccgtcgccgccgccaacgccaggctctccgatccctctaccagcaagaagcccatcccccgtcgcgctgccggacaatcctgggaggatcctaccctcactgaatggcccgaaaacgactaccggctgttctgtggagatctaggcaacgaagttaatgatgatgttctctccaaagcattttcacggtttccatccttcaacatggcaaggagataagaggactggcaaaactaaaggctatggatttgtgagcttttcaaaccctactgatctggctgcagcaataaaagagatgaatggaaagtatgttgggaaccgccctattaaattgcgtaagagtaactggaaggagaggacagatgttgaggctctggaaagacaaaagaatcatgtcaagaggaagcctaaaattcccaagaagactattcttcacaagtagagatacaaaggccctaccgagggtgaatgccagctcatgctattacacattttgctgaggtctgatggatggcttatatgatgtgt

SEQ ID NO: 67100 - DNA, 1756 bp, Zea Mays
agagggaaattagaaatccatcccgatcctatcgtccccaatttcttctgctccacctaaatagatccgtagccgtagcctaggcgcgcacattgcagaaagatcgagcggaaggtcggcagcaggcgcatagatgcaggggtgagggcacgggcggcagcgcttgacgggcgacgagtaaaccctaacgctttgattgcgggcggcgtcgtctgagccagtcccgagtcgatacgctgtcatgcctgtcaatcctcctccgccacctcctgggtcgtcgtctttggctccggcgggggccagctacttcccgctccctttccacctgcagcagcaccagccgccgccgccgcaggtgccgccgcctatggcggcgagcagctatcagcagtatcagcaacagctgcatcaggcccatcagctcttccagcgggacgcgcagaccataacccccgaagcgctgcagagcgtcaaggctgccctcgccaccagcgacgtcctcgaccccgtcgccgccgccaacgccaggctctccgatccctctaccagcaagaagcccatcccccgtcgcgctgccggacaatcctgggaggatcctaccctcactgaatggcccgaaaacgactaccggctgttctgtggagatctaggcaacgaagttaatgatgatgttctctccaaagcattttcacggtttccatccttcaacatggcaaggataaccagcatttcctatggatcttttcatggttgttagagataagaggactggcaaaactaaaggctatggatttgtgagcttttcaaaccctactgatctggctgcagcaataaaagagatgaatggaaagtatgttgggaaccgccctattaaattgcgtaagagtaactggaaggagaggacagatgttgaggctctggaaagacaaaagaatcatgtcaagaggaagcctaaaattcccaagaagactattcttcacaagtagagatacaaaggccctaccgagggtgaatgccagctcatgtgctgccttgggatgatgctaccttctggaatctctttactctctgcaatgctcggggtggaatcacgcaatgctcggggtggaatcacacgcaagggctgttgtttaatgtgtagtttggaaacttaaattcttttgggatacctgtcttttatcaggatgagtaacccagggatataatttaaataagacatttagttatttaggagatggtttctctctctggtttgacttccccttccaaactaggtctaaggccatcttcagcagatcgtgtaaatggacgtgtaaagtactgttttgcattgtatattgtaatatgaagtgagatagagtctactggagataatcgacttgttcgctttaaggtggattgaggaggattggaagggattaaattctcttctattcaaatttgtataggagaggatttaattctctctaatccctctcaatctacctctaaccgaataagccgggcaacgtgctgcctgttggtccccatggtttaggctggggttgtgggcttgtgaacatagagttagtgttaagtgccacccgacgcaatttgtgctctgttttaccctgtagttgtacgttcacgtggtattcatttgagatgttggagcagtgtcatggctactgacttacgaggccttgcattatcagatagtttgcttggttgtgggctctcaacaagaaccaaatggaattttcaatttaggtttctg

SEQ ID NO: 67101 - DNA, 348 bp, Zea Mays
agcatttcctatggatcttttcatggttgttagagataagaggactggcaaaactaaaggctatggatttgtgagcttttcaaaccctactgatctggctgcagcaataaaagagatgaatggaaagtatgttgggaaccgccctattaaattgcgtaagagtaactggaaggagaggacagatgttgaggctctggaaagacaaaagaatcatgtcaagaggaagcctaaaattcccaagaagactattcttcacaagtagagatacaaaggccctaccgagggtgaatgccagctcatgctattacacattttgctgaggtctgatggatggcttatatgatgtgt

SEQ ID NO: 67102 - DNA, 315 bp, Zea Mays
atggggcccgagggcggcgtcgacgggcccatggtgtcgtacgacaaccagaggtgtgtcgacgcgctggacgcagcgctggagcggcgcggggtggcgctaccccggcccaacgcgacgtgcgacacggtgctctgcttctgcggcatccggctccaccagatcggctcgctccgctgccccgccgcggccaggaacgccacgcccactgccgcggtgaaggccctggagaagagctgccgcaacgcctcctacgccggctgctcgcgatgcgtgcagtccctgcaaaaggtaaatacccaggagaacaagtac

SEQ ID NO: 67103 - DNA, 2355 bp, Zea Mays
gtccaatcctcaaacttcgtattttaggatcgagtttatccatgaactatgaaggttactttaatagtattaattaggataaaaccaagcctaatgaaaatgttttagaactaaaataactattccaaaactttaggaacgaaatggaaccttagttggagctatgcatttgacatgaaatctccatgcttgttactttctattgtttgaatataatataattgaattgttcatttctttttaatagattaaggccccgtttggtttgggtgactaaagtttagtgactaaagtttagtcacttttagtccctaaagaagcaaacatattgactaaagtgagtgactaaactttagtcctttagtcaccaagggggcgactaaaagggattaaagtagtatttttaccttatttgccctctccactttcttcttatagcaaacatctattaattaataggggtaaaacagtcattattcataacaattaatgctctttagcccagtttagtcactagaaacaaacggggtactttagcgactaaactctagtcactaaaatttagtccagtgactaaaagaacagaacatggcctaagcttttggttgaattggttagtgcatccacttagaatttctcaaccatgtgctactaccttatgcgactgcattggtgtagcatgtatttgtgtgccaaactagtttttcatcatagatccaagcatgtggaggtcgaccaccagtccaccacttctcctaaaaacgtgttgctactccataattagcttgcatcatatccacaaaaagatcagattgcgcattgcggacgttataacaaaggcactacttatgacaccttttactcattttcgagacactctaaaaagattagatttgttgcacagttgcacgtactaggtctagattgaggggtgttaatatagaaagtcattacttctagttaaaagatacacgggaatgctggcctctacgcaatcggcggatcggatttctgtcttatgcggtgctgccgcgtggaagcaaaaaaaaggcacaggtgcacagccccttcacggacccgaacttttcattgaatcccgttgagctttcttgagtccgctccctccagcctctcactcccatgccgcctctgcctgcctccagtcccgcttccccctcacactcgccgtcgacattccggcagttcctgctccgggccttccagagggtagcgccgcgatgggcgacccaggcacctccgccaaccccaccgtgcgccaccgcctctcgccgcatcttgtgggatatgaggagtacaagtcagaatacatcacaactcagaagaaagcatactttgatctccataaggatgaagattggttaagaaataagtaccatcttacaaaccttgaaaatgtcattgaaagctatcactacaatttagtcaaacataagaagagaactggaaagaactacttcaaattatttcttcctacaaccgcaaagtggaaatctggacacatggccaatgttgttcctagtctatgtgttgcaaggaatgttgcttgcaatgttcgtggtggggttttcaggttggcctatttttctttttcttgcaaagagtttgatgagaatatactgaggaaagtgtttgaactatactatgaaaatgggttattggatctatcatatgctccagatgttggtgactatttagtctgcgaggatacaagttttgtaccaggcaacaaagatcaggctcctatacctgagtgcatgatgggaactgaagtagagaagagactaaatggacagggtcttgcactatttattggatgctataatggcacaaggtgctgtcgagcctgctctgaatggtgactctttgtttggaccggttgttccgaggatgaagaggaagacaccatctgaactgagaatggccaatgttgttcctggtctatgtgttgcaaggaatgttgcttgcaatgttcgtggtggggttttcagagtttgatgagaatctactgaggaaagtgtttgaactatactatgaaaatgggttattggatctatcatatgctccagatgttggtgactatttagtttgcgaggataccagttttgtaccaggcaacaaagatcaggctcctatacctgagggcatgatgggaactgaagtagagaagagactaaatggacaagtgaatttttatatcttcgtgttacttggatctaacaagatcatatcggtgggagcaaagggaaagccaacaaatgtcatcctcaaaccgttcaccagatacctctcaatttcataaatttggtagatgcagcaacacatgctacaatgaac

SEQ ID NO: 67104 - DNA, 1966 bp, Zea Mays
gtccaatcctcaaacttcgtattttaggatcgagtttatccatgaactatgaaggttactttaatagtattaattaggataaaaccaagcctaatgaaaatgttttagaactaaaataactattccaaaactttaggaacgaaatggaaccttagttggagctatgcatttgacatgaaatctccatgcttgttactttctattgtttgaatataatataattgaattgttcatttctttttaatagattaaggccccgtttggtttgggtgactaaagtttagtgactaaagtttagtcacttttagtccctaaagaagcaaacatattgactaaagtgagtgactaaactttagtcctttagtcaccaagggggcgactaaaagggattaaagtagtatttttaccttatttgccctctccactttcttcttatagcaaacatctattaattaataggggtaaaacagtcattattcataacaattaatgctctttagcccagtttagtcactagaaacaaacggggtactttagcgactaaactctagtcactaaaatttagtccagtgactaaaagaacagaacatggcctaagcttttggttgaattggttagtgcatccacttagaatttctcaaccatgtgctactaccttatgcgactgcattggtgtagcatgtatttgtgtgccaaactagtttttcatcatagatccaagcatgtggaggtcgaccaccagtccaccacttctcctaaaaacgtgttgctactccataattagcttgcatcatatccacaaaaagatcagattgcgcattgcggacgttataacaaaggcactacttatgacaccttttactcattttcgagacactctaaaaagattagatttgttgcacagttgcacgtactaggtctagattgaggggtgttaatatagaaagtcattacttctagttaaaagatacacgggaatgctggcctctacgcaatcggcggatcggatttctgtcttatgcggtgctgccgcgtggaagcaaaaaaaaggcacaggtgcacagccccttcacggacccgaacttttcattgaatcccgttgagctttcttgagtccgctccctccagcctctcactcccatgccgcctctgcctgcctccagtcccgcttccccctcacactcgccgtcgacattccggcagttcctgctccgggccttccagagggtagcgccgcgatgggcgacccaggcacctccgccaaccccaccgtgcgccaccgcctctcgccgcatcttgtgggatatgaggagtacaagtcagaatacatcacaactcagaagaaagcatactttgatctccataaggatgaagattggttaagaaataagtaccatcttacaaaccttgaaaatgtcattgaaagctatcactacaatttagtcaaacataagaagagaactggaaagaactacttcaaattatttcttcctacaaccgcaaagtggaaatctggacacatggccaatgttgttcctagtctatgtgttgcaaggaatgttgcttgcaatgttcgtggtggggttttcagtttgatgagaatctactgaggaaagtgtttgaactatactatgaaaatgggttattggatctatcatatgctccagatgttggtgactatttagtttgcgaggataccagttttgtaccaggcaacaaagatcaggctcctatacctgagggcatgatgggaactgaagtagagaagagactaaatggacaagtgaatttttatatcttcgtgttacttggatctaacaagatcatatcggtgggagcaaagggaaagccaacaaatgtcatcctcaaaccgttcaccagatacctctcaatttcataaatttggtgcctgtagttgatggatactcttatccacatctgacatagagcatgaatgtagctggaa

SEQ ID NO: 67105 - DNA, 997 bp, Zea Mays
atgggcgacccaggcacctccgccaaccccaccgtgcgccaccgcctctcgccgcatcttgtgggatatgaggagtacaagtcagaatacatcacaactcagaagaaagcatactttgatctccataaggatgaagattggttaagaaataagtaccatcttacaaaccttgaaaatgtcattgaaagggtcttgcactatttattggatgctataatggcacaaggtgctgtcgagcctgctctgaatggtgactctttgtttggaccggttgttccgaggatgaagaggaagacaccatctgaactgagaatggccaatgttgttcctggtctatgtgttgcaaggaatgttgcttgcaatgttcgtggtggggttttcaggataccagttttgtaccaggcaacaaagatcaggctcctatacctgagggcatgatgggaactgaagtagagaagagactaaatggacaagtgaatttttatatcttcgtgttacttggatctaacaagagtatgcaggcaaaaatgccctattccttggaatatattagccaacgccgtttaaattacaacatatggttcatgcagtctgcttttagccatttataactatatgcctttttactacattgctcttcttgagaatggatctgcactgtatgaagtttagagaccaatgcttatgattaatctcttaatgttcgaaataaacttcaagaatatgagtgatcaattatttttcttaccagtcatatcggtgggagcaaagggaaagccaacaaatgtcatcctcaaaccgttcaccagatacctctcaatttcataaatttggtgcctgtagttgatggatactcttatccacatctgacatagagcatgaatgtagctggaaggcatataacatcttatcttgttgacctactctcaaggaaagggtatgccatgaataaatctgctgattttgagactgtcagagaaataaaagagaaactgtt

SEQ ID NO: 67106 - DNA, 3321 bp, Zea Mays
ctccctttcctctctacaccgacgagaccctaacaaggcccccgccgccgccgccgcctccgcacatggccgctcgaaccttgctgctcgtgctgctcttgcttctgctcggtgacgccacctcggcttccgtcagcggccagcgcgaagcgttgatgaagttcaaagcggccgtgacggccgacccgggcggcctgctgcgcggctggtccccggcgtccggggaccactgccgctggccgggcgtgtcgtgcggcgcttccggggaggtggtcgcgctcaacgtcacctcctcgcccgggcgcgcgctcgcgggcgcgctgtctccggccgtcgcggcgctgcgggagctccgcgtgctcgctctcccgtcccacgcgctctcgggcccgctcccgcccgcgatctggacgctgcgccgcctccgcgtcctcgacctctccggcaatcgcctccagggcgggatccccgcagtgctcgtttgcgtctccctccagacgctggaccttgcctacaaccagctcaacggctccgtgcccgcggccctcggtgcgctccctgtgctacggcggctgtcacttgcctgcaaccgcttcggtggcgccatccctgacgagctcggtggcgccggttgccgcaacctgcagttcctcgatgtctctgggaacatgctcgtcggtggcataccccggagcctggggaattgtactgagctgcaggcgctgttattgtcctcgaacaatctggatgacatcatcccgccggagattggtcggctcaagaacctgcgtgcattagatgtgtccaggaacagtttgagtgggcctgtgccagcggagcttggtggttgcattcagctgtcagtgcttgttctgtccaatccttatgcacccactgctggttctgattcttctgattatggtgagctcgatgacttcaactacttccaaggagggattccggatactatcgctacactgccaaagctgaggatgttgtgggcgccaagagccacattggagggagagttgccgggtaattggagttcttgccagagcttggagatgataaatttgggggagaatctgttctctggtgggattcctaaggggctggtggaatgtgagaatttgaagttcctgaatttgagcatgaacaagtttacaggttcagttgattcttcgctgccagtaccttgcatggacgtgtttgatgtcagtggaaatcagctgtctggctcgttgccagtatttatgtcaaaaaagaattgtctttcatcccaggccccacgggatgacttggtgtcggagtattcttccttcttcacatatcaagcgcttgctggctttatgtcatccccatcacccttggatgcacatttgacaagctatcatagtttttccaggaacaattttactggtccagttacatccttacctcttgctactgaaaagttggggatgcaggggtcctatgcattcttggctgatgggaatcatcttggtggtcagcttcaacctagtctatttgacaagtgcaacagctcaaggggcctcgtcgtggaaatcagtaacaacttgataagtggagctattcccacagacattggctcgctttgcagttctcttcttgttcttggtgttgctggtaatcagctttcaggtatgataccatcaagtatcggggagttaagttaccttatcagcttggatttgagtaggaatcgccttggtggtgtaattcctacttctgtgaagaacttgctgcatttacagcgcctctctttggctcagaaccttctgaatggcacaattccacctgatattaatcagttgcatgctctcaaggttttggacctgtcatcaaacctcctcatggggatgatccctgatgcccttgctgacttgagaaatctcactgctctcctccttgataacaataaacttactgggaagattccttcaggatttgctaactcggcatcccttaccacgtttaatgtgtcattcaacaatttgtctggtccagtgccaacgaatggtaatacggttagatgtgacagtgttattgggaatcctttgctgcaatcttgtcatgtgtacactctggctgtgccatcagctgctcagcagggtcgaggtttgaattcgaatgacagcaatgatacaacaccttcaaactcacaaaacgaaggagcgaacaattcatttaatgcaattgaaattgcttcaataacttctgcaacagccatcgtttccatcctccttgcactgattgcactcttcatatacacaaggaagtgcgcgccccggatgtcagctcggtcttctggaaggagagaagttacactcttccaagatattggtgtcccaatcacttatgagactgttgttcgagccactggaagtttcaatgcaagcaattgcatcggaagtggaggctttggagccacttacaaggctgaaattgcacctggagtgttggtagctattaagagactctctgtcgggagatttcagggagcccaacagtttgacgctgagataaaaactctagggagattaagacatccaaatcttgttaccttggtaggttaccatctaggcgagtctgaaatgtttctcatatataactacttgtctggaggaaaccttgagaggtttatacaggagagatcgaagagaccggtagactggaaaatgctgcacaagattgcattggacgttgccaaagcacttgcttatctgcatgatacctgtgttcctcgcatccttcaccgggacgtgaagccgagcaatattttgttggacaccaactatactgcttacctctcggactttggactggcgagactcttgggaaattcagaaacacatgcaaccactggtgtagctggaacatttggatatgttgctccagaatatgctatgacttgtcgtgtttcagataaagctgatgtgtatagctatggtgttgtcctgatggagctaatctcagacaagaaggctttggacccgtccttttccccatatggtaatgggttcaacatagttgcttgggcttgcatgctgcttcgtcaaggccgtgctcgggaattctttattgatggtctgtgggatgttggcccgcatgatgacttggtagaaacattgcatttagcagtgatatgcactgctgattcactctctatacggccaactatgaagcaggtcgttcagagattaaagcagctacagcctccaattcgtgaacatcgatagagatgaataggtttacaatttccacatgtagaaggttctattttgatttttatgtgaagat

SEQ ID NO: 67107 - DNA, 1314 bp, Zea Mays
atgtgaacgagtagttatctgacagcgaccaagcactgatttggttgttggctgatagtggttggtcgtacagttggtttttttcagaagctctcacgcataagggctgtagaaactgattgactgttgtttctagctctggtggtggtgagatcatgttggcttgtgtgttcgttcctctggagaaaggacgaagatgtattgttcccaggatttgaacaccaaggatttggaaaccagcgtcattgttctcgtccatggaggcggattcggcgcctggtgttggtacaagactatatcgcttcttgaagacagtgggttcagagttaacgccatcgacttgacaggctccgggatccattcttatgacacgaacaagatttgcagtctttcagagtacgctgaaccgcttacgtcttaccttgaaggcttaggtgatgctgaaaaggtaatcttggtggctcatgatcttggtggtgcctgcgtatcctacgcaatggagatgttcccaaccaaagttgccaaggccgtttttctctgtgcagcgatgctgacgaacggaaacagtgcccttgacatgttccagcagcagatggacacaaacggcacgctccaaaaggcgcaggcattcgtctactccaacggcaaggaccggcccccgaccgccatcaacgtcgacagggcattgcttagagacttgttgttcaaccagagcccttccaaggacgtgtcgctggcctcggtgtccatgaggcccatccccttcgcccctgtgctggagaagctcgtgctcaccgccgagaactacggctcggtgcggcggttctacgtggagaccacggaggacaacgcgatccctctgcccctccagcagagcatgtgtggcgccaacccaccggagaaggtgctgcggctgaagggggccgaccacgcacccttcttctccaagccgcaggcgctgcacaagaccctcgtcgagatcgccgccatgccgccggtcggggcttcgtgagaacgtgtttgtttagcttccttcaggttttgctggacggtgagcttgcgtgcgtgactgttgtacaggctgaggatggtatggtctgtggcggtgtggcaacaagtaggggctctagaatctcagcgtcgtctccacgaaggcatccttattccttccattatacttaggctatccgcaaccgttacccctaaatttttccccctatatcactttttccccctattttctcccctattttttcatctcccgcagcagttccccctaaatattccccctataccccactaccactataaaat

SEQ ID NO: 67108 - DNA, 1723 bp, Zea Mays
ataaaccaggggaaacgcgcagcgcacacaacacaatccgcgggccgcggcaggaagtgcagaggagaattcacagatcaaactcgtatgcaagtgcagatcaaaactcaaggtgtcgccttcttcttctccctctcgctgcgctgatgtcgacgcccccctcgtcacgatttcttttttcgggtgtttttttaatattagtcgccagcagtactgtacgcaacaggttgagtacaaagatcgtaggcagtatatgcgcgtgagcgcgcgcgcgcttgcgcttccttccttgcttcccctgccctcttctttttattccccgtctcctttgttcgcttgcgggctgcggcaagggggagggagaggacgtgacgaggggaggggaggggaggagggagggcaggcgggccgacgaatgcacagtcccggagaatattggtgaagcaataacttgatattgggttctagaccaaagaagcaatggaaaaggaatcatctgccacatacgagccaaaaaggaacagtgaaataagggtttttgagagttcagatgagatttcaacggatcttgctgagtatatctcacaagtttcagaaatttctgtcaaagaaaggggatactttgccatcgccttatctggaggtcccctagtcagttttttggggaaactttgtgaagctccatacaacaagacactggattggtccaaatggtacatcttctggtctgatgaacgtgctgtggcaaaaaaccatgcagagagtaactataggttaacaaaagaaggattcctcgccaagtaaaaaggttgatgccgattgcaagtagagcacatgttgaggtaccgattctgaatggccatgtctactccataaatgacaatgccacagtggaggatgcagcaacagactatgaattcatgatcaggcagctggttaaggtccgcacaataggagtctcagagagaaacgactgtcccaagttcgatctcatccttctcaccatgggctccgatgggcatgtggcctcgcttttcccgaaccaccctgccatggagctgaaagacgactgggtcacctacatcaccgactctccgcagcctcctcctgagaggatcaccttcactctcccagtgatcaactcagcatccaacatagcaatagtgtccactggtgatgacaaagcaaaggctgttcacatagcagtttctgacatggccgaaggtcttgatgctcctacatcactgcctgctagaatggtccagccaacggacgggaagctggtatggtttctggacaaggcggcggcatcattccttgactccaagaacgacgacgacgacgcttgctacgatcgtcacgagtgactaactctgaggatcgttggtcgttttgaagcgaatgaacggaggtgtgtgtaagtaggtggtggcgtatgatggaagacgcgctgttccccttttagctcgatgcatgggttaattttgttctgagggtttttagctccggaaatctgaaattgcccttggtccttttgcagtgaggtgatttaaaagcgatgaaatgtgtatgcgatgttgagtcgtcaaagaacaccggaatttaactgtggtcgtataatattatgtgctacattctatgctatggcagttagttttttttgttttgtattattatttgttggcatgccttgtccatggtactgttctaaaaacgttctgat

SEQ ID NO: 67109 - DNA, 1343 bp, Zea Mays
tggcactgcctgggacaacattgttggacgcccaatcatggttaggattggatttcgaggcttatctattaatgatctgtagtcagccagagaatattggtgaagcaataacttgatattgggttctagaccaaagaagcaatggaaaaggaatcatctgccacatacgagccaaaaaggaacagtgaaataagggtttttgagagttcagatgagatttcaacggatcttgctgagtatatctcacaagtttcagaaatttctgtcaaagaaaggggatactttgccatcgccttatctggaggtcccctagtcagttttttggggaaactttgtgaagctccatacaacaagacactggattggtccaaatggtacatcttctggtctgatgaacgtgctgtggcaaaaaaccatgcagagagtaactataggttaacaaaagaaggattcctcgccaaggtaccgattctgaatggccatgtctactccataaatgacaatgccacagtggaggatgcagcaacagactatgaattcatgatcaggcagctggttaaggtccgcacaataggagtctcagagagaaacgactgtcccaagttcgatctcatccttctcaccatgggctccgatgggcatgtggcctcgcttttcccgaaccaccctgccatggagctgaaagacgactgggtcacctacatcaccgactctccgcagcctcctcctgagaggatcaccttcactctcccagtgatcaactcagcatccaacatagcaatagtgtccactggtgatgacaaagcaaaggctgttcacatagcagtttctgacatggccgaaggtcttgatgctcctacatcactgcctgctagaatggtccagccaacggacgggaagctggtatggtttctggacaaggcggcggcatcattccttgactccaagaacgacgacgacgacgcttgctacgatcgtcacgagtgactaactctgaggatcgttggtcgttttgaagcgaatgaacggaggtgtgtgtaagtaggtggtggcgtatgatggaagacgcgctgttccccttttagctcgatgcatgggttaattttgttctgagggtttttagctccggaaatctgaaattgcccttggtccttttgcagtgaggtgatttaaaagcgatgaaatgtgtatgcgatgttgagtcgtcaaagaacaccggaatttaactgtggtcgtataatattatgtgctacattctatgctatggcagttagttttttttgttttgtattattatttgttggcatgccttgtccatggtactgttctaaaaacgttctgat

SEQ ID NO: 67110 - DNA, 1349 bp, Zea Mays
aaataaaggagaagatcggaatctttcaactgttctcaactcaaatgatggctgcaagagctttcagttgcaattgttctcttccgtcagttctggagaatattggtgaagcaataacttgatattgggttctagaccaaagaagcaatggaaaaggaatcatctgccacatacgagccaaaaaggaacagtgaaataagggtttttgagagttcagatgagatttcaacggatcttgctgagtatatctcacaagtttcagaaatttctgtcaaagaaaggggatactttgccatcgccttatctggaggtcccctagtcagttttttggggaaactttgtgaagctccatacaacaagacactggattggtccaaatggtacatcttctggtctgatgaacgtgctgtggcaaaaaaccatgcagagagtaactataggttaacaaaagaaggattcctcgccaaggtaccgattctgaatggccatgtctactccataaatgacaatgccacagtggaggatgcagcaacagactatgaattcatgatcaggcagctggttaaggtccgcacaataggagtctcagagagaaacgactgtcccaagttcgatctcatccttctcaccatgggctccgatgggcatgtggcctcgcttttcccgaaccaccctgccatggagctgaaagacgactgggtcacctacatcaccgactctccgcagcctcctcctgagaggatcaccttcactctcccagtgatcaactcagcatccaacatagcaatagtgtccactggtgatgacaaagcaaaggctgttcacatagcagtttctgacatggccgaaggtcttgatgctcctacatcactgcctgctagaatggtccagccaacggacgggaagctggtatggtttctggacaaggcggcggcatcattccttgactccaagaacgacgacgacgacgcttgctacgatcgtcacgagtgactaactctgaggatcgttggtcgttttgaagcgaatgaacggaggtgtgtgtaagtaggtggtggcgtatgatggaagacgcgctgttccccttttagctcgatgcatgggttaattttgttctgagggtttttagctccggaaatctgaaattgcccttggtccttttgcagtgaggtgatttaaaagcgatgaaatgtgtatgcgatgttgagtcgtcaaagaacaccggaatttaactgtggtcgtataatattatgtgctacattctatgctatggcagttagttttttttgttttgtattattatttgttggcatgccttgtccatggtactgttctaaaaacgttctgat

SEQ ID NO: 67111 - DNA, 1448 bp, Zea Mays
cagaaaccctttcttttgcgttgtactaaaccctagccgaccgcgtcacgccgccccccgccgccgccgaccgcgtcacgccgccccccgccgccgaccgcgtcacgccgtcccccgcagccgccgtcgccgaccgcgtcacgccgtcccccgccgccgaccgcgtcacgccgtgccccgccgccgccgaccgcatcacgccgtcccccgccgatgagtaatcgaccgcgtcacgctgccccccgccggaagcaacaaaattggtccaaccctctttgaggagggaaggattttcttccattcctgatgtcacatgggatgatgttggaggtcttgattcgttgaggaaagagtttcaccgctacataagatgtattaagagccctgaagattgtgatttatttggagtgagaatgcaagatggcttcctgctgtttggacctccgggttgtggcaaaacactcatagcaaaagcagtggcacatgaggcaggggctaattttattcatattaaggggcctgatatattgaacaagtatgttggcgagagtgaatcagaaattaggaaaatattcaaccgagcacgtattaatgccccatgcattgtattttttgatgaggtagattcattgacaacaaaaagaggtaaagagggggggtggggttgttgaacgtctcctaaaccagttacttatcgaacttgatggtgctggtcagcgtaaaggtgtctacgtgataggagctacaaacagaattgatatgatagatgatgctatgctacggcctggtagattcgggaagaaacattatgtacctatacctggtgctcgcgaaagggtttcaatattaaaggcactagccagacgcatacccgtttcatcaaccgttgatttggatgtgttggcacttcgagaagagtgcagcaatttcactggcgccgacctagcatcactggtggatgaggcagccatgttagctatggcagagagatggatgtacctcgatagcaggacatcaacgagtccatcttctctgattgagccatcacactttgaagaagccttatcaaaggtgaagccatcaatatccaaaaagcaaaagagactttacgaaaaaatgcgcaagaaacacttgtcaacaacctgatcagatcaccatacatccatcttgtgtgtgtggcacaaactatgccatcgctacctatgaaaatggttctgccggcactgcagaatgctactataaatttgtgcattacaatcatgcttgaaatataatgataaaccgtatactccctctgtttttttacttgacattttttagttcaaaaacacactatccggcgtcaaatatataagattggaggtagtaccagacatgccgtggcttatttgtactgtcttcacctgctggaatttttgcacgtgagctaccaatgcatggcttgttag

SEQ ID NO: 67112 - DNA, 3182 bp, Zea Mays
cagaaaccctttcttttgcgttgtactaaaccctagccgaccgcgtcacgccgccccccgccgccgccgaccgcgtcacgccgccccccgccgccgaccgcgtcacgccgtcccccgcagccgccgtcgccgaccgcgtcacgccgtcccccgccgccgaccgcgtcacgccgtgccccgccgccgccgaccgcatcacgccgtcccccgccgatgagtaatcgaccgcgtcacgctgccccccgccggttagcctcgtcgtctaccattcgccgtctcatacaggacggtgacctggccgtccccggctcctctgcggaggacgtcgcccacgctctccgcaaccaccgtcctgagctccgccgcaagaggctcaagcccttgacggaagccgtccgccgtgtactatcctctgactttgatgacgacgatgatgacgactccgcctcccgcggtcaccaaggtgcccacgccaccctctcctccaccacctctctctcggacgaatccgcccacccgccgcctccaccctatttcgatgccaccaagaccatgcttcgctcccagtatgcctcgcagacgtccaaacagaacccaggcactaaccagcagctggaaatcgagatgaccgctgagaaggctcgccgcctcatcacatctgattgtggaggcggaggtggcgatgccaagccagaggctccggtctccgaaggagtggtcaatggggacaagtggccgcgttttgctgatctcggcgggatggatcaggtgttagatcagcttgtggtagaagtggtggtgcccctgtgccatccggagctgccggattaccttggggttaggcctgttgctgggctactgctgtacggaccgccaggttgcgggaagaccacccttgcacatgccattgccaatgagactggtgtgccgttctacaagatctcagccccagatatcgtgtctggagtatctggaggttctgaagaaaacatcaggggcttatttcagaaggcatataggactgctccctcaattgtattcatagatgagatagatgcaattgcatccaagagggagaatctgcaacgagagatggagcgacgaatagttactcagctgatgacatgcatggatgaattccaccagaatattggtggtgatggttctgatgccgattcatctgaaaagaaaccaggttatgttattgtcattggagctacaaataggcctgatgctgtggatcaagctcttcgaaggccaggaagatttgatcgagagatatatcttggggttccagatgtgaattcaaggaaacagatactgatgatgcttgctcggaagcttcgacttgaagggcaatttgactttttaaagatagcaagggccacaccaggttttgttggtgctgacttgaaagcattagtcaataatgcagggtatctggcaatgaagagaataattaataaaagaagagctcagtattgttctgaggtaaaggtaaaatggtggaagcagctgtcttgggatgcaggcgagatggagagtgtacatgtcaccatgaacgactttgaggaagcaacaaaattggtccaaccctctttgaggagggaaggattttcttccattcctgatgtcacatgggatgatgttggaggtcttgattcgttgaggaaagagtttcaccgctacataagatgtattaagagccctgaagattgtgatttatttggagtgagaatgcaagatggcttcctgctgtttggacctccgggttgtggcaaaacactcatagcaaaagcagtggcacatgaggcaggggctaattttattcatattaaggggcctgatatattgaacaagtatgttggcgagagtgaatcagaaattaggaaaatattcaaccgagcacgtattaatgccccatgcattgtattttttgatgaggtagattcattgacaacaaaaagaggtaaagagggggggtggggttgttgaacgtctcctaaaccagttacttatcgaacttgatggtgctggtcagcgtaaaggtgtctacgtgataggagctacaaacagaattgatatgatagatgatgctatgctacggcctggtagattcgggaagaaacattatgtacctatacctggtgctcgcgaaagggtttcaatattaaaggcactagccagacgcatacccgtttcatcaaccgttgatttggatgtgttggcacttcgagaagagtgcagcaatttcactggcgccgacctagcatcactggtggatgaggcagccatgttagctatggcagagagatggatgtacctcgatagcaggacatcaacgagtccatcttctctgattgagccatcacactttgaagaagccttatcaaaggtgaagccatcaatatccaaaaagcaaaagagactttacgaaaaaatgcgcaagaaacacttgtcaacaacctgatcagatcaccatacatccatcttgtgtgtgtggcacaaactatgccatcgctacctatgaaaatggttctgccggcactgcagaatgctactataaatttgtgcattacaatcatgcttgaaatataatgataaaccgtatactccctctgcatatgatgtgcagtgcttctgacctaggaacagagtgcgctaatcctcatgaaagccgtggcatcccagacagaatccttttatatgatagacatccaggtggtatcggcatagcatcacaggcccaaatgctcttcgaggaactcctcctggctgctttagaagtcgtttccacgtgcaactgcacaagtgccgttggctgtccaaactgcatccaatcactgacgtgcagcgaatataacgaagttttggacaaggaggcagcgattttgattctgaagggagtaatcgactacgagagatcgtattttgaagcggaagacgcttctcagcgaagctgctgacgtcgaggctacagtaggcagcgaggagtgacgtgttcattactgtttgttcgtttggtgtttctctcgtgtatgtagatgggagaggttcggtctgtatctgcactcacatttgtagcctcgtcatatcaaagttgatatcatatcctacgacaatcaggtccatacatctgtacaacagtacaacccaaacatgtgagagctactggcgagccc

SEQ ID NO: 67113 - DNA, 3497 bp, Zea Mays
aagccctcctgccatttctgtccaacccaccagggcccgaagcacgggaccggacggggcgaggagagtgaaacggcgcgcaatcgccgccaccgccgcgtcggcacgtccgccccacctcttcgcttaggcacgcgccaaaaccagtcaccggccgcaatctgccaatctcccgagccgcagtcctacgctccggctcctccacctcctaaccgcatttgttgatgacggcggagcaggagtggagtgaggtccaggtccgggccctcgacgggcgatccacggtcgtcaagctgccccttggcgcctccgtccgggacctcaaggccgcgctccggacgtccttcttgcccgcgcaagtctcccccagcttccacctcttcctgaagggtgctaaattgcgtttagacgctgagattggcagccttgctatcggcgatggggacttcattgttctcgtacccttcacaaggacgccacagcagcatttttcagttagcacagcaagtcaagatcagggccactgtccaccaaaacaaccagaagtgtcttctgcggctaattcagcttggcaagacattatggatgacctctcagcaatgccagccagcccacagtctgatgctgcttccaaagatttttactcctcatgtgacccgtgctctgggagatttacggaggatatgaaagcgggtcaaatttcgacaagtgggtcatcaaggaaaaggaggaaaacatgcaaggaaaacggaaatggttccccacaaatggtgtcctcgtctgaagcaaatggtacagctgagaaacacaacataagcaagaaaagtggggtggccaaatctgctgctatgttatgtcatgatatgcaacctttgaaacctgctgaaatggttgaacatctgaaacaaggacttggaaaggaggggcagatcgtacatatccaagagatatcatctagagaggcatcatttacagaacttccttgtaatctttcagaagctatgagagaagcgctgaagagtattggaatatctagactgtatagccaccagtctcaagccataacatcctctatttctggaaggcacattgtcgttgcaacttctacatcaagtggaaagtctctatgttacaatattcctgttcttgaatgtctttcccaagacttgatggcgtgtgctctgtacatatttccgatgaaggctttagctcaagatcagttgaggactttaataaagttgaagaatgcatctcatattgatgttgatgttaaaatatatgatggtgatactcctagagaagatcgtttgtggatcagggataatgctcgactgttaattaccaacccggatatgttgcatgtgtcaatcttgccgtatcatggtcaattccagagaattttatcaaatctcaggtatattgtcattgatgaagcacattcatacaagggggcatttggctgccatactgcgctcataattcggagattgaagcgtatttgttcaaatgtttatggtagttgtcctacattcatattttgtacagcaacctcagcaaatccatgtgagcatgtcatggaattggccaatttggatgaagtcgagttgattcagaatgatggaagtccttgtggttccaagtactttctcttgtggaatccctcactacctatgacagaaggaaggtcaaaagctagttcagtacataggcgctcaagctcaatagtagaggtttcatatctattttccgagatggttcaacatggcctccgctgcattgcattctgtaaaagtaggaagctatgtgagcttgttctagcttacacgcgtgaaattcttcaggagactgcaaaagaattggtagattctatctgtgtatatcgtgctggctacatagctgaggacagaagaaaaatcgaggctgatctttttggggggaaacttcatggagtcgctgctactaatgctcttgagctaggaattgatgttggacatattgatgcaacattgcatcttggatttcctggtagtattgccagcttgtggcagcaagccggtaggtctggaagaagagctaaacaatcactagccatttatgttgcctttgagggtcctttagatcagtatttcatgaagttcccacataaactatttggcaggtcgattgagcattgccaagttgattcacataatctaaaggttttagaacagcaccttccttgtgctgcttatgaacatcccttgtgcgtgcaatacgatgagtgctactttggctctagtctcgatagtgtaatgacaacccttaaagacaaaggttatatcatcaataatcgagctggacctttttcttcaagcatgtggaactatattggacccgagaaaagcccttcacaggctgtaagcatacgggcaattgagcaggacaggtataaagtgattgacaagttaaatagtcgattacttgaggaaattgaagaaagtaaagccttttttcaggtttatgaaggtgctgtttacatgcatcagggtgccaattacttggttgaggaacttgacttggcatcaaggacagccttctgtaggaaagctgatttgaaatattacacgaaaacacgagactacactgacatcaatgttctcggaggagaatttgcttatcttcctacaagtatatgtagaactaatcgggtgaagacaactgctcaagcaaatgactgcacggtgactactaaatggtttggtttttatcgcatatcaaaatctagcaatacaatatccgacagcttcgagcttaacctgcccccatactcctttacttcccaggctgtttgggtgcgaattccccactcagtaaagatgaccgtggaggaaagcaaactagaatttagaggcggctcacatgctgcttcgcatgcactcctgaatatagtgcctctgcatatgatgtgcagtgcttctgacctaggaacagagtgcgctaatcctcatgaaagccgtggcatcccagacagaatccttttatatgatagacatccaggtggtatcggcatagcatcacaggcccaaatgctcttcgaggaactcctcctggctgctttagaagtcgtttccacgtgcaactgcacaagtgccgttggctgtccaaactgcatccaatcactgacgtgcagcgaatataacgaagttttggacaaggaggcagcgattttgattctgaagggagtaatcgactacgagagatcgtattttgaagcggaagacgcttctcagcgaagctgctgacgtcgaggctacagtaggcagcgaggagtgacgtgttcattactgtttgttcgtttggtgtttctctcgtgtatgtagatgggagaggttcggtctgtatctgcactcacatttgtagcctcgtcatatcaaagttgatatcatatcctacgacaatcaggtccatacatctgtacaacagtacaacccaaacatgtgagagctactggcgagccc

SEQ ID NO: 67114 - DNA, 3574 bp, Zea Mays
cgaggagagtgaaacggcgcgcaatcgccgccaccgccgcgtcggcacgtccgccccacctcttcgcttaggcacgcgccaaaaccagtcaccggccgcaatctgccaatctcccgagccgcagtcctacgctccggctcctccacctcctaaccgcatttgttgatgacggcggagcaggagtggagtgaggtccaggtccgggccctcgacgggcgatccacggtcgtcaagctgccccttggcgcctccgtccgggacctcaaggccgcgctccggacgtccttcttgcccgcgcaagtctcccccagcttccacctcttcctgaagggtgctaaattgcgtttagacgctgagattggcagccttgctatcggcgatggggacttcattgttctcgtacccttcacaaggacgccacagcagcatttttcagttagcacagcaagtcaagatcagggccactgtccaccaaaacaaccagaagtgtcttctgcggctaattcagcttggcaagacattatggatgacctctcagcaatgccagccagcccacagtctgatgctgcttccaaagatttttactcctcatgtgacccgtgctctgggagatttacggaggatatgaaagcgggtcaaatttcgacaagtgggtcatcaaggaaaaggaggaaaacatgcaaggaaaacggaaatggttccccacaaatggtgtcctcgtctgaagcaaatggtacagctgagaaacacaacataagcaagaaaagtggggtggccaaatctgctgctatgttatgtcatgatatgcaacctttgaaacctgctgaaatggttgaacatctgaaacaaggacttggaaaggaggggcagatcgtacatatccaagagatatcatctagagaggcatcatttacagaacttccttgtaatctttcagaagctatgagagaagcgctgaagagtattggaatatctagactgtatagccaccagtctcaagccataacatcctctatttctggaaggcacattgtcgttgcaacttctacatcaagtggaaagtctctatgttacaatattcctgttcttgaatgtctttcccaagacttgatggcgtgtgctctgtacatatttccgatgaaggctttagctcaagatcagttgaggactttaataaagttgaagaatgcatctcatattgatgttgatgttaaaatatatgatggtgatactcctagagaagatcgtttgtggatcagggataatgctcgactgttaattaccaacccggatatgttgcatgtgtcaatcttgccgtatcatggtcaattccagagaattttatcaaatctcaggtatattgtcattgatgaagcacattcatacaagggggcatttggctgccatactgcgctcataattcggagattgaagcgtatttgttcaaatggtatgtataacttttttatttgatagttgacctattcatctatcttttgtattaggactaggttctctagttacatgaatttattacttgactcccagaatcctaatcagagcccaaaaattacagtaagttccttacaagttgtaacttctgatgtgtgacttttcagacttgtaaaaatgtaggagctacttatgcagttacacatataatataatctataaagctcttggttttctgtatttgcagtttatggtagttgtcctacattcatattttgtacagcaacctcagcaaatccatgtgagcatgtcatggaattggccaatttggatgaagtcgagttgattcagaatgatggaagtccttgtggttccaagtactttctcttgtggaatccctcactacctatgacagaaggaaggtcaaaagctagttcagtacataggcgctcaagctcaatagtagaggtttcatatctattttccgagatggttcaacatggcctccgctgcattgcattctgtaaaagtaggaagctatgtgagcttgttctagcttacacgcgtgaaattcttcaggagactgcaaaagaattggtagattctatctgtgtatatcgtgctggctacatagctgaggacagaagaaaaatcgaggctgatctttttggggggaaacttcatggagtcgctgctactaatgctcttgagctaggaattgatgttggacatattgatgcaacattgcatcttggatttcctggtagtattgccagcttgtggcagcaagccggtaggtctggaagaagagctaaacaatcactagccatttatgttgcctttgagggtcctttagatcagtatttcatgaagttcccacataaactatttggcaggtcgattgagcattgccaagttgattcacataatctaaaggttttagaacagcaccttccttgtgctgcttatgaacatcccttgtgcgtgcaatacgatgagtgctactttggctctagtctcgatagtgtaatgacaacccttaaagacaaaggttatatcatcaataatcgagctggacctttttcttcaagcatgtggaactatattggacccgagaaaagcccttcacaggctgtaagcatacgggcaattgagcaggacaggtataaagtgattgacaagttaaatagtcgattacttgaggaaattgaagaaagtaaagccttttttcaggtttatgaaggtgctgtttacatgcatcagggtgccaattacttggttgaggaacttgacttggcatcaaggacagccttctgtaggaaagctgatttgaaatattacacgaaaacacgagactacactgacatcaatgttctcggaggagaatttgcttatcttcctacaagtatatgtagaactaatcgggtgaagacaactgctcaagcaaatgactgcacggtgactactaaatggtttggtttttatcgcatatcaaaatctagcaatacaatatccgacagcttcgagcttaacctgcccccatactcctttacttcccaggcatatgatgtgcagtgcttctgacctaggaacagagtgcgctaatcctcatgaaagccgtggcatcccagacagaatccttttatatgatagacatccaggtggtatcggcatagcatcacaggcccaaatgctcttcgaggaactcctcctggctgctttagaagtcgtttccacgtgcaactgcacaagtgccgttggctgtccaaactgcatccaatcactgacgtgcagcgaatataacgaagttttggacaaggaggcagcgattttgattctgaagggagtaatcgactacgagagatcgtattttgaagcggaagacgcttctcagcgaagctgctgacgtcgaggctacagtaggcagcgaggagtgacgtgttcattactgtttgttcgtttggtgtttctctcgtgtatgtagatgggagaggttcggtctgtatctgcactcacatttgtagcctcgtcatatcaaagttgatatcatatcctacgacaatcaggtccatacatctgtacaacagtacaacccaaacatgtgagagctactggcgagccc

SEQ ID NO: 67115 - DNA, 3682 bp, Zea Mays
cgcaatcgccgccaccgccgcgtcggcacgtccgccccacctcttcgcttaggcacgcgccaaaaccagtcaccggccgcaatctgccaatctcccgagccgcagtcctacgctccggctcctccacctcctaaccgcatttgttgatgacggcggagcaggagtggagtgaggtccaggtccgggccctcgacgggcgatccacggtcgtcaagctgccccttggcgcctccgtccgggacctcaaggccgcgctccggacgtccttcttgcccgcgcaagtctcccccagcttccacctcttcctgaagggtgctaaattgcgtttagacgctgagattggcagccttgctatcggcgatggggacttcattgttctcgtacccttcacaaggacgccacagcagcatttttcagttagcacagcaagtcaagatcagggccactgtccaccaaaacaaccagaagtgtcttctgcggctaattcagcttggcaagacattatggatgacctctcagcaatgccagccagcccacagtctgatgctgcttccaaagatttttactcctcatgtgacccgtgctctgggagatttacggaggatatgaaagcgggtcaaatttcgacaagtgggtcatcaaggaaaaggaggaaaacatgcaaggaaaacggaaatggttccccacaaatggtgtcctcgtctgaagcaaatggtacagctgagaaacacaacataagcaagaaaagtggggtggccaaatctgctgctatgttatgtcatgatatgcaacctttgaaacctgctgaaatggttgaacatctgaaacaaggacttggaaaggaggggcagatcgtacatatccaagagatatcatctagagaggcatcatttacagaacttccttgtaatctttcagaagctatgagagaagcgctgaagagtattggaatatctagactgtatagccaccagtctcaagccataacatcctctatttctggaaggcacattgtcgttgcaacttctacatcaagtggaaagtctctatgttacaatattcctgttcttgaatgtctttcccaagacttgatggcgtgtgctctgtacatatttccgatgaaggctttagctcaagatcagttgaggactttaataaagttgaagaatgcatctcatattgatgttgatgttaaaatatatgatggtgatactcctagagaagatcgtttgtggatcagggataatgctcgactgttaattaccaacccggatatgttgcatgtgtcaatcttgccgtatcatggtcaattccagagaattttatcaaatctcaggtatattgtcattgatgaagcacattcatacaagggggcatttggctgccatactgcgctcataattcggagattgaagcgtatttgttcaaatgtttatggtagttgtcctacattcatattttgtacagcaacctcagcaaatccatgtgagcatgtcatggtccaaaggggtcttagtcaaccctgtgccttgatgtggtaggctgctgtgcatcctcagtggcttaggtcttgaccagaattggccaatttggatgaagtcgagttgattcagaatgatggaagtccttgtggttccaagtactttctcttgtggaatccctcactacctatgacagaaggaaggtcaaaagctagttcagtacataggcgctcaagctcaatagtagaggtttcatatctattttccgagatggttcaacatggcctccgctgcattgcattctgtaaaagtaggaagctatgtgagcttgttctagcttacacgcgtgaaattcttcaggagactgcaaaagaattggtagattctatctgtgtatatcgtgctggctacatagctgaggacagaagaaaaatcgaggctgatctttttggggggaaacttcatggagtcgctgctactaatgctcttgagctaggaattgatgttggacatattgatgcaacattgcatcttggatttcctggtagtattgccagcttgtggcagcaagccggtaggtctggaagaagagctaaacaatcactagccatttatgttgcctttgagggtcctttagatcagtatttcatgaagttcccacataaactatttggcaggtcgattgagcattgccaagttgattcacataatctaaaggttttagaacagcaccttccttgtgctgcttatgaacatcccttgtgcgtgcaatacgatgagtgctactttggctctagtctcgatagtgtaatgacaacccttaaagacaaaggttatatcatcaataatcgagctggacctttttcttcaagcatgtggaactatattggacccgagaaaagcccttcacaggctgtaagcatacgggcaattgagcaggacaggtataaagtgattgacaagttaaatagtcgattacttgaggaaattgaagaaagtaaagccttttttcaggtttatgaaggtgctgtttacatgcatcagggtgccaattacttggttgaggaacttgacttggcatcaaggacagccttctgtaggaaagctgatttgaaatattacacgaaaacacgagactacactgacatcaatgttctcggaggagaatttgtatgttctcaaggctattactactctagcttcctttacattttcttcattattgactcatcccctggagtggttttcagcactttattttgtttactacttttctgtcttgtttatttgactctagtctagttcatcaaatattatgaactcctgcactttgactcttccaatatatgttgaaggcttatcttcctacaagtatatgtagaactaatcgggtgaagacaactgctcaagcaaatgactgcacggtgactactaaatggtttggtttttatcgcatatcaaaatctagcaatacaatatccgacagcttcgagcttaacctgcccccatactcctttacttcccaggctgtttgggtgcgaattccccactcagtaaagatgaccgtggaggaaagcaaactagaatttagaggcggctcacatgctgcttcgcatgcactcctgaatatagtgcctctgcatatgatgtgcagtgcttctgacctaggaacagagtgcgctaatcctcatgaaagccgtggcatcccagacagaatccttttatatgatagacatccaggtggtatcggcatagcatcacaggcccaaatgctcttcgaggaactcctcctggctgctttagaagtcgtttccacgtgcaactgcacaagtgccgttggctgtccaaactgcatccaatcactgacgtgcagcgaatataacgaagttttggacaaggaggcagcgattttgattctgaagggagtaatcgactacgagagatcgtattttgaagcggaagacgcttctcagcgaagctgctgacgtcgaggctacagtaggcagcgaggagtgacgtgttcattactgtttgttcgtttggtgtttctctcgtgtatgtagatgggagaggttcggtctgtatctgcactcacatttgtagcctcgtcatatcaaagttgatatcatatcctacgacaatcaggtccatacatctgtacaacagtacaacccaaacatgtgagagctactggcgagccc

SEQ ID NO: 67116 - DNA, 3389 bp, Zea Mays
cgcgtcggcacgtccgccccacctcttcgcttaggcacgcgccaaaaccagtcaccggccgcaatctgccaatctcccgagccgcagtcctacgctccggctcctccacctcctaaccgcatttgttgatgacggcggagcaggagtggagtgaggtccaggtccgggccctcgacgggcgatccacggtcgtcaagctgccccttggcgcctccgtccgggacctcaaggccgcgctccggacgtccttcttgcccgcgcaagtctcccccagcttccacctcttcctgaagggtgctaaattgcgtttagacgctgagattggcagccttgctatcggcgatggggacttcattgttctcgtacccttcacaaggacgccacagcagcatttttcagttagcacagcaagtcaagatcagggccactgtccaccaaaacaaccagaagtgtcttctgcggctaattcagcttggcaagacattatggatgacctctcagcaatgccagccagcccacagtctgatgctgcttccaaagatttttactcctcatgtgacccgtgctctgggagatttacggaggatatgaaagcgggtcaaatttcgacaagtgggtcatcaaggaaaaggaggaaaacatgcaaggaaaacggaaatggttccccacaaatggtgtcctcgtctgaagcaaatggtacagctgagaaacacaacataagcaagaaaagtggggtggccaaatctgctgctatgttatgtcatgatatgcaacctttgaaacctgctgaaatggttgaacatctgaaacaaggacttggaaaggaggggcagatcgtacatatccaagagatatcatctagagaggcatcatttacagaacttccttgtaatctttcagaagctatgagagaagcgctgaagagtattggaatatctagactgtatagccaccagtctcaagccataacatcctctatttctggaaggcacattgtcgttgcaacttctacatcaagtggaaagtctctatgttacaatattcctgttcttgaatgtctttcccaagacttgatggcgtgtgctctgtacatatttccgatgaaggctttagctcaagatcagttgaggactttaataaagttgaagaatgcatctcatattgatgttgatgttaaaatatatgatggtgatactcctagagaagatcgtttgtggatcagggataatgctcgactgttaattaccaacccggatatgttgcatgtgtcaatcttgccgtatcatggtcaattccagagaattttatcaaatctcaggtatattgtcattgatgaagcacattcatacaagggggcatttggctgccatactgcgctcataattcggagattgaagcgtatttgttcaaatgtcgagttgattcagaatgatggaagtccttgtggttccaagtactttctcttgtggaatccctcactacctatgacagaaggaaggtcaaaagctagttcagtacataggcgctcaagctcaatagtagaggtttcatatctattttccgagatggttcaacatggcctccgctgcattgcattctgtaaaagtaggaagctatgtgagcttgttctagcttacacgcgtgaaattcttcaggagactgcaaaagaattggtagattctatctgtgtatatcgtgctggctacatagctgaggacagaagaaaaatcgaggctgatctttttggggggaaacttcatggagtcgctgctactaatgctcttgagctaggaattgatgttggacatattgatgcaacattgcatcttggatttcctggtagtattgccaggtcggtgaagaatgacatattcaatgaagctcaatgtttatcttgtcaccctgctaagatacaaaattttaactgcagcttgtggcagcaagccggtaggtctggaagaagagctaaacaatcactagccatttatgttgcctttgagggtcctttagatcagtatttcatgaagttcccacataaactatttggcaggtcgattgagcattgccaagttgattcacataatctaaaggttttagaacagcaccttccttgtgctgcttatgaacatcccttgtgcgtgcaatacgatgagtgctactttggctctagtctcgatagtgtaatgacaacccttaaagacaaaggttatatcatcaataatcgagctggacctttttcttcaagcatgtggaactatattggacccgagaaaagcccttcacaggctgtaagcatacgggcaattgagcaggacaggtataaagtgattgacaagttaaatagtcgattacttgaggaaattgaagaaagtaaagccttttttcaggtttatgaaggtgctgtttacatgcatcagggtgccaattacttggttgaggaacttgacttggcatcaaggacagccttctgtaggaaagctgatttgaaatattacacgaaaacacgagactacactgacatcaatgttctcggaggagaatttgcttatcttcctacaagtatatgtagaactaatcgggtgaagacaactgctcaagcaaatgactgcacggtgactactaaatggtttggtttttatcgcatatcaaaatctagcaatacaatatccgacagcttcgagcttaacctgcccccatactcctttacttcccaggctgtttgggtgcgaattccccactcagtaaagatgaccgtggaggaaagcaaactagaatttagaggcggctcacatgctgcttcgcatgcactcctgaatatagtgcctctgcatatgatgtgcagtgcttctgacctaggaacagagtgcgctaatcctcatgaaagccgtggcatcccagacagaatccttttatatgatagacatccaggtggtatcggcatagcatcacaggcccaaatgctcttcgaggaactcctcctggctgctttagaagtcgtttccacgtgcaactgcacaagtgccgttggctgtccaaactgcatccaatcactgacgtgcagcgaatataacgaagttttggacaaggaggcagcgattttgattctgaagggagtaatcgactacgagagatcgtattttgaagcggaagacgcttctcagcgaagctgctgacgtcgaggctacagtaggcagcgaggagtgacgtgttcattactgtttgttcgtttggtgtttctctcgtgtatgtagatgggagaggttcggtctgtatctgcactcacatttgtagcctcgtcatatcaaagttgatatcatatcctacgacaatcaggtccatacatctgtacaacagtacaacccaaacatgtgagagctactggcgagccc

SEQ ID NO: 67117 - DNA, 3131 bp, Zea Mays
gcgtcggcacgtccgccccacctcttcgcttaggcacgcgccaaaaccagtcaccggccgcaatctgccaatctcccgagccgcagtcctacgctccggctcctccacctcctaaccgcatttgttgatgacggcggagcaggagtggagtgaggtccaggtccgggccctcgacgggcgatccacggtcgtcaagctgccccttggcgcctccgtccgggacctcaaggccgcgctccggacgtccttcttgcccgcgcaagtctcccccagcttccacctcttcctgaagggtgctaaattgcgtttagacgctgagattggcagccttgctatcggcgatggggacttcattgttctcgtacccttcacaaggacgccacagcagcatttttcagttagcacagcaagtcaagatcagggccactgtccaccaaaacaaccagaagtgtcttctgcggctaattcagcttggcaagacattatggatgacctctcagcaatgccagccagcccacagtctgatgctgcttccaaagatttttactcctcatgtgacccgtgctctgggagatttacggaggatatgaaagcgggtcaaatttcgacaagtgggtcatcaaggaaaaggaggaaaacatgcaaggaaaacggaaatggttccccacaaatggtgtcctcgtctgaagcaaatggtacagctgagaaacacaacataagcaagaaaagtggggtggccaaatctgctgctatgttatgtcatgatatgcaacctttgaaacctgctgaaatggttgaacatctgaaacaaggacttggaaaggaggggcagatcgtacatatccaagagatatcatctagagaggcatcatttacagaacttccttgtaatctttcagaagctatgagagaagcgctgaagagtattggaatatctagactgtatagccaccagtctcaagccataacatcctctatttctggaaggcacattgtcgttgcaacttctacatcaagtggaaagtctctatgttacaatattcctgttcttgaatgtctttcccaagacttgatggcgtgtgctctgtacatatttccgatgaaggctttagctcaagatcagttgaggactttaataaagttgaagaatgcatctcatattgatgttgatgttaaaatatatgatggtgatactcctagagaagatcgtttgtggatcagggataatgctcgactgttaattaccaacccggatatgttgcatgtgtcaatcttgccgtatcatggtcaattccagagaattttatcaaatctcaggtatattgtcattgatgaagcacattcatacaagggggcatttggctgccatactgcgctcataattcggagattgaagcgtatttgttcaaatggtatgtataacttttttatttgatagttgacctattcatctatcttttgtattaggactaggttctctagttacatgaatttattacttgactcccagaatcctaatcagagcccaaaaattacagtaagttccttacaagttgtaacttctgatgtgtgacttttcagacttgtaaaaatgtaggagctacttatgcagttacacatataatataatctataaagctcttggttttctgtatttgcagtttatggtagttgtcctacattcatattttgtacagcaacctcagcaaatccatgtgagcatgtcatggaattggccaatttggatgaagtcgagttgattcagaatgatggaagtccttgtggttccaagtactttctcttgtggaatccctcactacctatgacagaaggaaggtcaaaagctagttcagtacataggcgctcaaggcgtgaaattcttcaggagactgcaaaagaattggtagattctatctgtgtatatcgtgctggctacatagctgaggttttagaacagcaccttccttgtgctgcttatgaacatcccttgtgcgtgcaatacgatgagtgctactttggctctagtctcgatagtgtaatgacaacccttaaagacaaaggttatatcatcaataatcgagctggacctttttcttcaagcatgtggaactatattggacccgagaaaagcccttcacaggctgtaagcatacgggcaattgagcaggacaggtataaagtgattgacaagttaaatagtcgattacttgaggaaattgaagaaagtaaagccttttttcaggtttatgaaggtgctgtttacatgcatcagggtgccaattacttggttgaggaacttgacttggcatcaaggacagccttctgtaggaaagctgatttgaaatattacacgaaaacacgagactacactgacatcaatgttctcggaggagaatttgcttatcttcctacaagtatatgtagaactaatcgggtgaagacaactgctcaagcaaatgactgcacggtgactactaaatggtttggtttttatcgcatatcaaaatctagcaatacaatatccgacagcttcgagcttaacctgcccccatactcctttacttcccaggcatatgatgtgcagtgcttctgacctaggaacagagtgcgctaatcctcatgaaagccgtggcatcccagacagaatccttttatatgatagacatccaggtggtatcggcatagcatcacaggcccaaatgctcttcgaggaactcctcctggctgctttagaagtcgtttccacgtgcaactgcacaagtgccgttggctgtccaaactgcatccaatcactgacgtgcagcgaatataacgaagttttggacaaggaggcagcgattttgattctgaagggagtaatcgactacgagagatcgtattttgaagcggaagacgcttctcagcgaagctgctgacgtcgaggctacagtaggcagcgaggagtgacgtgttcattactgtttgttcgtttggtgtttctctcgtgtatgtagatgggagaggttcggtctgtatctgcactcacatttgtagcctcgtcatatcaaagttgatatcatatcctacgacaatcaggtccatacatctgtacaacagtacaacccaaacatgtgagagctactggcgagccc

SEQ ID NO: 67118 - DNA, 3417 bp, Zea Mays
gcgtcggcacgtccgccccacctcttcgcttaggcacgcgccaaaaccagtcaccggccgcaatctgccaatctcccgagccgcagtcctacgctccggctcctccacctcctaaccgcatttgttgatgacggcggagcaggagtggagtgaggtccaggtccgggccctcgacgggcgatccacggtcgtcaagctgccccttggcgcctccgtccgggacctcaaggccgcgctccggacgtccttcttgcccgcgcaagtctcccccagcttccacctcttcctgaagggtgctaaattgcgtttagacgctgagattggcagccttgctatcggcgatggggacttcattgttctcgtacccttcacaaggacgccacagcagcatttttcagttagcacagcaagtcaagatcagggccactgtccaccaaaacaaccagaagtgtcttctgcggctaattcagcttggcaagacattatggatgacctctcagcaatgccagccagcccacagtctgatgctgcttccaaagatttttactcctcatgtgacccgtgctctgggagatttacggaggatatgaaagcgggtcaaatttcgacaagtgggtcatcaaggaaaaggaggaaaacatgcaaggaaaacggaaatggttccccacaaatggtgtcctcgtctgaagcaaatggtacagctgagaaacacaacataagcaagaaaagtggggtggccaaatctgctgctatgttatgtcatgatatgcaacctttgaaacctgctgaaatggttgaacatctgaaacaaggacttggaaaggaggggcagatcgtacatatccaagagatatcatctagagaggcatcatttacagaacttccttgtaatctttcagaagctatgagagaagcgctgaagagtattggaatatctagactgtatagccaccagtctcaagccataacatcctctatttctggaaggcacattgtcgttgcaacttctacatcaagtggaaagtctctatgttacaatattcctgttcttgaatgtctttcccaagacttgatggcgtgtgctctgtacatatttccgatgaaggctttagctcaagatcagttgaggactttaataaagttgaagaatgcatctcatattgatgttgatgttaaaatatatgatggtgatactcctagagaagatcgtttgtggatcagggataatgctcgactgttaattaccaacccggatatgttgcatgtgtcaatcttgccgtatcatggtcaattccagagaattttatcaaatctcaggtatattgtcattgatgaagcacattcatacaagggggcatttggctgccatactgcgctcataattcggagattgaagcgtatttgttcaaatgtttatggtagttgtcctacattcatattttgtacagcaacctcagcaaatccatgtgagcatgtcatggaattggccaatttggatgaagtcgagttgattcagaatgatggaagtccttgtggttccaagtactttctcttgtggaatccctcactacctatgacagaaggaaggtcaaaagctagttcagtacataggcgctcaagctcaatagtagaggtttcatatctattttccgagatggttcaacatggcctccgctgcattgcattctgtaaaagtaggaagctatgtgagcttgttctagcttacacgcgtgaaattcttcaggagactgcaaaagaattggtagattctatctgtgtatatcgtgctggctacatagctgagaaataaattattttcaggacagaagaaaaatcgaggctgatctttttggggggaaacttcatggagtcgctgctactaatgctcttgagctaggaattgatgttggacatattgatgcaacattgcatcttggatttcctggtagtattgccagcttgtggcagcaagccggtaggtctggaagaagagctaaacaatcactagccatttatgttgcctttgagggtcctttagatcagtatttcatgaagttcccacataaactatttggcaggtcgattgagcattgccaagttgattcacataatctaaaggttttagaacagcaccttccttgtgctgcttatgaacatcccttgtgcgtgcaatacgatgagtgctactttggctctagtctcgatagtgtaatgacaacccttaaagacaaaggttatatcatcaataatcgagctggacctttttcttcaagcatgtggaactatattggacccgagaaaagcccttcacaggctgtaagcatacgggcaattgagcaggacaggtataaagtgattgacaagttaaatagtcgattacttgaggaaattgaagaaagtaaagccttttttcaggtttatgaaggtgctgtttacatgcatcagggtgccaattacttggttgaggaacttgacttggcatcaaggacagccttctgtaggaaagctgatttgaaatattacacgaaaacacgagactacactgacatcaatgttctcggaggagaatttgcttatcttcctacaagtatatgtagaactaatcgggtgaagacaactgctcaagcaaatgactgcacggtgactactaaatggtttggtttttatcgcatatcaaaatctagcaatacaatatccgacagcttcgagcttaacctgcccccatactcctttacttcccaggctgtttgggtgcgaattccccactcagtaaagatgaccgtggaggaaagcaaactagaatttagaggcggctcacatgctgcttcgcatgcactcctgaatatagtgcctctgcatatgatgtgcagtgcttctgacctaggaacagagtgcgctaatcctcatgaaagccgtggcatcccagacagaatccttttatatgatagacatccaggtggtatcggcatagcatcacaggcccaaatgctcttcgaggaactcctcctggctgctttagaagtcgtttccacgtgcaactgcacaagtgccgttggctgtccaaactgcatccaatcactgacgtgcagcgaatataacgaagttttggacaaggaggcagcgattttgattctgaagggagtaatcgactacgagagatcgtattttgaagcggaagacgcttctcagcgaagctgctgacgtcgaggctacagtaggcagcgaggagtgacgtgttcattactgtttgttcgtttggtgtttctctcgtgtatgtagatgggagaggttcggtctgtatctgcactcacatttgtagcctcgtcatatcaaagttgatatcatatcctacgacaatcaggtccatacatctgtacaacagtacaacccaaacatgtgagagctactggcgagccc

SEQ ID NO: 67119 - DNA, 3459 bp, Zea Mays
gcgtcggcacgtccgccccacctcttcgcttaggcacgcgccaaaaccagtcaccggccgcaatctgccaatctcccgagccgcagtcctacgctccggctcctccacctcctaaccgcatttgttgatgacggcggagcaggagtggagtgaggtccaggtccgggccctcgacgggcgatccacggtcgtcaagctgccccttggcgcctccgtccgggacctcaaggccgcgctccggacgtccttcttgcccgcgcaagtctcccccagcttccacctcttcctgaagggtgctaaattgcgtttagacgctgagattggcagccttgctatcggcgatggggacttcattgttctcgtacccttcacaaggacgccacagcagcatttttcagttagcacagcaagtcaagatcagggccactgtccaccaaaacaaccagaagtgtcttctgcggctaattcagcttggcaagacattatggatgacctctcagcaatgccagccagcccacagtctgatgctgcttccaaagatttttactcctcatgtgacccgtgctctgggagatttacggaggatatgaaagcgggtcaaatttcgacaagtgggtcatcaaggaaaaggaggaaaacatgcaaggaaaacggaaatggttccccacaaatggtgtcctcgtctgaagcaaatggtacagctgagaaacacaacataagcaagaaaagtggggtggccaaatctgctgctatgttatgtcatgatatgcaacctttgaaacctgctgaaatggttgaacatctgaaacaaggacttggaaaggaggggcagatcgtacatatccaagagatatcatctagagaggcatcatttacagaacttccttgtaatctttcagaagctatgagagaagcgctgaagagtattggaatatctagactgtatagccaccagtctcaagccataacatcctctatttctggaaggcacattgtcgttgcaacttctacatcaagtggaaagtctctatgttacaatattcctgttcttgaatgtctttcccaagacttgatggcgtgtgctctgtacatatttccgatgaaggctttagctcaagatcagttgaggactttaataaagttgaagaatgcatctcatattgatgttgatgttaaaatatatgatggtgatactcctagagaagatcgtttgtggatcagggataatgctcgactgttaattaccaacccggatatgttgcatgtgtcaatcttgccgtatcatggtcaattccagagaattttatcaaatctcaggtatattgtcattgatgaagcacattcatacaagggggcatttggctgccatactgcgctcataattcggagattgaagcgtatttgttcaaatgtttatggtagttgtcctacattcatattttgtacagcaacctcagcaaatccatgtgagcatgtcatggaattggccaatttggatgaagtcgagttgattcagaatgatggaagtccttgtggttccaagtactttctcttgtggaatccctcactacctatgacagaaggaaggtcaaaagctagttcagtacataggcgctcaagctcaatagtagaggtttcatatctattttccgagatggttcaacatggcctccgctgcattgcattctgtaaaagtaggaagctatgtgagcttgttctagcttacacgcgtgaaattcttcaggagactgcaaaagaattggtagattctatctgtgtatatcgtgctggctacatagctgaggacagaagaaaaatcgaggctgatctttttggggggaaacttcatggagtcgctgctactaatgctcttgagctaggaattgatgttggacatattgatgcaacattgcatcttggatttcctggtagtattgccagcttgtggcagcaagccggtaggtctggaagaagagctaaacaatcactagccatttatgttgcctttgagggtcctttagatcagtatttcatgaagttcccacataaactatttggcaggtcgattgagcattgccaagttgattcacataatctaaaggttttagaacagcaccttccttgtgctgcttatgaacatcccttgtgcgtgcaatacgatgagtgctactttggctctagtctcgatagtgtaatgacaacccttaaagacaaaggttatatcatcaataatcgagctggacctttttcttcaagcatgtggaactatattggacccgagaaaagcccttcacaggctgtaagcatacgggcaattgagcaggacaggtataaagtgattgacaagttaaatagtcgattacttgaggaaattgaagaaagtaaagccttttttcagggtgccaattacttggttgaggaacttgacttggcatcaaggacagccttctgtaggaaagctgatttgaaatattacacgaaaacacgagactacactgacatcaatgttctcggaggagaatttgtatgttctcaaggctattactactctagcttcctttacattttcttcattattgactcatcccctggagtggttttcagcactttattttgtttactacttttctgtcttgtttatttgactctagtctagttcatcaaatattatgaactcctgcactttgactcttccaatatatgttgaaggcttatcttcctacaagtatatgtagaactaatcgggtgaagacaactgctcaagcaaatgactgcacggtgactactaaatggtttggtttttatcgcatatcaaaatctagcaatacaatatccgacagcttcgagcttaacctgcccccatactcctttacttcccaggctgtttgggtgcgaattccccactcagtaaagatgaccgtggaggaaagcaaactagaatttagaggcggctcacatgctgcttcgcatgcactcctgaatatagtgcctctgcatatgatgtgcagtgcttctgacctaggaacagagtgcgctaatcctcatgaaagccgtggcatcccagacagaatccttttatatgatagacatccaggtggtatcggcatagcatcacagtcactgacgtgcagcgaatataacgaagttttggacaaggaggcagcgattttgattctgaagggagtaatcgactacgagagatcgtattttgaagcggaagacgcttctcagcgaagctgctgacgtcgaggctacagtaggcagcgaggagtgacgtgttcattactgtttgttcgtttggtgtttctctcgtgtatgtagatgggagaggttcggtctgtatctgcactcacatttgtagcctcgtcatatcaaagttgatatcatatcctacgacaatcaggtccatacatctgtacaacagtacaacccaaacatgtgagagctactggcgagccc

SEQ ID NO: 67120 - DNA, 3360 bp, Zea Mays
gcgtcggcacgtccgccccacctcttcgcttaggcacgcgccaaaaccagtcaccggccgcaatctgccaatctcccgagccgcagtcctacgctccggctcctccacctcctaaccgcatttgttgatgacggcggagcaggagtggagtgaggtccaggtccgggccctcgacgggcgatccacggtcgtcaagctgccccttggcgcctccgtccgggacctcaaggccgcgctccggacgtccttcttgcccgcgcaagtctcccccagcttccacctcttcctgaagggtgctaaattgcgtttagacgctgagattggcagccttgctatcggcgatggggacttcattgttctcgtacccttcacaaggacgccacagcagcatttttcagttagcacagcaagtcaagatcagggccactgtccaccaaaacaaccagaagtgtcttctgcggctaattcagcttggcaagacattatggatgacctctcagcaatgccagccagcccacagtctgatgctgcttccaaagatttttactcctcatgtgacccgtgctctgggagatttacggaggatatgaaagcgggtcaaatttcgacaagtgggtcatcaaggaaaaggaggaaaacatgcaaggaaaacggaaatggttccccacaaatggtgtcctcgtctgaagcaaatggtacagctgagaaacacaacataagcaagaaaagtggggtggccaaatctgctgctatgttatgtcatgatatgcaacctttgaaacctgctgaaatggttgaacatctgaaacaaggacttggaaaggaggggcagatcgtacatatccaagagatatcatctagagaggcatcatttacagaacttccttgtaatctttcagaagctatgagagaagcgctgaagagtattggaatatctagactgtatagccaccagtctcaagccataacatcctctatttctggaaggcacattgtcgttgcaacttctacatcaagtggaaagtctctatgttacaatattcctgttcttgaatgtctttcccaagacttgatggcgtgtgctctgtacatatttccgatgaaggctttagctcaagatcagttgaggactttaataaagttgaagaatgcatctcatattgatgttgatgttaaaatatatgatggtgatactcctagagaagatcgtttgtggatcagggataatgctcgactgttaattaccaacccggatatgttgcatgtgtcaatcttgccgtatcatggtcaattccagagaattttatcaaatctcaggtatattgtcattgatgaagcacattcatacaagggggcatttggctgccatactgcgctcataattcggagattgaagcgtatttgttcaaatgtttatggtagttgtcctacattcatattttgtacagcaacctcagcaaatccatgtgagcatgtcatggaattggccaatttggatgaagtcgagttgattcagaatgatggaagtccttgtggttccaagtactttctcttgtggaatccctcactacctatgacagaaggaaggtcaaaagctagttcagtacataggcgctcaagctcaatagtagaggtttcatatctattttccgagatggttcaacatggcctccgctgcattgcattctgtaaaagtaggaagctatgtgagcttgttctagcttacacgcgtgaaattcttcaggagactgcaaaagaattggtagattctatctgtgtatatcgtgctggctacatagctgaggacagaagaaaaatcgaggctgatctttttggggggaaacttcatggagtcgctgctactaatgctcttgagctaggaattgatgttggacatattgatgcaacattgcatcttggatttcctggtagtattgccagcttgtggcagcaagccggtaggtctggaagaagagctaaacaatcactagccatttatgttgcctttgagggtcctttagatcagtatttcatgaagttcccacataaactatttggcaggttttagaacagcaccttccttgtgctgcttatgaacatcccttgtgcgtgcaatacgatgagtgctactttggctctagtctcgatagtgtaatgacaacccttaaagacaaaggttatatcatcaataatcgagctggacctttttcttcaagcatgtggaactatattggacccgagaaaagcccttcacaggctgtaagcatacgggcaattgagcaggacaggtataaagtgattgacaagttaaatagtcgattacttgaggaaattgaagaaagtaaagccttttttcaggtttatgaaggtgctgtttacatgcatcagggtgccaattacttggttgaggaacttgacttggcatcaaggacagccttctgtaggaaagctgatttgaaatattacacgaaaacacgagactacactgacatcaatgttctcggaggagaatttgcttatcttcctacaagtatatgtagaactaatcgggtgaagacaactgctcaagcaaatgactgcacggtgactactaaatggtttggtttttatcgcatatcaaaatctagcaatacaatatccgacagcttcgagcttaacctgcccccatactcctttacttcccaggctgtttgggtgcgaattccccactcagtaaagatgaccgtggaggaaagcaaactagaatttagaggcggctcacatgctgcttcgcatgcactcctgaatatagtgcctctgcatatgatgtgcagtgcttctgacctaggaacagagtgcgctaatcctcatgaaagccgtggcatcccagacagaatccttttatatgatagacatccaggtggtatcggcatagcatcacaggcccaaatgctcttcgaggaactcctcctggctgctttagaagtcgtttccacgtgcaactgcacaagtgccgttggctgtccaaactgcatccaatcactgacgtgcagcgaatataacgaagttttggacaaggaggcagcgattttgattctgaagggagtaatcgactacgagagatcgtattttgaagcggaagacgcttctcagcgaagctgctgacgtcgaggctacagtaggcagcgaggagtgacgtgttcattactgtttgttcgtttggtgtttctctcgtgtatgtagatgggagaggttcggtctgtatctgcactcacatttgtagcctcgtcatatcaaagttgatatcatatcctacgacaatcaggtccatacatctgtacaacagtacaacccaaacatgtgagagctactggcgagccc

SEQ ID NO: 67121 - DNA, 3304 bp, Zea Mays
gcgtcggcacgtccgccccacctcttcgcttaggcacgcgccaaaaccagtcaccggccgcaatctgccaatctcccgagccgcagtcctacgctccggctcctccacctcctaaccgcatttgttgatgacggcggagcaggagtggagtgaggtccaggtccgggccctcgacgggcgatccacggtcgtcaagctgccccttggcgcctccgtccgggacctcaaggccgcgctccggacgtccttcttgcccgcgcaagtctcccccagcttccacctcttcctgaagggtgctaaattgcgtttagacgctgagattggcagccttgctatcggcgatggggacttcattgttctcgtacccttcacaaggacgccacagcagcatttttcagttagcacagcaagtcaagatcagggccactgtccaccaaaacaaccagaagtgtcttctgcggctaattcagcttggcaagacattatggatgacctctcagcaatgccagccagcccacagtctgatgctgcttccaaagatttttactcctcatgtgacccgtgctctgggagatttacggaggatatgaaagcgggtcaaatttcgacaagtgggtcatcaaggaaaaggaggaaaacatgcaaggaaaacggaaatggttccccacaaatggtgtcctcgtctgaagcaaatggtacagctgagaaacacaacataagcaagaaaagtggggtggccaaatctgctgctatgttatgtcatgatatgcaacctttgaaacctgctgaaatggttgaacatctgaaacaaggacttggaaaggaggggcagatcgtacatatccaagagatatcatctagagaggcatcatttacagaacttccttgtaatctttcagaagctatgagagaagcgctgaagagtattggaatatctagactgtatagccaccagtctcaagccataacatcctctatttctggaaggcacattgtcgttgcaacttctacatcaagtggaaagtctctatgttacaatattcctgttcttgaatgtctttcccaagacttgatggcgtgtgctctgtacatatttccgatgaaggctttagctcaagatcagttgaggactttaataaagttgaagaatgcatctcatattgatgttgatgttaaaatatatgatggtgatactcctagagaagatcgtttgtggatcagggataatgctcgactgttaattaccaacccggatatgttgcatgtgtcaatcttgccgtatcatggtcaattccagagaattttatcaaatctcaggtatattgtcattgatgaagcacattcatacaagggggcatttggctgccatactgcgctcataattcggagattgaagcgtatttgttcaaatgtttatggtagttgtcctacattcatattttgtacagcaacctcagcaaatccatgtgagcatgtcatggaattggccaatttggatgaagtcgagttgattcagaatgatggaagtccttgtggttccaagtactttctcttgtggaatccctcactacctatgacagaaggaaggtcaaaagctagttcagtacataggcgctcaagctcaatagtagaggtttcatatctattttccgagatggttcaacatggcctccgctgcattgcattctgtaaaagtaggaagctatgtgagcttgttctagcttacacgcgtgaaattcttcaggagactgcaaaagaattggtagattctatctgtgtatatcgtgctggctacatagctgaggacagaagaaaaatcgaggctgatctttttggggggaaacttcatggagtcgctgctactaatgctcttgagctaggaattgatgttggacatattgatgcaacattgcatcttggatttcctggtagtattgccagcttgtggcagcaagccggtaggtctggaagaagagctaaacaatcactagccatttatgttgcctttgagggtcctttagatcagtatttcatgaagttcccacataaactatttggcaggtcgattgagcattgccaagttgattcacataatctaaaggttttagaacagcaccttccttgtgctgcttatgaacatcccttgtgcgtgcaatacgatgagtgctactttggctctagtctcgatagtgtaatgacaacccttaaagacaaaggttatatcatcaataatcgagctggacctttttcttcaagcatgtggaactatattggacccgagaaaagcccttcacaggctgtaagcatacgggcaattgagcaggacaggtataaagtgattgacaagttaaatagtcgattacttgaggaaattgaagaaagtaaagccttttttcaggtttatgaaggtgctgtttacatgcatcagggtgccaattacttggttgaggaacttgacttggcatcaaggacagccttctgtaggaaagctgatttgaaatattacacgaaaacacgagactacactgacatcaatgttctcggaggagaatttgcttatcttcctacaagtatatgtagaactaatcgggtgaagacaactgctcaagcaaatgactgcacggtgactactaaatggtttggtttttatcgcatatcaaaatctagcaatacaatatccgacagcttcgagcttaacctgcccccatactcctttacttcccaggctgtttgggtgcgaattccccactcagtaaagatgaccgtggaggaaagcaaactagaatttagaggcggctcacatgctgcttcgcatgcactcctgaatatagtgcctctgcatatgatgtgcagtgcttctgacctaggaacagagtgcgctaatcctcatgaaagccgtggcatcccagacagaatccttttatatgatagacatccaggtggtatcggcatagcatcacagtcactgacgtgcagcgaatataacgaagttttggacaaggaggcagcgattttgattctgaagggagtaatcgactacgagagatcgtattttgaagcggaagacgcttctcagcgaagctgctgacgtcgaggctacagtaggcagcgaggagtgacgtgttcattactgtttgttcgtttggtgtttctctcgtgtatgtagatgggagaggttcggtctgtatctgcactcacatttgtagcctcgtcatatcaaagttgatatcatatcctacgacaatcaggtccatacatctgtacaacagtacaacccaaacatgtgagagctactggcgagccc

SEQ ID NO: 67122 - DNA, 3273 bp, Zea Mays
gcgtcggcacgtccgccccacctcttcgcttaggcacgcgccaaaaccagtcaccggccgcaatctgccaatctcccgagccgcagtcctacgctccggctcctccacctcctaaccgcatttgttgatgacggcggagcaggagtggagtgaggtccaggtccgggccctcgacgggcgatccacggtcgtcaagctgccccttggcgcctccgtccgggacctcaaggccgcgctccggacgtccttcttgcccgcgcaagtctcccccagcttccacctcttcctgaagacgctgagattggcagccttgctatcggcgatggggacttcattgttctcgtacccttcacaaggacgccacagcagcatttttcagttagcacagcaagtcaagatcagggccactgtccaccaaaacaaccagaagtgtcttctgcggctaattcagcttggcaagacattatggatgacctctcagcaatgccagccagcccacagtctgatgctgcttccaaagatttttactcctcatgtgacccgtgctctgggagatttacggaggatatgaaagcgggtcaaatttcgacaagtgggtcatcaaggaaaaggaggaaaacatgcaaggaaaacggaaatggttccccacaaatggtgtcctcgtctgaagcaaatggtacagctgagaaacacaacataagcaagaaaagtggggtggccaaatctgctgctatgttatgtcatgatatgcaacctttgaaacctgctgaaatggttgaacatctgaaacaaggacttggaaaggaggggcagatcgtacatatccaagagatatcatctagagaggcatcatttacagaacttccttgtaatctttcagaagctatgagagaagcgctgaagagtattggaatatctagactgtatagccaccagtctcaagccataacatcctctatttctggaaggcacattgtcgttgcaacttctacatcaagtggaaagtctctatgttacaatattcctgttcttgaatgtctttcccaagacttgatggcgtgtgctctgtacatatttccgatgaaggctttagctcaagatcagttgaggactttaataaagttgaagaatgcatctcatattgatgttgatgttaaaatatatgatggtgatactcctagagaagatcgtttgtggatcagggataatgctcgactgttaattaccaacccggatatgttgcatgtgtcaatcttgccgtatcatggtcaattccagagaattttatcaaatctcaggtatattgtcattgatgaagcacattcatacaagggggcatttggctgccatactgcgctcataattcggagattgaagcgtatttgttcaaatggaattggccaatttggatgaagtcgagttgattcagaatgatggaagtccttgtggttccaagtactttctcttgtggaatccctcactacctatgacagaaggaaggtcaaaagctagttcagtacataggcgctcaagctcaatagtagaggtttcatatctattttccgagatggttcaacatggcctccgctgcattgcattctgtaaaagtaggaagctatgtgagcttgttctagcttacacgcgtgaaattcttcaggagactgcaaaagaattggtagattctatctgtgtatatcgtgctggctacatagctgaggacagaagaaaaatcgaggctgatctttttggggggaaacttcatggagtcgctgctactaatgctcttgagctaggaattgatgttggacatattgatgcaacattgcatcttggatttcctggtagtattgccagcttgtggcagcaagccggtaggtctggaagaagagctaaacaatcactagccatttatgttgcctttgagggtcctttagatcagtatttcatgaagttcccacataaactatttggcaggttttagaacagcaccttccttgtgctgcttatgaacatcccttgtgcgtgcaatacgatgagtgctactttggctctagtctcgatagtgtaatgacaacccttaaagacaaaggttatatcatcaataatcgagctggacctttttcttcaagcatgtggaactatattggacccgagaaaagcccttcacaggctgtaagcatacgggcaattgagcaggacaggtataaagtgattgacaagttaaatagtcgattacttgaggaaattgaagaaagtaaagccttttttcaggtttatgaaggtgctgtttacatgcatcagggtgccaattacttggttgaggaacttgacttggcatcaaggacagccttctgtaggaaagctgatttgaaatattacacgaaaacacgagactacactgacatcaatgttctcggaggagaatttgcttatcttcctacaagtatatgtagaactaatcgggtgaagacaactgctcaagcaaatgactgcacggtgactactaaatggtttggtttttatcgcatatcaaaatctagcaatacaatatccgacagcttcgagcttaacctgcccccatactcctttacttcccaggctgtttgggtgcgaattccccactcagtaaagatgaccgtggaggaaagcaaactagaatttagaggcggctcacatgctgcttcgcatgcactcctgaatatagtgcctctgcatatgatgtgcagtgcttctgacctaggaacagagtgcgctaatcctcatgaaagccgtggcatcccagacagaatccttttatatgatagacatccaggtggtatcggcatagcatcacaggcccaaatgctcttcgaggaactcctcctggctgctttagaagtcgtttccacgtgcaactgcacaagtgccgttggctgtccaaactgcatccaatcactgacgtgcagcgaatataacgaagttttggacaaggaggcagcgattttgattctgaagggagtaatcgactacgagagatcgtattttgaagcggaagacgcttctcagcgaagctgctgacgtcgaggctacagtaggcagcgaggagtgacgtgttcattactgtttgttcgtttggtgtttctctcgtgtatgtagatgggagaggttcggtctgtatctgcactcacatttgtagcctcgtcatatcaaagttgatatcatatcctacgacaatcaggtccatacatctgtacaacagtacaacccaaacatgtgagagctactggcgagccc

SEQ ID NO: 67123 - DNA, 3473 bp, Zea Mays
gcgtcggcacgtccgccccacctcttcgcttaggcacgcgccaaaaccagtcaccggccgcaatctgccaatctcccgagccgcagtcctacgctccggctcctccacctcctaaccgcatttgttgatgacggcggagcaggagtggagtgaggtccaggtccgggccctcgacgggcgatccacggtcgtcaagctgccccttggcgcctccgtccgggacctcaaggccgcgctccggacgtccttcttgcccgcgcaagtctcccccagcttccacctcttcctgaagggtgctaaattgcgtttagacgctgagattggcagccttgctatcggcgatggggacttcattgttctcgtacccttcacaaggacgccacagcagcatttttcagttagcacagcaagtcaagatcagggccactgtccaccaaaacaaccagaagtgtcttctgcggctaattcagcttggcaagacattatggatgacctctcagcaatgccagccagcccacagtctgatgctgcttccaaagatttttactcctcatgtgacccgtgctctgggagatttacggaggatatgaaagcgggtcaaatttcgacaagtgggtcatcaaggaaaaggaggaaaacatgcaaggaaaacggaaatggttccccacaaatggtgtcctcgtctgaagcaaatggtacagctgagaaacacaacataagcaagaaaagtggggtggccaaatctgctgctatgttatgtcatgatatgcaacctttgaaacctgctgaaatggttgaacatctgaaacaaggacttggaaaggaggggcagatcgtacatatccaagagatatcatctagagaggcatcatttacagaacttccttgtaatctttcagaagctatgagagaagcgctgaagagtattggaatatctagactgtatagccaccagtctcaagccataacatcctctatttctggaaggcacattgtcgttgcaacttctacatcaagtggaaagtctctatgttacaatattcctgttcttgaatgtctttcccaagacttgatggcgtgtgctctgtacatatttccgatgaaggctttagctcaagatcagttgaggactttaataaagttgaagaatgcatctcatattgatgttgatgttaaaatatatgatggtgatactcctagagaagatcgtttgtggatcagggataatgctcgactgttaattaccaacccggatatgttgcatgtgtcaatcttgccgtatcatggtcaattccagagaattttatcaaatctcaggtatattgtcattgatgaagcacattcatacaagggggcatttggctgccatactgcgctcataattcggagattgaagcgtatttgttcaaatgtttatggtagttgtcctacattcatattttgtacagcaacctcagcaaatccatgtgagcatgtcatggaattggccaatttggatgaagtcgagttgattcagaatgatggaagtccttgtggttccaagtactttctcttgtggaatccctcactacctatgacagaaggaaggtcaaaagctagttcagtacataggcgctcaagctcaatagtagaggtttcatatctattttccgagatggttcaacatggcctccgctgcattgcattctgtaaaagtaggaagctatgtgagcttgttctagcttacacgcgtgaaattcttcaggagactgcaaaagaattggtagattctatctgtgtatatcgtgctggctacatagctgagaagaaaaatcgaggctgatctttttggggggaaacttcatggagtcgctgctactaatgctcttgagctaggaattgatgttggacatattgatgcaacattgcatcttggatttcctggtagtattgccaggtcggtgaagaatgacatattcaatgaagctcaatgtttatcttgtcaccctgctaagatacaaaattttaactgcagcttgtggcagcaagccggtaggtctggaagaagagctaaacaatcactagccatttatgttgcctttgagggtcctttagatcagtatttcatgaagttcccacataaactatttggcaggtcgattgagcattgccaagttgattcacataatctaaaggttttagaacagcaccttccttgtgctgcttatgaacatcccttgtgcgtgcaatacgatgagtgctactttggctctagtctcgatagtgtaatgacaacccttaaagacaaaggttatatcatcaataatcgagctggacctttttcttcaagcatgtggaactatattggacccgagaaaagcccttcacaggctgtaagcatacgggcaattgagcaggacaggtataaagtgattgacaagttaaatagtcgattacttgaggaaattgaagaaagtaaagccttttttcaggtttatgaaggtgctgtttacatgcatcagggtgccaattacttggttgaggaacttgacttggcatcaaggacagccttctgtaggaaagctgatttgaaatattacacgaaaacacgagactacactgacatcaatgttctcggaggagaatttgcttatcttcctacaagtatatgtagaactaatcgggtgaagacaactgctcaagcaaatgactgcacggtgactactaaatggtttggtttttatcgcatatcaaaatctagcaatacaatatccgacagcttcgagcttaacctgcccccatactcctttacttcccaggctgtttgggtgcgaattccccactcagtaaagatgaccgtggaggaaagcaaactagaatttagaggcggctcacatgctgcttcgcatgcactcctgaatatagtgcctctgcatatgatgtgcagtgcttctgacctaggaacagagtgcgctaatcctcatgaaagccgtggcatcccagacagaatccttttatatgatagacatccaggtggtatcggcatagcatcacaggcccaaatgctcttcgaggaactcctcctggctgctttagaagtcgtttccacgtgcaactgcacaagtgccgttggctgtccaaactgcatccaatcactgacgtgcagcgaatataacgaagttttggacaaggaggcagcgattttgattctgaagggagtaatcgactacgagagatcgtattttgaagcggaagacgcttctcagcgaagctgctgacgtcgaggctacagtaggcagcgaggagtgacgtgttcattactgtttgttcgtttggtgtttctctcgtgtatgtagatgggagaggttcggtctgtatctgcactcacatttgtagcctcgtcatatcaaagttgatatcatatcctacgacaatcaggtccatacatctgtacaacagtacaacccaaacatgtgagagctactggcgagccc

SEQ ID NO: 67124 - DNA, 3184 bp, Zea Mays
gcgtcggcacgtccgccccacctcttcgcttaggcacgcgccaaaaccagtcaccggccgcaatctgccaatctcccgagccgcagtcctacgctccggctcctccacctcctaaccgcatttgttgatgacggcggagcaggagtggagtgaggtccaggtccgggccctcgacgggcgatccacggtcgtcaagctgccccttggcgcctccgtccgggacctcaaggccgcgctccggacgtccttcttgcccgcgcaagtctcccccagcttccacctcttcctgaagggtgctaaattgcgtttagacgctgagattggcagccttgctatcggcgatggggacttcattgttctcgtacccttcacaaggacgccacagcagcatttttcagttagcacagcaagtcaagatcagggccactgtccaccaaaacaaccagaagtgtcttctgcggctaattcagcttggcaagacattatggatgacctctcagcaatgccagccagcccacagtctgatgctgcttccaaagatttttactcctcatgtgacccgtgctctgggagatttacggaggatatgaaagcgggtcaaatttcgacaagtgggtcatcaaggaaaaggaggaaaacatgcaaggaaaacggaaatggttccccacaaatggtgtcctcgtctgaagcaaatggtacagctgagaaacacaacataagcaagaaaagtggggtggccaaatctgctgctatgttatgtcatgatatgcaacctttgaaacctgctgaaatggttgaacatctgaaacaaggacttggaaaggaggggcagatcgtacatatccaagagatatcatctagagaggcatcatttacagaacttccttgtaatctttcagaagctatgagagaagcgctgaagagtattggaatatctagactgtatagccaccagtctcaagccataacatcctctatttctggaaggcacattgtcgttgcaacttctacatcaagtggaaagtctctatgttacaatattcctgttcttgaatgtctttcccaagacttgatggcgtgtgctctgtacatatttccgatgaaggctttagctcaagatcagttgaggactttaataaagttgaagaatgcatctcatattgatgttgatgttaaaatatatgatggtgatactcctagagaagatcgtttgtggatcagggataatgctcgactgttaattaccaacccggatatgttgcatgtgtcaatcttgccgtatcatggtcaattccagagaattttatcaaatctcaggtatattgtcattgatgaagcacattcatacaagggggcatttggctgccatactgcgctcataattcggagattgaagcgtatttgttcaaatgtagaggtttcatatctattttccgagatggttcaacatggcctccgctgcattgcattctgtaaaagtaggaagctatgtgagcttgttctagcttacacgcgtgaaattcttcaggagactgcaaaagaattggtagattctatctgtgtatatcgtgctggctacatagctgaggacagaagaaaaatcgaggctgatctttttggggggaaacttcatggagtcgctgctactaatgctcttgagctaggaattgatgttggacatattgatgcaacattgcatcttggatttcctggtagtattgccagcttgtggcagcaagccggtaggtctggaagaagagctaaacaatcactagccatttatgttgcctttgagggtcctttagatcagtatttcatgaagttcccacataaactatttggcaggtcgattgagcattgccaagttgattcacataatctaaaggttttagaacagcaccttccttgtgctgcttatgaacatcccttgtgcgtgcaatacgatgagtgctactttggctctagtctcgatagtgtaatgacaacccttaaagacaaaggttatatcatcaataatcgagctggacctttttcttcaagcatgtggaactatattggacccgagaaaagcccttcacaggctgtaagcatacgggcaattgagcaggacaggtataaagtgattgacaagttaaatagtcgattacttgaggaaattgaagaaagtaaagccttttttcaggtttatgaaggtgctgtttacatgcatcagggtgccaattacttggttgaggaacttgacttggcatcaaggacagccttctgtaggaaagctgatttgaaatattacacgaaaacacgagactacactgacatcaatgttctcggaggagaatttgcttatcttcctacaagtatatgtagaactaatcgggtgaagacaactgctcaagcaaatgactgcacggtgactactaaatggtttggtttttatcgcatatcaaaatctagcaatacaatatccgacagcttcgagcttaacctgcccccatactcctttacttcccaggctgtttgggtgcgaattccccactcagtaaagatgaccgtggaggaaagcaaactagaatttagaggcggctcacatgctgcttcgcatgcactcctgaatatagtgcctctgcatatgatgtgcagtgcttctgacctaggaacagagtgcgctaatcctcatgaaagccgtggcatcccagacagaatccttttatatgatagacatccaggtggtatcggcatagcatcacaggcccaaatgctcttcgaggaactcctcctggctgctttagaagtcgtttccacgtgcaactgcacaagtgccgttggctgtccaaactgcatccaatcactgacgtgcagcgaatataacgaagttttggacaaggaggcagcgattttgattctgaagggagtaatcgactacgagagatcgtattttgaagcggaagacgcttctcagcgaagctgctgacgtcgaggctacagtaggcagcgaggagtgacgtgttcattactgtttgttcgtttggtgtttctctcgtgtatgtagatgggagaggttcggtctgtatctgcactcacatttgtagcctcgtcatatcaaagttgatatcatatcctacgacaatcaggtccatacatctgtacaacagtacaacccaaacatgtgagagctactggcgagccc

SEQ ID NO: 67125 - DNA, 1849 bp, Zea Mays
gtcttagtcaaccctgtgccttgatgtggtaggctgctgtgcatcctcagtggcttaggtcttgaccagaattggccaatttggatgaagtcgagttgattcagaatgatggaagtccttgtggttccaagtactttctcttgtggaatccctcactacctatgacagaaggaaggtcaaaagctagttcagtacataggcgctcaagctcaatagtagaggtttcatatctattttccgagatggttcaacatggcctccgctgcattgcattctgtaaaagtaggaagctatgtgagcttgttctagcttacacgcgtgaaattcttcaggagactgcaaaagaattggtagattctatctgtgtatatcgtgctggctacatagctgaggacagaagaaaaatcgaggctgatctttttggggggaaacttcatggagtcgctgctactaatgctcttgagctaggaattgatgttggacatattgatgcaacattgcatcttggatttcctggtagtattgccagcttgtggcagcaagccggtaggtctggaagaagagctaaacaatcactagccatttatgttgcctttgagggtcctttagatcagtatttcatgaagttcccacataaactatttggcaggtcgattgagcattgccaagttgattcacataatctaaaggttttagaacagcaccttccttgtgctgcttatgaacatcccttgtgcgtgcaatacgatgagtgctactttggctctagtctcgatagtgtaatgacaacccttaaagacaaaggttatatcatcaataatcgagctggacctttttcttcaagcatgtggaactatattggacccgagaaaagcccttcacaggctgtaagcatacgggcaattgagcaggacaggtataaagtgattgacaagttaaatagtcgattacttgaggaaattgaagaaagtaaagccttttttcaggtttatgaaggtgctgtttacatgcatcagggtgccaattacttggttgaggaacttgacttggcatcaaggacagccttctgtaggaaagctgatttgaaatattacacgaaaacacgagactacactgacatcaatgttctcggaggagaatttaactaatcgggtgaagacaactgctcaagcaaatgactgcacggtgactactaaatggtttggtttttatcgcatatcaaaatctagcaatacaatatccgacagcttcgagcttaacctgcccccatactcctttacttcccaggcatatgatgtgcagtgcttctgacctaggaacagagtgcgctaatcctcatgaaagccgtggcatcccagacagaatccttttatatgatagacatccaggtggtatcggcatagcatcacaggcccaaatgctcttcgaggaactcctcctggctgctttagaagtcgtttccacgtgcaactgcacaagtgccgttggctgtccaaactgcatccaatcactgacgtgcagcgaatataacgaagttttggacaaggaggcagcgattttgattctgaagggagtaatcgactacgagagatcgtattttgaagcggaagacgcttctcagcgaagctgctgacgtcgaggctacagtaggcagcgaggagtgacgtgttcattactgtttgttcgtttggtgtttctctcgtgtatgtagatgggagaggttcggtctgtatctgcactcacatttgtagcctcgtcatatcaaagttgatatcatatcctacgacaatcaggtccatacatctgtacaacagtacaacccaaacatgtgagagctactggcgagccc

SEQ ID NO: 67126 - DNA, 2572 bp, Zea Mays
caaaaatatgtgaattataaatgtaaaaacaatatgattcactatcatgtctgcattttctataataaagagacaagaatatatcacaacagtctaaatatccgaatttagacccactaacattgactgagacagtaactgaacaatcagagtctttatatactagaaaattgcagaaaataagagaataaagttataaaattcgtatgtccgatcagtggaaatagcccacgctgttcatccaagacaagtcggcccatgaggcccaactaggagtgtccatatgaacaaacagttagagttagaaccctaactgttcatctcgtcctccttccccgatggcggccggcgcggccctgcagccagcgtgggcgcgcggccccggcgagcgcggcccggcgcaggcacagcagcctcgacgccgatcctctctggcgcgtggcgccgaccatggcccagcccgacgcggctgcggcggtccggtggcctggcccccacgcctagcatggggcccggcgcggctgcccggccacggcacgggcgcgtaggcgacggccccgtccctgacggcgcgcgggcgcagccccggtgtggcgggcacggcctccagcgggcgcggccttagccgcggaggcgagcgcgcggcctcggcccgatggcgggcgcggccccgtgggcggcgcgtgggcgctaggccccatgcgcgacggtgcgggcgcgaggccccctacgcgacggtgtgcgcgcatgggcaggcggccccgacgggcgtctcccctgtccaggcctcggcggcctctgcggtgcggccccaccatcctgcgggctcgtggccacggcatgagtgtgctgccacggctgggcggtcgggcaccggcgcgggcacgaccccatcctggcacaggcgccatagccatgcccgcatgcgccttggccgtcgtcgctgttcacttggatgcaggcaagcaaaagcctgcaggtctcaagcgcaggagtggcagaaatattcattaataatgaacttaacaccaaggagcactgcttgtgcgtgcggcaattggacagggacttcatgcagaaaccgtttgttgatggcagcgacctattcttgtcgagaacaacaagtattttccttcgcatccctctgatttctccgtgagacagtgctgataacgtgttatagtatactcagtggtaatgagattgagagagagacaaatgaccgaactgttgtattgatctcatgaagtgtgtacatatatatatacatagtgaggagacacatcgcacccctcggaattagatcacatgaaaggttttctaacagcagcgtccacctcgcgcatggcggcgcttctctgttcccatgcgctgcgaggtgacacaacaggagtctggcgacagccctcaggcaagaaggaacggctcgctctcgcggcccgcatctccgatgcgtgggagtctgggagacaagcgctgcgacggtggatccggcggcccacgggcgtgggagacgaagacgagcgattataaacgcccctcaatgacaaggactcgtcatctgctccactgccactgcccttatcatcattcatcagcggcctgcctgcacgagataccgagggacaggacagggagatccatggccgcgtcagaccaaccgccgaggccagagaagcccccgctgccgtggcgcgcgaggctgcttgtgggcgccgcgtccgcgctgcacgccgcctcgctccgccgcgacggcaccgttaaccgcttcctgctctccctcttcgaccgcgccgcaccgcccaccccgacggcccccctcggcggcgtggcatctacggaccacgccgtctccgaccacctgcgcgcccgccttttcgtcccggagacccccggcggcggcaacgagctcccggtggtcgtgtacttccacggcggcggtttcgtcttccactccgcggcgtcggccatcccggccgtcatcgcctccgtcgactaccgcctcgcccccgagcaccgcttcccggctccctacgacgacggcgaggcagccctccggtgggccctcgccggcgcggcaggcgcgctgccgtatccccccgacgccgtcgcgggcctcctcgccgtgcagcctttcttcagcggcgaggcgccgacggggtcggagatgcggctccgcgacgccccgttcgggagccccgagcggctggcgtggctgtggcgcgcgttcctgccgcccggcgccacgcgggaccacgaggccgccaacgtgcccgccgcgatcaggcgcgacgcgggcgcgggcgcggaccggtggcgggcgttcccgcccacgctggtgtgcgtcggcgggtgggacgtgcatcaggacaggcagagggcgtacgcggatgcgctccgcgccgtgtgctccgaggaggtcaccgtggcggagtacccggacgccatccacgccttctacgtgttggacgacctcgcggacagcaagaagtttgtgggtgacgtcgcggagttcgtgaaccggcatgcacaacagcggaagaaacccgcactagaccatgccaaggactag

SEQ ID NO: 67127 - DNA, 1734 bp, Zea Mays
gttcctggaatctccctctcgcttattcacatcgttctattctaggatcttctctcgcgtacattcttcaattccagaagtctcccgtacgtctcctggactacagcacggtgagctcctctcaacacgcgcacgcttatctcctggccgcgccgctctgcgcctgggatatttctgtcgcccagcgctccgttcctgctcccgcgccgccgctcctgcccttttccatggacgtctcccagctcgccagcgcctagtgctcctccatggccgctgctccttccctggtcgcggccgccgtcgagtcgtcggattcgttcctcccctgctcaccccatggccgacgtctcctctaccagtgctccttccagcgctcggcctccagctcctacgcgcgctccgtcttcccctgccgcgaccccgtggaactcccagctcgtgctcacaatccccatcacctatgcgtccactctagcatctccctcatgcgtcctctgcgcgagcgaatctgccttggtccgaccagcgatacctccgccggctccctgatgctcacgcgcgtcagctgcttctccgcctattgcacttgattcctcgtgtcttctcgtcaagctcgtggccacggctccctgatgcctcgtcatccctgttctccctcacatctgagctcgcctctgcgtgttcgtatggcgccacagcggtctcataccagcaaccactgctgatgtccgtggttaggacagcaggtgcgctagttgagcacttgatgcgaaggaccagtgctgagtcgaccacaagatgctgttaatcgtgggcttcttcgcaaggcgatgcggacgaacgaacttaaggatggatgacccgaacaagtgccagaccaaaagctgatcgccaagtggacgtcgtctaacaaacactaacctagtgttattccaggcaagccccggtgcatttgccacctccttgttgttataaaacttttatcacttatatgctgcattaggtgataggagttgagtgatgaaacaattgatgcattgccattccttggaatttgattctcctccttgctacctcttttataaagagaactaatgaggcttagccctgcctagagaaattaaaagttgattcttttaaaaagaatgatgtggaacactgttatgggcttttgtttaaaaatcaaagcaaacttatggtgatgattccccttcggccggagtgggttcatcattcggaaaagagtacccctgccgggtaccaaaaatgggagaatggttggaataaatctagaccagacgctgagcaggaaaggtcgcccgtctgtgtcgcttaaggaccgtaccgaaagtaggcttgctgatctaggaccctttaactggccacatgcctcatcatgggtaagctttgcctcggtcggaccaataccagaacagctcgcacgcactgggagtggagagatggcgagagtagcttgtaccctccgtggcaagagactggaaggtggggtgctgtactctcggaaacatggcgggcaccatggcgagagtaacgtgtaccaaccaggccaatggctggacggtggagtgctgtgctctcgggtcgcgtgaacccgttctggtcttgagaaacccgtgggcgagttgacatatgcaagggttaagtgctacatatgtcgtgtggttggagatcctcagctgagtattaatcgattcggatcgccgttacttctcg

SEQ ID NO: 67128 - DNA, 3144 bp, Zea Mays
atcttctctcgcgtacattcttcaattccagaagtctcccgtacgtctcctggactacagcacggtgagctcctctcaacacgcgcacgcttatctcctggccgcgccgctctgcgcctgggatatttctgtcgcccagcgctccgttcctgctcccgcgccgccgctcctgcccttttccatggacgtctcccagctcgccagcgcctagtgctcctccatggccgctgctccttccctggtcgcggccgccgtcgagtcgtcggattcgttcctcccctgctcaccccatggccgacgtctcctctaccagtgctccttccagcgctcggcctccagctcctacgcgcgctccgtcttcccctgccgcgaccccgtggaactcccagctcgtgctcacaatccccatcacctatgcgtccactctagcatctccctcatgcgtcctctgcgcgagcgaatctgccttggtccgaccagcgatacctccgccggctccctgatgctcacgcgcgtcagctgcttctccgcctattgcacttgattccttagcgtgtcttctcgtcaagctcgtggccacggctccctgatgcctcgtcatccctgttctccctcacatctgagctcgcctctgcgtgttcgtatggcgccacagcggtctcataccagcaaccactgctgatgtccgtggttaggacagcaggtatgatcgacaaaatctcaatccgtgtgtagcgatctgtatttcactgtggtggtatggtatgtgtgtagcagtatacgactgtcgtggaaggctagagtgtgtaggcagtgaaggtccatgcagcgtccgttatgtgttcggcaaaacgcccaaaccatgattcatcgtcgatttgcaatttatcaaatcgttttggtcatggtgagcggatgggtattcgtgataattagatcattaaataaattaatgggttagtgtggtgatcccttaatttagtatatgtgccattggtaattatggctagatccgttgtcgtgccggtgtgctgttgtactgttgggtggtgaaaatagctctagcgcagcactcctcggatgttcggtaaaatggggaaactgtagatcgtcgtcgatctcgttaattcgagttctaattagttgcggtgtacggaatcattgctctagctatctggtttgttttattaatgatatatattaattgtgatgattctcgtattttttttaaaagcaagagtggtacctggtgatttaatcacatcgtctaataaccgttagctcataggttatgtgaaggatgctttgataactgtatgtgtcgagtatgattaactatatgttatgcatgtgataagtggtacgattaatattatgtagaatgcttgttgaaatactatgtctagtgtgatggaattggttctatgtttgtagggaatggcatatcggtaatgagtaggatggattgatgtttctagcaatcagtcgataacttatattattgttatttatgcctagtgtgctgtcggatagagatgataccttatcatatcagacatcacattctataggtttattaatatattaaatgtcataaataaataattgttattacccaaaataattaggaggcgagtaagatcgataagttcgtttatgtgaaagcttgagaactgccagtggagagtgcttataaacgctctagatctttagttgttaggaaagtcgttttgtagaactctatgcgataggattatgttctacttattagaaccattagttgggtgctttatttagtcgatatgctttgcataatattttagaatagtaattttaaagctaattgtaaagctactaattgttaccctaagtccgaggtatactagattaattgacctaagtattgttagtctttggtgttaggtgttagttaagaaagaaataaaatttatgcttagtgtgttgtttcgtgatgtttgagctagcaccggatgagcataagaagcgcgaatattatagttagtcttatcgacagctggcgcttcttgtaattggttctaaggtcttgttagtagcgtgtaatcctcgaccgtgtaacgttgtctagtattgtgctatttcttatattcatacatgtgcattttgcatttcattaggtgcgctagttgagcacttgatgcgaaggaccagtgctgagtcgaccacaagatgctgttaatcgtgggcttcttcgcaaggcgatgcggacgaacgaacttaaggatggatgacccgaacaagtgccagaccaaaagctgatcgccaagtggacgtcgtctaacaaacactaacctagtgttattccaggcaagccccggtgcatttgccacctccttgttgttataaaacttttatcacttatatgctgcattaggtgataggagttgagtgatgaaacaattgatgcattgccattccttggaatttgattctcctccttgctacctcttttataaagagaactaatgaggcttagccctgcctagagaaattaaaagttgattcttttaaaaagaatgatgtggaacactgttatgggcttttgtttaaaaatcaaagcaaacttatggtgatgattccccttcggccggagtgggttcatcattcggaaaagagtacccctgccgggtaccaaaaatgggagaatggttggaataaatctagaccagacgctgagcaggaaaggtcgcccgtctgtgtcgcttaaggaccgtaccgaaagtaggcttgctgatctaggaccctttaactggccacatgcctcatcatgggtaagctttgcctcggtcggaccaataccagaacagctcgcacgcactgggagtggagagatggcgagagtagcttgtaccctccgtggcaagagactggaaggtggggtgctgtactctcggaaacatggcgggcaccatggcgagagtaacgtgtaccaaccaggccaatggctggacggtggagtgctgtgctctcgggtcgcgtgaacccgttctggtcttgagaaacccgtgggcgagttgacatatgcaagggttaagtgctacatatgtcgtgtggttggagatcctcagctgagtattaatcgattcggatcgccgttacttctcg

SEQ ID NO: 67129 - DNA, 3514 bp, Zea Mays
ttatctcaccgctatttttgactttgttctttctgtcgttatcacatcacaaccttaccggtcacgagtcacgaaccgaagccccaaacgagatgcgctgccccccgaaggaaaaccaccaaccgtttgccctacccgtgcggcccggcgccgctgcgctctcccgaaagagaggtgccgaagcgcagtagattccccttcctctccatcgacccctctcctcaccatccttgcttcccacctgtccgtctccttcctcgctccgcgcctcgccgcctcctctccccgcctccgcggagagggagagagcacgtcctgcccacgagtgcccccgccccgtgaggaaaccctcgcccgccccttccgttcgcccgtcctgccactggtctccctgaacccccccgccgccgccgccgccgccgccgttcggtttccgtgtggcgtcacttctgagggattttctgggtctgacaaggatcagcgctggagtggcctcgccgctgccctccgttacatggaggagttcctgctcaccctgaacccgttccggttcaagccgctctggccgacgacgactgcccccaaatccttctgaggccctaggaaatcctactcccgcccggcttcatagaatccccgggccgcccccccttccccgactcccttttgtcctcagatagtcatccgggttttccgagaggcacccctcctcccctgcgaatcgagagcccctagggccgtaagcccgtaaccataagtcctcctccactttccgaggccccgccgcccgcgccccggacctgctgtgagcgtccttccttggtggcgttaagcgttgcggacggggatggcgagggaggaggacggcccgcagttcgtgcggtggagggaggagttcgtgtctcaggagcgcggcagccgcgtcgtgcactactacctcgaagacgcggccggcgtgtcacatctcgccgtcatcggcaccgagaggagcctgcgccatatgctctacgtggtctcggaggacttcaacgccgcgtgggggtgcggcggcagcgctgacggtggcggcgcgccgccagtgtttgcgcgcaagtggcggtcacgccgggaggtggtggattggctcgggtccttcctcccggtgaaggcacttgactcaaactgcagctcagacattacatggtctggttcgttctggacatgtagcaagcagcttcggcactatcaagctttttgtcgcaatggaaccacaatatctacccacacttttgtgctggtcttgtcagaggaacaaaaccgctatcttgcatacttggaagacatgtatgaagataagaagggacagaagaagatcaaagtgcgatggtttcatcaaaaccaggaaattgcttgtgctatacctcctccgcctcatccttgcgaagttttcatcactcctttcacacaagtaatcagtgtggaatgtgttgatgatattgcaactgttttaactcgtgatcattatgaaaaatgctcccatgcaatgtcaattatgactgggatccgtttctgctctcgccagtatagtaaaaataagttcaagtattttgatttaagaacgttgcgtggatattttagtcaagcagttgttaggtccatgaaatttccagctgagtcagaaaaggacagtgaatattgtacacctgggaaagctaaatttccaaagcaattagagaggctttattcaaaatgtttgggcactaaaatttgtcgaagcccccaggcagactccataccatcttatcaaatattaagtaacgagcagcctcctgggaagcatctctcaatcaagtttatagtgccccagaatcaactaaagccgacatataatactggtgacagattagagatcttatctcaagacagtggcattattggttgctggttcaggtgcactgttctgaagtcatgcactaatcataacagattgaaggttcagtatgatgatctccaaaatgctgatgatagtgggagattggaggagatggtacctgcctctgcattggctcttcctgataaactgggactgagacaccaagaccggctaagaatcaggccacgtcctcaagaaaatagttttgttgatggggctgctcttttacctggaactgctgttgatgtctggcaatttagtggttggtgggaaggagttgttgtcagtttggacaacattgtggcagatagccttcaagtatattttccaggagagaactttttccgtgcgtgccagctaaggaacattagaatctctaaagattgggtcaagaaccgatgggttgatattgaaacaaagtcagatgtgttgtcacagataccttcagatagtatccaagcaaagcaaactgataatcatgcactgtctgttggtgtgacgggctccagcagttctgcaatgcctgagcaagagattgcagctacccaagcaaactccaatggagatgcagcggtgcctaagcaagagcttacagttgcccaagcaaactccaatggagatcaacctgtgcctaagcaagagcttgcagctacccaagcaaactccaatggagataaatctgtgcctgaccaagagcttgcagctatccaagcaaactccagtggagataaacctgtgcctaagcaagagcttgcagctacccgagcaaactccaatggagataaacctgtgcctgaccaagagcttgcagctatccaagcaaactccagtggagataaaccagtgcctgaacaagagcttccagctacccaagcaaactccaatggagataaaccagtgcctgagcaagagcttccagctacccaagcaaactccgatggagataaaccagtgcctgagcaagagcttccagctacccaagcaaactccagtggagataaaccagtacctaagatagagcttgcagctacccaagcaaattctaatggagataaacctgtgcctgagtttacagctacccaagcaacctccaatggaaataacagacaaatagaagcaagcaagcaatccgaagttagtatgacagatgaagcctctcctttggcggaggatgacaagcgaacaattctagggaagcgtcccagggatgttagtatgactgatgaagggtcagctttggtggaggatggcaagcgaacaattatagggaagcatcccagggatgaaggtaatgctgaacagagatgcaacggggaagtaggtgtagtcgttagcaagacatgatgtttgggacgcccaaactcattagactcgtgtacatagctatagatatggtgattgaaacctccaatggcgcggggttttttgctacgctgctcgtatcaagagcgtattgccgcttctttggcatacctctcctagtcttcttattttgctggtagtttgtgtttatgttaagggacacatggattgcaagctgaatggtacccttcccagttcccggacacgttgtgctgcaatccgagtatatgatttttttta

SEQ ID NO: 67130 - DNA, 2295 bp, Zea Mays
aacacacgcccctcggataccgccacgtcagcgatccgcgcctctcgatccgagcactcgcattggccgcgcgcgagacccactagccaacctccctgcgcctggtccagggcgcgccccgtgaaccgctcccctcttcccccaatggcgaggaaaacacccaccccgtataagatcactctgtatttcaaatcccctcgcatccaaacacttccgtggaaaaaaaacaattaataatttattactggcagaagggggaagaagagatggtggacgaggcatgggagcgggcggtggaggcggcgctgcacgccggcggcgaggggagctcgtcgccggcgcggagcctgacgcttgacggcgccgtcaagtgcacgcacgggcggctgccggcggcagagatactggagcggcaccagagcctggagcacctttcgatcgctggcgtcggggtcacgtcgctcgagggtttcccgcggctgcggaacctcacgcggctcaccctctccgacaaccgcatcgccggcggtctcgaccacctcgtcgccgctggcctgtcctcgctgcgggacctcgacctcagcaacaaccgcatccaggacgttgacgacctcgcgccactcgccgacctgcgcctcgtctcgctcgacctctacgagtgccccgttacccgtgtcaaggactacagatccagggtcttcgagatgatccggacgctcaaatacctggacaagatggatgccgacgagaacgagcgccccgagtccgatgacgacgatgacgacggcgagggcgatggcgagggcgatggcgacgatgatgacgaagatgaagaagacgaggaagaccctgggagcggcgaggtagcgaacggcggcgtcgcccatgcgcgcgcgggcgtgccctcgcacccggtggaggtgaatggggtgatcgatgtggacgaggaggagagcgacgctgacgaggtcatcccgaacggtggtgtcgagcacagccatggcgcaaacgggtttcgtgtcgcggctgctggcgaagcccgtggcgaggaggatgaggacgtggaggaagatgacgacgacgacgatgactttgaggaggaggatttgggggaggagattgatgaggatgttgatgacgaggatgctgttgtggaggtgcatgatgtaccaagtagtgacgaggaggaagatggcgtggaggaggatgaggaagaagaggatgaggacgaagatgatgaagaagaggaggaggttgaggatgaaggtgaagaggcggagccacagagcagtggtagggttgccatgatgacaggcgaggatgaaggagaagagatagatgggcatgaacatggagaaggggacgatgaggatgaaaatggtgagattggtgaagaggatgaggagggattggaggtggggaatgatgacgacgaagacgacgcagatgcggatgatgaggatgaagatactgaatatcttgtgcaaccaatcgctcagcctcaagccatggctattggaagtgaattagatggagttgaccctgatgatgctgacgaggacaaggaagaagtcgacaacgatgatgatggggccacagatcagccttcatcctcgcatggagccaagcggaagagagatgatgatgatctgtcaggcagtggtgatgacagtgaggatgacggtgttgaggacttgaggcccttcaagcacaagtgatggagcagccaatgtacatggatccctccctcccccttcttcagctagaagtaagcagcaagatcagcagcagcaggaggaggcagcaggaacagaaatatggatttggaattacgcgaagttacggcgcggttgttgctcccaccggaatccctgcctgcgcgagcgggacggaaataaatggcgtggacccggttcacggggcaatcgcgccgggcctccatgtgggcgtggttctccgcctgcgacctgcctatcctccagcagctgtgagcgtatggtccgagtctatgtcgacggtcgtatgaaatggtgacaactcgcgacggaagtattacggcggcggcaggcaccacagctcatcacgctatacccgtgatgggagcagaacaacgcggaatacgacgtgggcgaagaagggtcggtacggagcaactagcaagacgtgtaccgcccatgcctcattttcttttctcccttcacatctcgccttcgttaggccgcctgttgtggggaatgtaaataaatgtacgtattttgagaaaggttaaataaaatacttcaattacaagcgaag

SEQ ID NO: 67131 - DNA, 2476 bp, Zea Mays
aacacacgcccctcggataccgccacgtcagcgatccgcgcctctcgatccgagcactcgcattggccgcgcgcgagacccactagccaacctccctgcgcctggtccagggcgcgccccgtgaaccgctcccctcttcccccaatggcgaggaaaacacccaccccgtataagatcactctgtatttcaaatcccctcgcatccaaacacttccgtggaaaaaaaacaattaataatttattactggcagaagggggaagaagagatggtggacgaggcatgggagcgggcggtggaggcggcgctgcacgccggcggcgaggggagctcgtcgccggcgcggagcctgacgcttgacggcgccgtcaagtgcacgcacgggcggctgccggcggcagagatactggagcggcaccagagcctggagcacctttcgatcgctggcgtcggggtcacgtcgctcgagggtttcccgcggctgcggaacctcacgcggctcaccctctccgacaaccgcatcgccggcggtctcgaccacctcgtcgccgctggcctgtcctcgctgcgggacctcgacctcagcaacaaccgcatccaggacgttgacgacctcgcgccactcgccgacctgcgcctcgtctcgctcgacctctacgagtgccccgttacccgtgtcaaggactacagatccagggtcttcgagatgatccggacgctcaaatacctggacaagatggatgccgacgagaacgagcgccccgagtccgatgacgacgatgacgacggcgagggcgatggcgagggcgatggcgacgatgatgacgaagatgaagaagacgaggaagaccctgggagcggcgaggtagcgaacggcggcgtcgcccatgcgcgcgcgggcgtgccctcgcacccggtggaggtgaatggggtgatcgatgtggacgaggaggagagcgacgctgacgaggtcatcccgaacggtggtgtcgagcacagccatggcgcaaacgggtttcgtgtcgcggctgctggcgaagcccgtggcgaggaggatgaggacgtggaggaagatgacgacgacgacgatgactttgaggaggaggatttgggggaggagattgatgaggatgttgatgacgaggatgctgttgtggaggtgcatgatgtaccaagtagtgacgaggaggaagatggcgtggaggaggatgaggaagaagaggatgaggacgaagatgatgaagaagaggaggaggttgaggatgaaggtgaagaggcggagccacagagcagtggtagggttgccatgatgacaggcgaggatgaaggagaagagatagatgggcatgaacatggagaaggggacgatgaggatgaaaatggtgagattggtgaagaggatgaggagggattggaggtggggaatgatgacgacgaagacgacgcagatgcggatgatgaggatgaagatactgaatatcttgtgcaaccaatcgctcagcctcaagccatggctattggaagtgaattagatggagttgaccctgatgatgctgacgaggacaaggaagaagtcgacaacgatgatgatggggccacagatcagccttcatcctcgcatggagccaagcggaagagagatgatgatgatctgtcaggcagtggtgatgacagtgaggatgacggtgttgaggacttgaggcccttcaagcacaagtgatggagcagccaatgtacatggatccctccctcccccttcttcagctagaagtaagcagcaagatcagcagcagcaggaggaggcagcaggaacagaaatatgttagcaagaagaaggatgccgcggacggggccaaggaggccacagcggaggcggcgaagccggccgcggccgccaagccaaagaaggccgcggcgctgccgctgccggagatgatgcagcaggagatcatcccaccgctgaaggatgccttggaggcggaggacgacgtgtcccaggtgcagctcgccttccaaaacaacacgctggagggatccttcataaagaacgacgtcccttattatttttgggccttctttccaaaaggagacctcacaggaccgaagggctttgcgctatcgtcctacagcaacgaagtgagcaccatcgagccgttcctgatcgatgagaagaggataacggccaagtacgtggtgttctgggtctacaagaggctggctgggcaaggcatccttccggtctggaaggaagaggagggggaggaggaggccgcgaagtagtaggttgcgcaggcgcatacgcatacacatacacacacacagggtgctgccgtgaacatacacatgtaacgctgtaaagttcatctgctagtaaaagttcatctgctgtgaacatacacatgtaacacagatacttcagtttcagcagttaaaaacctaccgtcgttattcttctggtgtgagataagaattcgtggg

SEQ ID NO: 67132 - DNA, 1989 bp, Zea Mays
gtatttcaaatcccctcgcatccaaacacttccgtggaaaaaaaacaattaataatttattactggcagaagggggaagaagagatggtggacgaggcatgggagcgggcggtggaggcggcgctgcacgccggcggcgaggggagctcgtcgccggcgcggagcctgacgcttgacggcgccgtcaagtgcacgcacgggcggctgccggcggcagagatactggagcggcaccagagcctggagcacctttcgatcgctggcgtcggggtcacgtcgctcgagggtttcccgcggctgcggaacctcacgcggctcaccctctccgacaaccgcatcgccggcggtctcgaccacctcgtcgccgctggcctgtcctcgctgcgggacctcgacctcagcaacaaccgcatccaggacgttgacgacctcgcgccactcgccgacctgcgcctcgtctcgctcgacctctacgagtgccccgttacccgtgtcaaggactacagatccagggtcttcgagatgatccggacgctcaaatacctggacaagatggatgccgacgagaacgagcgccccgagtccgatgacgacgatgacgacggcgagggcgatggcgagggcgatggcgacgatgatgacgaagatgaagaagacgaggaagaccctgggagcggcgaggtagcgaacggcggcgtcgcccatgcgcgcgcgggcgtgccctcgcacccggtggaggtgaatggggtgatcgatgtggacgaggaggagagcgacgctgacgaggtcatcccgaacggtggtgtcgagcacagccatggcgcaaacgggtttcgtgtcgcggctgctggcgaagcccgtggcgaggaggatgaggacgtggaggaagatgacgacgacgacgatgactttgaggaggaggatttgggggaggagattgatgaggatgttgatgacgaggatgctgttgtggaggtgcatgatgtaccaagtagtgacgaggaggaagatggcgtggaggaggatgaggaagaagaggatgaggacgaagatgatgaagaagaggaggaggttgaggatgaaggtgaagaggatgaggagggattggaggtggggaatgatgacgacgaagacgacgcagatgcggatgatgaggatgaagatactgaatatcttgtgcaaccaatcgctcagcctcaagccatggctattggaagtgaattagatggagttgaccctgatgatgctgacgaggacaaggaagaagtcgacaacgatgatgatggggccacagatcagccttcatcctcgcatggagccaagcggaagagagatgatgatgatctgtcaggcagtggtgatgacagtgaggatgacggtgttgaggacttgaggcccttcaagcacaagtgatggagcagccaatgtacatggatccctccctcccccttcttcagctagaagtaagcagcaagatcagcagcagcaggaggaggcagcaggaacagaaatatggtgggtttcccctgtcttctttttaattgttttttcttgtaaaaactttgaattgagagagagcttctgcctccttggaatagcagattttaggaggtaatggagagaaacaccttgtgtagcctagtaggccagtaggtaaccagttcggttcttcagtctctcaccttgccggcaagcccccttttgtgttcgatttttccctccaactttcaaatggtagttgcaaccgtggggcttccctccatcctttgaaatttctgttgcactggccgtgtagggttgcacaaactgtagtttccctccaaaagaaagcccgggaaatgccccccctttcaaatgcccatggtagccgttgcccccatttgaattcttgaggtactgcacctccaatcggctgaattgctttctgttatggttactgctttgagataggtgaaatggctgtggttgcagcgatggaggcaaaccggg

SEQ ID NO: 67133 - DNA, 2290 bp, Zea Mays
gtatttcaaatcccctcgcatccaaacacttccgtggaaaaaaaacaattaataatttattactggcagaagggggaagaagagatggtggacgaggcatgggagcgggcggtggaggcggcgctgcacgccggcggcgaggggagctcgtcgccggcgcggagcctgacgcttgacggcgccgtcaagtgcacgcacgggcggctgccggcggcagagatactggagcggcaccagagcctggagcacctttcgatcgctggcgtcggggtcacgtcgctcgagggtttcccgcggctgcggaacctcacgcggctcaccctctccgacaaccgcatcgccggcggtctcgaccacctcgtcgccgctggcctgtcctcgctgcgggacctcgacctcagcaacaaccgcatccaggacgttgacgacctcgcgccactcgccgacctgcgcctcgtctcgctcgacctctacgagtgccccgttacccgtgtcaaggactacagatccagggtcttcgagatgatccggacgctcaaatacctggacaagatggatgccgacgagaacgagcgccccgagtccgatgacgacgatgacgacggcgagggcgatggcgagggcgatggcgacgatgatgacgaagatgaagaagacgaggaagaccctgggagcggcgaggtagcgaacggcggcgtcgcccatgcgcgcgcgggcgtgccctcgcacccggtggaggtgaatggggtgatcgatgtggacgaggaggagagcgacgctgacgaggtcatcccgaacggtggtgtcgagcacagccatggcgcaaacgggtttcgtgtcgcggctgctggcgaagcccgtggcgaggaggatgaggacgtggaggaagatgacgacgacgacgatgactttgaggaggaggatttgggggaggagattgatgaggatgttgatgacgaggatgctgttgtggaggtgcatgatgtaccaagtagtgacgaggaggaagatggcgtggaggaggatgaggaagaagaggatgaggacgaagatgatgaagaagaggaggaggttgaggatgaaggtgaagaggcggagccacagagcagtggtagggttgccatgatgacaggcgaggatgaaggagaagagatagatgggcatgaacatggagaaggggacgatgaggatgaaaatggtgagattggtgaagaggatgaggagggattggaggtggggaatgatgacgacgaagacgacgcagatgcggatgatgaggatgaagatactgaatatcttgtgcaaccaatcgctcagcctcaagccatggctattggaagtgaattagatggagttgaccctgatgatgctgacgaggacaaggaagaagtcgacaacgatgatgatggggccacagatcagccttcatcctcgcatggagccaagcggaagagagatgatgatgatctgtcaggcagtggtgatgacagtgaggatgacggtgttgaggacttgaggcccttcaagcacaagtgatggagcagccaatgtacatggatccctccctcccccttcttcagctagaagtaagcagcaagatcagcagcagcaggaggaggcagcaggaacagaaatatgcaagaagaaggatgccgcggacggggccaaggaggccacagcggaggcggcgaagccggccgcggccgccaagccaaagaaggccgcggcgctgccgctgccggagatgatgcagcaggagatcatcccaccgctgaaggatgccttggaggcggaggacgacgtgtcccaggtgcagctcgccttccaaaacaacacgctggagggatccttcataaagaacgacgtcccttattatttttgggccttctttccaaaaggagacctcacaggaccgaagggctttgcgctatcgtcctacagcaacgaagtgagcaccatcgagccgttcctgatcgatgagaagaggataacggccaagtacgtggtgttctgggtctacaagaggctggctgggcaaggcatccttccggtctggaaggaagaggagggggaggaggaggccgcgaagtagtaggttgcgcaggcgcatacgcatacacatacacacacacagggtgctgccgtgaacatacacatgtaacgctgtaaagttcatctgctagtaaaagttcatctgctgtgaacatacacatgtaacacagatacttcagtttcagcagttaaaaacctaccgtcgttattcttctggtgtgagataagaattcgtggg

SEQ ID NO: 67134 - DNA, 1193 bp, Zea Mays
ctttttttattgtcattttattttgttccgtgagcacatcacaccaccatcgacatggcgagtgacgacgggttgaaaaccgaagcaccgaacacacgcgcaccgcaggccgcagcttgtcagttgtccgtatcgccgcccatcgccatgctcgcctacctcctccacggcccagccgccgccatcgccgcggcgcccagcgccttcctcctccgctccctcccgccggcgaagaccccgttcctatcctctctcccgcgcccggtctcgccgaggcgcgctgccgcagccgcgttcgccttcaaccccgctgccgcagcggcccccatcgtggcgtcgctgctcgagggccccgtgctggtctgggccggccggctctgcctctactacgcgctcctccacgtcgggctcgccggctccccgcgcaaccccttcctctctcacgagatcggcggcgaggacggcgccggggatagcgacctagggttctccaagtgggccgagaagctccgtggcggtgcctcagctttaacaaggaaaaagcctgaacataaccccagcggtcctcaaggaaatttatggatggaaacatacatatactattacattgttttgtaatggacgagaaggtgaatagtcttgagcttcttgctgatcaggtgaaaaagatgctcagcataagagaaagctaactagcaaatggaagcccacgaccaaaggcacactgaagagaacctaccgagtacgttcaacggatgaaggaaggcggatcctgaaggagattgcttcagttctgtcccaagatgatcattttgtggatgcttcgtctcacaagggttgccaaattaggagggaaagtgctcatggcgaaagtgtttgctgctacaacgtgagagcgttgttcgatgagcttccaactcctcacttgcttctggagataacaccgtttcctgctggacaacttacggacaacgactaccgtaaggcagagaggcttgagatggtcctgaggctcagcacttctatttaaaaaacctggggactgatttttcaatttcccctaatacttaatttgcccaagttgtaaattgtcttcctatgggcctgtaaattgacgcagttggcaaagaatcacttgaaaacacaagttctggttgcatggattgatccattgagatactttagttcattaa

SEQ ID NO: 67135 - DNA, 1239 bp, Zea Mays
ctttttttattgtcattttattttgttccgtgagcacatcacaccaccatcgacatggcgagtgacgacgggttgaaaaccgaagcaccgaacacacgcgcaccgcaggccgcagcttgtcagttgtccgtatcgccgcccatcgccatgctcgcctacctcctccacggcccagccgccgccatcgccgcggcgcccagcgccttcctcctccgctccctcccgccggcgaagaccccgttcctatcctctctcccgcgcccggtctcgccgaggcgcgctgccgcagccgcgttcgccttcaaccccgctgccgcagcggcccccatcgtggcgtcgctgctcgagggccccgtgctggtctgggccggccggctctgcctctactacgcgctcctccacgtcgggctcgccggctccccgcgcaaccccttcctctctcacgagatcggcggcgaggacggcgccggggatagcgacctagggttctccaagtgggccgagaagctccgtggcggtgcctcaggtttcgtgcagttctctaaattttgtttgcccgattacaattgtttgtttgcttatttatttatgcattcctcggatttgtcgttgatgctctgttcggtggaagtggatgctatgaaagagttatacggttctgcccttcggcatctgaaggaccatatagtacatgactacatggtggtgaaaaagatgctcagcataagagaaagctaactagcaaatggaagcccacgaccaaaggcacactgaagagaacctaccgagtacgttcaacggatgaaggaaggcggatcctgaaggagattgcttcagttctgtcccaagatgatcattttgtggatgcttcgtctcacaagggttgccaaattaggagggaaagtgctcatggcgaaagtgtttgctgctacaacgtgagagcgttgttcgatgagcttccaactcctcacttgcttctggagataacaccgtttcctgctggacaacttacggacaacgactaccgtaaggcagagaggcttgagatggtcctgaggctcagcacttctatttaaaaaacctggggactgatttttcaatttcccctaatacttaatttgcccaagttgtaaattgtcttcctatgggcctgtaaattgacgcagttggcaaagaatcacttgaaaacacaagttctggttgcatggattgatccattgagatactttagttcattaa

SEQ ID NO: 67136 - DNA, 2073 bp, Zea Mays
ctttttttattgtcattttattttgttccgtgagcacatcacaccaccatcgacatggcgagtgacgacgggttgaaaaccgaagcaccgaacacacgcgcaccgcaggccgcagcttgtcagttgtccgtatcgccgcccatcgccatgctcgcctacctcctccacggcccagccgccgccatcgccgcggcgcccagcgccttcctcctccgctccctcccgccggcgaagaccccgttcctatcctctctcccgcgcccggtctcgccgaggcgcgctgccgcagccgcgttcgccttcaaccccgctgccgcagcggcccccatcgtggcgtcgctgctcgagggccccgtgctggtctgggccggccggctctgcctctactacgcgctcctccacgtcgggctcgccggctccccgcgcaaccccttcctctctcacgagatcggcggcgaggacggcgccggggatagcgacctagggttctccaagtgggccgagaagctccgtggcggtgcctcaggtttcgtgcagttctctaaattttgtttgcccgattacaattgtttgtttgcttatttatttatgcattcctcggatttgtcgttgatgctctgttcggtggaagtggatgctatgaaagagttatacggttctgcccttcggcatctgtaaggagattctggatgtgaaaaagatatctttttttgcagaatctgattctactgccttgctaggaaggaccatatagtacatgactacatggtggtaggtggttcgatgtctttggcggaatttgacaattctgttccttttttctgtagcagtactctggaattgaagtgaaattctgtccttagtaagggagtgtttgaatgcactatacctaatagttagttggctaaaaaaattctattggaattagctagctaacaaatactgcctgtgttccaaattaaaattcgttttagccttttattgtattcatacaataattagtgtatgtgttttgtatgtgtctagattagagatgtcaatgggacccgatacccgctaactcgtggggaattcccctattagggtatgggtatgggacaaaaattgtccccatgggtatgaatatgggacaaaatctccatccattgggtaaacgtgtatgggtttgggaagcaaaaatccgaacccgattacccatgggtatttcatacgtgtacacctatcatgtttgtatgaatgagttgaggccgagtcggccaccaagcgtagcacgacagcgcactaggcctaagttctagcccaacaaggcaacacagcaaggcaactagcagactagcaaaaaacaaaaccctaaaataaccagccatacgctacgccctatccagccggtcaaccgccgcacgcctggacgttgctctggcactgcacactagcgacttcaccagcgacgaggagcaccgctgactgctaagagcctaggatgatggtgacgaccatggattctcaggcgccaacgaacttagatggtgacccaggaaggtgaaaaagatgctcagcataagagaaagctaactagcaaatggaagcccacgaccaaaggcacactgaagagaacctaccgagtacgttcaacggatgaaggaaggcggatcctgaaggagattgcttcagttctgtcccaagatgatcattttgtggatgcttcgtctcacaagggttgccaaattaggagggaaagtgctcatggcgaaagtgtttgctgctacaacgtgagagcgttgttcgatgagcttccaactcctcacttgcttctggagataacaccgtttcctgctggacaacttacggacaacgactaccgtaaggcagagaggcttgagatggtcctgaggctcagcacttctatttaaaaaacctggggactgatttttcaatttcccctaatacttaatttgcccaagttgtaaattgtcttcctatgggcctgtaaattgacgcagttggcaaagaatcacttgaaaacacaagttctggttgcatggattgatccattgagatactttagttcattaa

SEQ ID NO: 67137 - DNA, 2996 bp, Zea Mays
ctttttttattgtcattttattttgttccgtgagcacatcacaccaccatcgacatggcgagtgacgacgggttgaaaaccgaagcaccgaacacacgcgcaccgcaggccgcagcttgtcagttgtccgtatcgccgcccatcgccatgctcgcctacctcctccacggcccagccgccgccatcgccgcggcgcccagcgccttcctcctccgctccctcccgccggcgaagaccccgttcctatcctctctcccgcgcccggtctcgccgaggcgcgctgccgcagccgcgttcgccttcaaccccgctgccgcagcggcccccatcgtggcgtcgctgctcgagggccccgtgctggtctgggccggccggctctgcctctactacgcgctcctccacgtcgggctcgccggctccccgcgcaaccccttcctctctcacgagatcggcggcgaggacggcgccggggatagcgacctagggttctccaagtgggccgagaagctccgtggcggtgcctcaggtttcgtgcagttctctaaattttgtttgcccgattacaattgtttgtttgcttatttatttatgcattcctcggatttgtcgttgatgctctgttcggtggaagtggatgctatgaaagagttatacggttctgcccttcggcatctgtaaggagattctggatgtgaaaaagatatctttttttgcagaatctgattctactgccttgctaggaaggaccatatagtacatgactacatggtggtaggtggttcgatgtctttggcggaatttgacaattctgttccttttttctgtagcagtactctggaattgaagtgaaattctgtccttagtaagggagtgtttgaatgcactatacctaatagttagttggctaaaaaaattctattggaattagctagctaacaaatactgcctgtgttccaaattaaaattcgttttagccttttattgtattcatacaataattagtgtatgtgttttgtatgtgtctagattagagatgtcaatgggacccgatacccgctaactcgtggggaattcccctattagggtatgggtatgggacaaaaattgtccccatgggtatgaatatgggacaaaatctccatccattgggtaaacgtgtatgggtttgggaagcaaaaatccgaacccgattacccatgggtatttcatacgtgtacacctatcatgtttgtatgaatgagttgaggccgagtcggccaccaagcgtagcacgacagcgcactaggcctaagttctagcccaacaaggcaacacagcaaggcaactagcagactagcaaaaaacaaaaccctaaaataaccagccatacgctacgccctatccagccggtcaaccgccgcacgcctggacgttgctctggcactgcacactagcgacttcaccagcgacgaggagcaccgctgactgctaagagcctaggatgatggtgacgaccatggattctcaggcgccaacgaacttagatggtgacccaggaaggtgaacagactctatttctttatttcttctatcggtcccgaagtactaatttcttttctgataaatggatgaatggattatggttcatggatgagtgcttgccgatgtggtgatgtctgaaatctggatagtttgtgctagctgttagtacctatttatcccttaattggggatgaggacccactggggacccgtaacccgaatggggataggtatgggatgagttttgcacccatgatgggtatgaggatggatcaaacatgatggagatggatctgggatgctataacccggtgtgaaatttctcattgacatctctagtctagattcattatcatttatttgaatatagacataaagagcaagtgataaaacgaactctattgtggtatggtacggagggagtagttggctaactattagctaatttgctaaaaatagctaatagttgaactattagttagactgttttgatgtcttcagctaattttaacagctaactattagttctagtgcatccaaacatactttgagggaccagaggctaggttagcccctgcgttatgagaacgcgtagggaccaggtactcttgacacgcctggctggtgcctaccctcgtaaatcctagcgagcatagcaccacggggattcgaaattgaagaatccatcttccatgctaatctagccgtactgggatgaaaatgtgctctcttttatatataaatataatagtgactagtaacctctcagtaagtatttttaactttcttgagatttattcacattcagctttaacaaggaaaaagcctgaacataaccccagcggtcctcaaggaaatttatggatggaaacatacatatactattacattgttttgtaatggacgagaaggtgaatagtcttgagcttcttgctgatcaggtgaaaaagatgctcagcataagagaaagctaactagcaaatggaagcccacgaccaaaggcacactgaagagaacctaccgagtacgttcaacggatgaaggaaggcggatcctgaaggagattgcttcagttctgtcccaagatgatcattttgtggatgcttcgtctcacaagggttgccaaattaggagggaaagtgctcatggcgaaagtgtttgctgctacaacgtgagagcgttgttcgatgagcttccaactcctcacttgcttctggagataacaccgtttcctgctggacaacttacggacaacgactaccgtaaggcagagaggcttgagatggtcctgaggctcagcacttctatttaaaaaacctggggactgatttttcaatttcccctaatacttaatttgcccaagttgtaaattgtcttcctatgggcctgtaaattgacgcagttggcaaagaatcacttgaaaacacaagttctggttgcatggattgatccattgagatactttagttcattaa

SEQ ID NO: 67138 - DNA, 1115 bp, Zea Mays
ctttttttattgtcattttattttgttccgtgagcacatcacaccaccatcgacatggcgagtgacgacgggttgaaaaccgaagcaccgaacacacgcgcaccgcaggccgcagcttgtcagttgtccgtatcgccgcccatcgccatgctcgcctacctcctccacggcccagccgccgccatcgccgcggcgcccagcgccttcctcctccgctccctcccgccggcgaagaccccgttcctatcctctctcccgcgcccggtctcgccgaggcgcgctgccgcagccgcgttcgccttcaaccccgctgccgcagcggcccccatcgtggcgtcgctgctcgagggccccgtgctggtctgggccggccggctctgcctctactacgcgctcctccacgtcgggctcgccggctccccgcgcaaccccttcctctctcacgagatcggcggcgaggacggcgccggggatagcgacctagggttctccaagtgggccgagaagctccgtggcggtgcctcagaatctgattctactgccttgctaggaaggaccatatagtacatgactacatggtggtgaaaaagatgctcagcataagagaaagctaactagcaaatggaagcccacgaccaaaggcacactgaagagaacctaccgagtacgttcaacggatgaaggaaggcggatcctgaaggagattgcttcagttctgtcccaagatgatcattttgtggatgcttcgtctcacaagggttgccaaattaggagggaaagtgctcatggcgaaagtgtttgctgctacaacgtgagagcgttgttcgatgagcttccaactcctcacttgcttctggagataacaccgtttcctgctggacaacttacggacaacgactaccgtaaggcagagaggcttgagatggtcctgaggctcagcacttctatttaaaaaacctggggactgatttttcaatttcccctaatacttaatttgcccaagttgtaaattgtcttcctatgggcctgtaaattgacgcagttggcaaagaatcacttgaaaacacaagttctggttgcatggattgatccattgagatactttagttcattaa

SEQ ID NO: 67139 - DNA, 1179 bp, Zea Mays
ctttttttattgtcattttattttgttccgtgagcacatcacaccaccatcgacatggcgagtgacgacgggttgaaaaccgaagcaccgaacacacgcgcaccgcaggccgcagcttgtcagttgtccgtatcgccgcccatcgccatgctcgcctacctcctccacggcccagccgccgccatcgccgcggcgcccagcgccttcctcctccgctccctcccgccggcgaagaccccgttcctatcctctctcccgcgcccggtctcgccgaggcgcgctgccgcagccgcgttcgccttcaaccccgctgccgcagcggcccccatcgtggcgtcgctgctcgagggccccgtgctggtctgggccggccggctctgcctctactacgcgctcctccacgtcgggctcgccggctccccgcgcaaccccttcctctctcacgagatcggcggcgaggacggcgccggggatagcgacctagggttctccaagtgggccgagaagctccgtggcggtgcctcaggtgaaaaagatgctcagcataagagaaagctaactagcaaatggaagcccacgaccaaaggcacactgaagagaacctaccgagtacgttcaacggatgaaggaaggcggatcctgaaggagattgcttcagttctgtcccaagatgatcattttgtggatgcttcgtctcacaaggttccgcaggcaacataaccggactatttgttgtatcattttgctggggatggacctaaatgcgtattacaggaatgacgacattaatgaaggctcatttgtttggcaacaacaaagtttttttagtatgaaggagcctatgtgttagtgttatcaagaatgacagctagcatgatggccaaaattgtggtagcatgcaactatggttttgtattccttctatcttttatttgaagatagtttccattaagttccgcgcaaattataaaaaactaagagcgttggtcgaaacacgctacaacaaaattttgtgtgcattgccaaacatcaagtaaaagcatgatttaccatttctgttgctttgaaaaataatcaatccagaactaaggaaacagaaataatgtgtttcacaaggatccttcgtaacacctagtatacaaggagtcatggacgatctctctctgcaatgaaaataac

SEQ ID NO: 67140 - DNA, 3115 bp, Zea Mays
ctttttttattgtcattttattttgttccgtgagcacatcacaccaccatcgacatggcgagtgacgacgggttgaaaaccgaagcaccgaacacacgcgcaccgcaggccgcagcttgtcagttgtccgtatcgccgcccatcgccatgctcgcctacctcctccacggcccagccgccgccatcgccgcggcgcccagcgccttcctcctccgctccctcccgccggcgaagaccccgttcctatcctctctcccgcgcccggtctcgccgaggcgcgctgccgcagccgcgttcgccttcaaccccgctgccgcagcggcccccatcgtggcgtcgctgctcgagggccccgtgctggtctgggccggccggctctgcctctactacgcgctcctccacgtcgggctcgccggctccccgcgcaaccccttcctctctcacgagatcggcggcgaggacggcgccggggatagcgacctagggttctccaagtgggccgagaagctccgtggcggtgcctcaggtttcgtgcagttctctaaattttgtttgcccgattacaattgtttgtttgcttatttatttatgcattcctcggatttgtcgttgatgctctgttcggtggaagtggatgctatgaaagagttatacggttctgcccttcggcatctgtaaggagattctggatgtgaaaaagatatctttttttgcagaatctgattctactgccttgctaggaaggaccatatagtacatgactacatggtggtaggtggttcgatgtctttggcggaatttgacaattctgttccttttttctgtagcagtactctggaattgaagtgaaattctgtccttagtaagggagtgtttgaatgcactatacctaatagttagttggctaaaaaaattctattggaattagctagctaacaaatactgcctgtgttccaaattaaaattcgttttagccttttattgtattcatacaataattagtgtatgtgttttgtatgtgtctagattagagatgtcaatgggacccgatacccgctaactcgtggggaattcccctattagggtatgggtatgggacaaaaattgtccccatgggtatgaatatgggacaaaatctccatccattgggtaaacgtgtatgggtttgggaagcaaaaatccgaacccgattacccatgggtatttcatacgtgtacacctatcatgtttgtatgaatgagttgaggccgagtcggccaccaagcgtagcacgacagcgcactaggcctaagttctagcccaacaaggcaacacagcaaggcaactagcagactagcaaaaaacaaaaccctaaaataaccagccatacgctacgccctatccagccggtcaaccgccgcacgcctggacgttgctctggcactgcacactagcgacttcaccagcgacgaggagcaccgctgactgctaagagcctaggatgatggtgacgaccatggattctcaggcgccaacgaacttagatggtgacccaggaaggtgaacagactctatttctttatttcttctatcggtcccgaagtactaatttcttttctgataaatggatgaatggattatggttcatggatgagtgcttgccgatgtggtgatgtctgaaatctggatagtttgtgctagctgttagtacctatttatcccttaattggggatgaggacccactggggacccgtaacccgaatggggataggtatgggatgagttttgcacccatgatgggtatgaggatggatcaaacatgatggagatggatctgggatgctataacccggtgtgaaatttctcattgacatctctagtctagattcattatcatttatttgaatatagacataaagagcaagtgataaaacgaactctattgtggtatggtacggagggagtagttggctaactattagctaatttgctaaaaatagctaatagttgaactattagttagactgttttgatgtcttcagctaattttaacagctaactattagttctagtgcatccaaacatactttgagggaccagaggctaggttagcccctgcgttatgagaacgcgtagggaccaggtactcttgacacgcctggctggtgcctaccctcgtaaatcctagcgagcatagcaccacggggattcgaaattgaagaatccatcttccatgctaatctagccgtactgggatgaaaatgtgctctcttttatatataaatataatagtgactagtaacctctcagtaagtatttttaactttcttgagatttattcacattcagctttaacaaggaaaaagcctgaacataaccccagcggtcctcaaggaaatttatggatggaaacatacatatactattacattgttttgtaatggacgagaaggtgaatagtcttgagcttcttgctgatcaggtgaaaaagatgctcagcataagagaaagctaactagcaaatggaagcccacgaccaaaggcacactgaagagaacctaccgagtacgttcaacggatgaaggaaggcggatcctgaaggagattgcttcagttctgtcccaagatgatcattttgtggatgcttcgtctcacaaggttccgcaggcaacataaccggactatttgttgtatcattttgctggggatggacctaaatgcgtattacaggaatgacgacattaatgaaggctcatttgtttggcaacaacaaagtttttttagtatgaaggagcctatgtgttagtgttatcaagaatgacagctagcatgatggccaaaattgtggtagcatgcaactatggttttgtattccttctatcttttatttgaagatagtttccattaagttccgcgcaaattataaaaaactaagagcgttggtcgaaacacgctacaacaaaattttgtgtgcattgccaaacatcaagtaaaagcatgatttaccatttctgttgctttgaaaaataatcaatccagaactaaggaaacagaaataatgtgtttcacaaggatccttcgtaacacctagtatacaaggagtcatggacgatctctctctgcaatgaaaataac

SEQ ID NO: 67141 - DNA, 1149 bp, Zea Mays
gcctgccttctctctcctcacttaaaccctcctccgctcgacgacaccacacgaaaatatacgtcagaataaaccgcagcaaatcttctccggcaccggcagcgcccaaatccggcaatccgctgctccgaatggactcaggttacaatccccggacggtggaggaggtgttccgggacttcaagggccgtcgtgccgggataatccgcgcgctcaccactgcttgttgttgctgcagatgcggaggatttcttcaagcaatgcgacccggaaaaagaaaacttgtgcctgtatgggtttcctaatgagagctgggaagtaaatttgcctgctgaagaggtgccacctgacctcccagaaccagcattaggcataaactttgcaagagatggaatgcaggaaaaagagtggttgtccatggttgctgcacacagtgatgcatggttactttctgttgcattttacttcggtgctcgattcggtttcaataaaaatgacaggaagcgcctctacagtttgattgatgatcttcccatggcttttgaaattgttagtgggaagagtgaaaccaaggcaccagcaccaccaagcagtagtaaccacagcaatatcaaaccgaagtctaacaacaaaaagaaaccaccggagcctaaggtgaagcagccaaagccgcgtgcccctgcagaggaaggcgaggaggaagatggcagtgcaagcgagggcgagcacggggagacgctgtgcggcgcgtgcaaggaaagctacggccccgacgagttttggatctgctgcgacctctgcgagaagtggttccacggcaagtgcgtcaagatcacggcggccaaggccgagcacatcaagcagtacaagtgcccgtcctgcaccggcggcggtggcgtcagcaacagcggcaccaagcgagcccgcccatcatagctgcgacttttagtgatgtaaactgcttagaaaaactgttgcggacatagcgcccatcatagctgcgactttttaaatggtggtgtaaacttttgtagtgcgactaggccgtttgtcaccctatcatacttggcttcaagtaggttttctgtttttcagttttcattatcatactcgcttgaagtagtgtgaatgaatggcgtaaaatatcag

SEQ ID NO: 67142 - DNA, 917 bp, Zea Mays
ttttacgtagcgtgattttgggttgcttttctccccaagaaaaagaaaacttgtgcctgtatgggtttcctaatgagagctgggaagtaaatttgcctgctgaagaggtgccacctgacctcccagaaccagcattaggcataaactttgcaagagatggaatgcaggaaaaagagtggttgtccatggttgctgcacacagtgatgcatggttactttctgttgcattttacttcggtgctcgattcggtttcaataaaaatgacaggaagcgcctctacagtttgattgatgatcttcccatggcttttgaaattgttagtgggaagagtgaaaccaaggcaccagcaccaccaagcagtagtaaccacagcaatatcaaaccgaagtctaacaacaaaaagaaaccaccggagcctaaggtgaagcagccaaagccgcgtgcccctgcagaggaaggcgaggaggaagatggcagtgcaagcgagggcgagcacggggagacgctgtgcggcgcgtgcaaggaaagctacggccccgacgagttttggatctgctgcgacctctgcgagaagtggttccacggcaagtgcgtcaagatcacggcggccaaggccgagcacatcaagcagtacaagtgcccgtcctgcaccggcggcggtggcgtcagcaacagcggcaccaagcgagcccgcccatcatagctgcgacttttagtgatgtaaactgcttagaaaaactgttgcggacatagcgcccatcatagctgcgactttttaaatggtggtgtaaacttttgtagtgcgactaggccgtttgtcaccctatcatacttggcttcaagtaggttttctgtttttcagttttcattatcatactcgcttgaagtagtgtgaatgaatggcgtaaaatatcag

SEQ ID NO: 67143 - DNA, 967 bp, Zea Mays
aggcagagcttatttgtccatttttggagggagaactatgggagatgatgatgatgatcttgatatggtgtttactgtgtccttggaagaaaaagaaaacttgtgcctgtatgggtttcctaatgagagctgggaagtaaatttgcctgctgaagaggtgccacctgacctcccagaaccagcattaggcataaactttgcaagagatggaatgcaggaaaaagagtggttgtccatggttgctgcacacagtgatgcatggttactttctgttgcattttacttcggtgctcgattcggtttcaataaaaatgacaggaagcgcctctacagtttgattgatgatcttcccatggcttttgaaattgttagtgggaagagtgaaaccaaggcaccagcaccaccaagcagtagtaaccacagcaatatcaaaccgaagtctaacaacaaaaagaaaccaccggagcctaaggtgaagcagccaaagccgcgtgcccctgcagaggaaggcgaggaggaagatggcagtgcaagcgagggcgagcacggggagacgctgtgcggcgcgtgcaaggaaagctacggccccgacgagttttggatctgctgcgacctctgcgagaagtggttccacggcaagtgcgtcaagatcacggcggccaaggccgagcacatcaagcagtacaagtgcccgtcctgcaccggcggcggtggcgtcagcaacagcggcaccaagcgagcccgcccatcatagctgcgacttttagtgatgtaaactgcttagaaaaactgttgcggacatagcgcccatcatagctgcgactttttaaatggtggtgtaaacttttgtagtgcgactaggccgtttgtcaccctatcatacttggcttcaagtaggttttctgtttttcagttttcattatcatactcgcttgaagtagtgtgaatgaatggcgtaaaatatcag

SEQ ID NO: 67144 - DNA, 932 bp, Zea Mays
gttaaatcatgtccaagttctgagcatttccatcccctgttttcataatgagataaaaagaaaacttgtgcctgtatgggtttcctaatgagagctgggaagtaaatttgcctgctgaagaggtgccacctgacctcccagaaccagcattaggcataaactttgcaagagatggaatgcaggaaaaagagtggttgtccatggttgctgcacacagtgatgcatggttactttctgttgcattttacttcggtgctcgattcggtttcaataaaaatgacaggaagcgcctctacagtttgattgatgatcttcccatggcttttgaaattgttagtgggaagagtgaaaccaaggcaccagcaccaccaagcagtagtaaccacagcaatatcaaaccgaagtctaacaacaaaaagaaaccaccggagcctaaggtgaagcagccaaagccgcgtgcccctgcagaggaaggcgaggaggaagatggcagtgcaagcgagggcgagcacggggagacgctgtgcggcgcgtgcaaggaaagctacggccccgacgagttttggatctgctgcgacctctgcgagaagtggttccacggcaagtgcgtcaagatcacggcggccaaggccgagcacatcaagcagtacaagtgcccgtcctgcaccggcggcggtggcgtcagcaacagcggcaccaagcgagcccgcccatcatagctgcgacttttagtgatgtaaactgcttagaaaaactgttgcggacatagcgcccatcatagctgcgactttttaaatggtggtgtaaacttttgtagtgcgactaggccgtttgtcaccctatcatacttggcttcaagtaggttttctgtttttcagttttcattatcatactcgcttgaagtagtgtgaatgaatggcgtaaaatatcag

SEQ ID NO: 67145 - DNA, 1169 bp, Zea Mays
attttatataggtagtagacattttggcccataaaaaaccctaacaggctcctatctgttttctgcgtccagcgtcgtgtctgtcaccgtgcgagggcgtcagccgcagcccgcaggggcgctagcagacgagcagagcaggctagcagcactgcagcagcaccgcagcggcgcagcgcagtccgcagccggccagccgcagcggcgcagcgcagtccgcagccggccagccgcagcccgcaggcaggggcggtaggcgcgccgcgcgcgtagccgccaggcgccaccgcgccaggggcagggcacgagcagcgggcagcggccagccggccaccggccaggccagcgacgcgcacgcgccgacgcccactccactcgaccactcgcccaggcccagtgaccagccgccagcgtgctgtactgctgtttcactgttccagttccaggcttccaggtttcaggccagcgtgattatcattctatacgacagaggaagaattcaaagatattttttcaccatttggcaccgtagaggaagctcgacttatgagagaccaccaaactggaaggatgaagggatttggttttgtcaaatattcatcgcaagcagaggcagagaaagctgtcaaggcaatggatggcaagattctacgtggaagattgatctttgtggagatggcaaaaggacacgaaagcaagtaggacaccctccccacgagaggatttcactgaacatgaaacatgagagcgccatcagcttatgccagatggcaaatatcccaaattctcaattgatgttgcaacttatatacaaagcacaagttaattttagctagcttatctttgataacactgctaccttgccatctgaaaggttgccgtgcattggtatccgttgacctgtgtaagaaatgttggcagctctgtgccctacgaactagcctggttgattaaccaagatctgttcaaaattaaagccagtaaaacatgaatattgttaaagatttcagcaatgaatcgttgagaaaagattgataaagacgttctaattataatatactcgttagcctttaacgagtgggtctagttagcctttaacgagtgggtctagtggccgcgaggttagataagaaaatttagtgagaagaaaatttagtatgggggtcttc

SEQ ID NO: 67146 - DNA, 1230 bp, Zea Mays
ctcctatctgttttctgcgtccagcgtcgtgtctgtcaccgtgcgagggcgtcagccgcagcccgcaggggcgctagcagacgagcagagcaggctagcagcactgcagcagcaccgcagcggcgcagcgcagtccgcagccggccagccgcagcggcgcagcgcagtccgcagccggccagccgcagcccgcaggcaggggcggtaggcgcgccgcgcgcgtagccgccaggcgccaccgcgccaggggcagggcacgagcagcgggcagcggccagccggccaccggccaggccagcgacgcgcacgcgccgacgcccactccactcgaccactcgcccaggcccagtgaccagccgccagcgtgctgtactgctgtttcactgttccagttccaggcttccaggtttcaggccagcgtggtttcaggaggagagtggagatcatcccgatgatgatgcgaggtggaaggctcacgggtttgacctctcaggttctgaggtgcttcagcacggagatatttgtcagcagattatcattctatacgacagaggaagaattcaaagatattttttcaccatttggcaccgtagaggaagctcgacttatgagagaccaccaaactggaaggatgaagggatttggttttgtcaaatattcatcgcaagcagaggcagagaaagctgtcaaggcaatggatggcaagattctacgtggaagattgatctttgtggagatggcaaaaggacacgaaagcaagtaggacaccctccccacgagaggatttcactgaacatgaaacatgagagcgccatcagcttatgccagatggcaaatatcccaaattctcaattgatgttgcaacttatatacaaagcacaagttaattttagctagcttatctttgataacactgctaccttgccatctgaaaggttgccgtgcattggtatccgttgacctgtgtaagaaatgttggcagctctgtgccctacgaactagcctggttgattaaccaagatctgttcaaaattaaagccagtaaaacatgaatattgttaaagatttcagcaatgaatcgttgagaaaagattgataaagacgttctaattataatatactcgttagcctttaacgagtgggtctagttagcctttaacgagtgggtctagtggccgcgaggttagataagaaaatttagtgagaagaaaatttagtatgggggtcttc

SEQ ID NO: 67147 - DNA, 820 bp, Zea Mays
ctaaatcgtctctaattatgaggagagtggagatcatcccgatgatgatgcgaggtggaaggctcacgggtttgacctctcaggttctgaggtgcttcagcacggagatatttgtcagcagattatcattctatacgacagaggaagaattcaaagatattttttcaccatttggcaccgtagaggaagctcgacttatgagagaccaccaaactggaaggatgaagggatttggttttgtcaaatattcatcgcaagcagaggcagagaaagctgtcaaggcaatggatggcaagattctacgtggaagattgatctttgtggagatggcaaaaggacacgaaagcaagtaggacaccctccccacgagaggatttcactgaacatgaaacatgagagcgccatcagcttatgccagatggcaaatatcccaaattctcaattgatgttgcaacttatatacaaagcacaagttaattttagctagcttatctttgataacactgctaccttgccatctgaaaggttgccgtgcattggtatccgttgacctgtgtaagaaatgttggcagctctgtgccctacgaactagcctggttgattaaccaagatctgttcaaaattaaagccagtaaaacatgaatattgttaaagatttcagcaatgaatcgttgagaaaagattgataaagacgttctaattataatatactcgttagcctttaacgagtgggtctagttagcctttaacgagtgggtctagtggccgcgaggttagataagaaaatttagtgagaagaaaatttagtatgggggtcttc

SEQ ID NO: 67148 - DNA, 718 bp, Zea Mays
taaatcgtctctaattatgattatcattctatacgacagaggaagaattcaaagatattttttcaccatttggcaccgtagaggaagctcgacttatgagagaccaccaaactggaaggatgaagggatttggttttgtcaaatattcatcgcaagcagaggcagagaaagctgtcaaggcaatggatggcaagattctacgtggaagattgatctttgtggagatggcaaaaggacacgaaagcaagtaggacaccctccccacgagaggatttcactgaacatgaaacatgagagcgccatcagcttatgccagatggcaaatatcccaaattctcaattgatgttgcaacttatatacaaagcacaagttaattttagctagcttatctttgataacactgctaccttgccatctgaaaggttgccgtgcattggtatccgttgacctgtgtaagaaatgttggcagctctgtgccctacgaactagcctggttgattaaccaagatctgttcaaaattaaagccagtaaaacatgaatattgttaaagatttcagcaatgaatcgttgagaaaagattgataaagacgttctaattataatatactcgttagcctttaacgagtgggtctagttagcctttaacgagtgggtctagtggccgcgaggttagataagaaaatttagtgagaagaaaatttagtatgggggtcttc

SEQ ID NO: 67149 - DNA, 3935 bp, Zea Mays
cttttatatttttaatcaagtttattgtatttttagatgctgaattgaagtaaatattatcttagtttatgtttgtgatatatttagttttagcggtataattagccgcacaatatattaggggctgtttaaagtaaccttcaagttttatagagtggctcgggatgttaattttatagagctccgccactggccaccgctttactaaaatatgccacacgctcgtgcaccttggtggagaactgccccaaacctggaacctgacgcgtcggaacaaccacaaaactcttgctcaagtcaggcatctgcagcaaggagacggtcatgtgtgcctgtttgagtgcgaggaatgcctttgttgatgcctccgaccactgaaatgattccttcttcaataggacagttaatggtgctgcgatttcgccatagcttgcaatgaacttccggtaatatcctgtaagcccaaggaaaccacgtagcacccttaaagttctgggctgcgactaagtctctaatgttgctaccttctcaggatccatagccacaccatatgccgagattatatggcccaaatatgacacactagtaaccccataaaaacacttggagcgcttcaatgccaacttatgtgttctcagtgtttggaacacttacttgacgtgttggaggtgagctgcccacgtcttgctataaatcaggatgtcatcgaaaaatactagcacaaacttgcatatgaatgagttgaggatatcattcatcaagctttggaatgtggacggggcgttggtgaggccgaatggcatgacgaggaactcaaagtggcctcggtgtgttcggaattttgttttgtcaacatctttggggtgcattcgcacctggtggtacccactccgaaggtccagcttggtgaagaatctagaaccctaaagctcatctaacaattcatcaaccactggtatggggaaatggtcattcaccgtcttcccattgagttcatggtagtccacacagaatctccatgttccatctgacttcttcacaaggagcaccggagaagagaatgttggcgtgcattcccttataattcctcgatgcagcatgtcctcacattgcttctcaatttcatccttcaagagctaggggtatcggtacgaacgtacaaccattggtgtcgtgccaggcagtaatttgatgtggtgatcatggcgtcgggctggtggtaggccgcagggttatgcaaacaagtcttcgtaggagtacaataatttgtccaccaattccttcccttctgaaaatgcacaacagcgtggcttatagtcacacatccctgtccaacaaaccttgtggtcttgcttccagaatgtcattgatagacgttcgaagtcccatggaatcagacctaaggatcacattgtactcccaacacaacatcaaagccttccagtggtagagcatagcaagttagggagaactgttcttcaacaatttgaactgataaccatgtacataatcctaggttggtaaccttgtccccattggcgactttcactgtgccttggcgcctttctagtggaagttacatcttagacaccattgcctctgtgatgaatgtgtgtgtggaaccagtgtctacctgggctgtgagtggcactcccttgtcagaactgtaagcttcatggtttcccctacttcaattccagtcagggcgcgacgtggtatgtgatatgcccaactcgactactgcctcctctcctctcaagtgccatattctaattccagcaagaccccccctcccccccgagcaacacccattgagtacttctctgtgcaatgatagcatttcccctttgcacgcttcgtcgctaactcttccggtgatagccgtttgaatcgaggtcgaggcgaacaactaccttggatgctgtgttgttgccggcttccttgactaccaaactattcctagcagctctgtatcctcctctttttcctgcctccaattcccttttttcataggcccttgtcaggttcatggcgcactgcaaattcctgggagcttataatttgacatccgtgtgcaggggttccctagacctgccgtgaacatgctgacctactgcatggtagtaaggtcattgcaccggcacagaagaagtgagaactgtcgctggtattcctcgacagtgccaatgcgctagagatcatttaattcggccaaggggctggagcgaattggtgagtcgaatcgaaggttggtgaagtcaacgaacgttgttgtcgtgttccagtgcgtagaaccattccgccgccacaggtatagaatgcaattgctcatcctagatcatgatcgcccacgctagaatgattaaaaaatggattagaaaaatcacagataatctaacgattgttaagttattatagagtgggtgacgaatattattgctctacacacaagatgtgaatccaagatccatgtgcaacttatatgttttcttataaaaatattaaaattgtttttaattaatactctatccattcttttttatttgacgacgaacggtccaaattagtcaaataaaaatttggaggtagtgtattattaatataccaggatttattcggtaccataaagttactaaattttggtatagattcaactaaacttaaatttatttgacgaaaaacaagaattgcacttttgtttggtatagatttgactaaactctttgattctggcccgctgccgccatctccccatcacactaccattgccatctcgccctgaggttgcgatcccctcggccgcgaccctgcctcagtgcctcaccccgggccgcatctcctgcgctcgtgctacgaggacgggcgagccgcccgtgccgcaggctatacacccaagagcaaatgaagaacaagtgggttgtatcataccaagtggaagaataaggccaagaatagcattgatacctacaaaatttgcatcgtcaaggtgctgaatcaggttttgggcattgtcatctcatctcctcaacaccatgtccatcatgaagctgtcacaggaggccgcctgctacaagaatcccaccacttcctgtgcttcgctctccccagggaccacctagacttaatggtttcaggaggagagtggagatcatcccgatgatgatgcgaggtggaaggctcacgggtttgacctctcaggttctgaggtgcttcagcacggagatatttgtcagcagattatcattctatacgacagaggaagaattcaaagatattttttcaccatttggcaccgtagaggaagctcgacttatgagagaccaccaaactggaaggatgaagggatttggttttgtcaaatattcatcgcaagcagaggcagagaaagctgtcaaggcaatggatggcaagattctacgtggaagattgatctttgtggagatggcaaaaggacacgaaagcaagtaggacaccctccccacgagaggatttcactgaacatgaaacatgagagcgccatcagcttatgccagatggcaaatatcccaaattctcaattgatgttgcaacttatatacaaagcacaagttaattttagctagcttatctttgataacactgctaccttgccatctgaaaggttgccgtgcattggtatccgttgacctgtgtaagaaatgttggcagctctgtgccctacgaactagcctggttgattaaccaagatctgttcaaaattaaagccagtaaaacatgaatattgttaaagatttcagcaatgaatcgttgagaaaagattgataaagacgttctaattataatatactcgttagcctttaacgagtgggtctagttagcctttaacgagtgggtctagtggccgcgaggttagataagaaaatttagtgagaagaaaatttagtatgggggtcttc

SEQ ID NO: 67150 - DNA, 3683 bp, Zea Mays
cttttatatttttaatcaagtttattgtatttttagatgctgaattgaagtaaatattatcttagtttatgtttgtgatatatttagttttagcggtataattagccgcacaatatattaggggctgtttaaagtaaccttcaagttttatagagtggctcgggatgttaattttatagagctccgccactggccaccgctttactaaaatatgccacacgctcgtgcaccttggtggagaactgccccaaacctggaacctgacgcgtcggaacaaccacaaaactcttgctcaagtcaggcatctgcagcaaggagacggtcatgtgtgcctgtttgagtgcgaggaatgcctttgttgatgcctccgaccactgaaatgattccttcttcaataggacagttaatggtgctgcgatttcgccatagcttgcaatgaacttccggtaatatcctgtaagcccaaggaaaccacgtagcacccttaaagttctgggctgcgactaagtctctaatgttgctaccttctcaggatccatagccacaccatatgccgagattatatggcccaaatatgacacactagtaaccccataaaaacacttggagcgcttcaatgccaacttatgtgttctcagtgtttggaacacttacttgacgtgttggaggtgagctgcccacgtcttgctataaatcaggatgtcatcgaaaaatactagcacaaacttgcatatgaatgagttgaggatatcattcatcaagctttggaatgtggacggggcgttggtgaggccgaatggcatgacgaggaactcaaagtggcctcggtgtgttcggaattttgttttgtcaacatctttggggtgcattcgcacctggtggtacccactccgaaggtccagcttggtgaagaatctagaaccctaaagctcatctaacaattcatcaaccactggtatggggaaatggtcattcaccgtcttcccattgagttcatggtagtccacacagaatctccatgttccatctgacttcttcacaaggagcaccggagaagagaatgttggcgtgcattcccttataattcctcgatgcagcatgtcctcacattgcttctcaatttcatccttcaagagctaggggtatcggtacgaacgtacaaccattggtgtcgtgccaggcagtaatttgatgtggtgatcatggcgtcgggctggtggtaggccgcagggttatgcaaacaagtcttcgtaggagtacaataatttgtccaccaattccttcccttctgaaaatgcacaacagcgtggcttatagtcacacatccctgtccaacaaaccttgtggtcttgcttccagaatgtcattgatagacgttcgaagtcccatggaatcagacctaaggatcacattgtactcccaacacaacatcaaagccttccagtggtagagcatagcaagttagggagaactgttcttcaacaatttgaactgataaccatgtacataatcctaggttggtaaccttgtccccattggcgactttcactgtgccttggcgcctttctagtggaagttacatcttagacaccattgcctctgtgatgaatgtgtgtgtggaaccagtgtctacctgggctgtgagtggcactcccttgtcagaactgtaagcttcatggtttcccctacttcaattccagtcagggcgcgacgtggtatgtgatatgcccaactcgactactgcctcctctcctctcaagtgccatattctaattccagcaagaccccccctcccccccgagcaacacccattgagtacttctctgtgcaatgatagcatttcccctttgcacgcttcgtcgctaactcttccggtgatagccgtttgaatcgaggtcgaggcgaacaactaccttggatgctgtgttgttgccggcttccttgactaccaaactattcctagcagctctgtatcctcctctttttcctgcctccaattcccttttttcataggcccttgtcaggttcatggcgcactgcaaattcctgggagcttataatttgacatccgtgtgcaggggttccctagacctgccgtgaacatgctgacctactgcatggtagtaaggtcattgcaccggcacagaagaagtgagaactgtcgctggtattcctcgacagtgccaatgcgctagagatcatttaattcggccaaggggctggagcgaattggtgagtcgaatcgaaggttggtgaagtcaacgaacgttgttgtcgtgttccagtgcgtagaaccattccgccgccacaggtatagaatgcaattgctcatcctagatcatgatcgcccacgctagaatgattaaaaaatggattagaaaaatcacagataatctaacgattgttaagttattatagagtgggtgacgaatattattgctctacacacaagatgtgaatccaagatccatgtgcaacttatatgttttcttataaaaatattaaaattgtttttaattaatactctatccattcttttttatttgacgacgaacggtccaaattagtcaaataaaaatttggaggtagtgtattattaatataccaggatttattcggtaccataaagttactaaattttggtatagattcaactaaacttaaatttatttgacgaaaaacaagaattgcacttttgtttggtatagatttgactaaactctttgattctggcccgctgccgccatctccccatcacactaccattgccatctcgccctgaggttgcgatcccctcggccgcgaccctgcctcagtgcctcaccccgggccgcatctcctgcgctcgtgctacgaggacgggcgagccgcccgtgccgcaggaggagagtggagatcatcccgatgatgatgcgaggtggaaggctcacgggtttgacctctcaggttctgaggtgcttcagcacggagatatttgtcagcagattatcattctatacgacagaggaagaattcaaagatattttttcaccatttggcaccgtagaggaagctcgacttatgagagaccaccaaactggaaggatgaagggatttggttttgtcaaatattcatcgcaagcagaggcagagaaagctgtcaaggcaatggatggcaagattctacgtggaagattgatctttgtggagatggcaaaaggacacgaaagcaagtaggacaccctccccacgagaggatttcactgaacatgaaacatgagagcgccatcagcttatgccagatggcaaatatcccaaattctcaattgatgttgcaacttatatacaaagcacaagttaattttagctagcttatctttgataacactgctaccttgccatctgaaaggttgccgtgcattggtatccgttgacctgtgtaagaaatgttggcagctctgtgccctacgaactagcctggttgattaaccaagatctgttcaaaattaaagccagtaaaacatgaatattgttaaagatttcagcaatgaatcgttgagaaaagattgataaagacgttctaattataatatactcgttagcctttaacgagtgggtctagttagcctttaacgagtgggtctagtggccgcgaggttagataagaaaatttagtgagaagaaaatttagtatgggggtcttc

SEQ ID NO: 67151 - DNA, 3047 bp, Zea Mays
atgttaattttatagagctccgccactggccaccgctttactaaaatatgccacacgctcgtgcaccttggtggagaactgccccaaacctggaacctgacgcgtcggaacaaccacaaaactcttgctcaagtcaggcatctgcagcaaggagacggtcatgtgtgcctgtttgagtgcgaggaatgcctttgttgatgcctccgaccactgaaatgattccttcttcaataggacagttaatggtgctgcgatttcgccatagcttgcaatgaacttccggtaatatcctgtaagcccaaggaaaccacgtagcacccttaaagttctgggctgcgactaagtctctaatgttgctaccttctcaggatccatagccacaccatatgccgagattatatggcccaaatatgacacactagtaaccccataaaaacacttggagcgcttcaatgccaacttatgtgttctcagtgtttggaacacttacttgacgtgttggaggtgagctgcccacgtcttgctataaatcaggatgtcatcgaaaaatactagcacaaacttgcatatgaatgagttgaggatatcattcatcaagctttggaatgtggacggggcgttggtgaggccgaatggcatgacgaggaactcaaagtggcctcggtgtgttcggaattttgttttgtcaacatctttggggtgcattcgcacctggtggtacccactccgaaggtccagcttggtgaagaatctagaaccctaaagctcatctaacaattcatcaaccactggtatggggaaatggtcattcaccgtcttcccattgagttcatggtagtccacacagaatctccatgttccatctgacttcttcacaaggagcaccggagaagagaatgttggcgtgcattcccttataattcctcgatgcagcatgtcctcacattgcttctcaatttcatccttcaagagctaggggtatcggtacgaacgtacaaccattggtgtcgtgccaggcagtaatttgatgtggtgatcatggcgtcgggctggtggtaggccgcagggttatgcaaacaagtcttcgtaggagtacaataatttgtccaccaattccttcccttctgaaaatgcacaacagcgtggcttatagtcacacatccctgtccaacaaaccttgtggtcttgcttccagaatgtcattgatagacgttcgaagtcccatggaatcagacctaaggatcacattgtactcccaacacaacatcaaagccttccagtggtagagcatagcaagttagggagaactgttcttcaacaatttgaactgataaccatgtacataatcctaggttggtaaccttgtccccattggcgactttcactgtgccttggcgcctttctagtggaagttacatcttagacaccattgcctctgtgatgaatgtgtgtgtggaaccagtgtctacctgggctgtgagtggcactcccttgtcagaactgtaagcttcatggtttcccctacttcaattccagtcagggcgcgacgtggtatgtgatatgcccaactcgactactgcctcctctcctctcaagtgccatattctaattccagcaagaccccccctcccccccgagcaacacccattgagtacttctctgtgcaatgatagcatttcccctttgcacgcttcgtcgctaactcttccggtgatagccgtttgaatcgaggtcgaggcgaacaactaccttggatgctgtgttgttgccggcttccttgactaccaaactattcctagcagctctgtatcctcctctttttcctgcctccaattcccttttttcataggcccttgtcaggttcatggcgcactgcaaattcctgggagcttataatttgacatccgtgtgcaggggttccctagacctgccgtgaacatgctgacctactgcatggtagtaaggtcattgcaccggcacagaagaagtgagaactgtcgctggtattcctcgacagtgccaatgcgctagagatcatttaattcggccaaggggctggagcgaattggtgagtcgaatcgaaggttggtgaagtcaacgaacgttgttgtcgtgttccagtgcgtagaaccattccgccgccacaggttgcgatcccctcggccgcgaccctgcctcagtgcctcaccccgggccgcatctcctgcgctcgtgctacgaggacgggcgagccgcccgtgccgcaggaggagagtggagatcatcccgatgatgatgcgaggtggaaggctcacgggtttgacctctcaggttctgaggtgcttcagcacggagatatttgtcagcagattatcattctatacgacagaggaagaattcaaagatattttttcaccatttggcaccgtagaggaagctcgacttatgagagaccaccaaactggaaggatgaagggatttggttttgtcaaatattcatcgcaagcagaggcagagaaagctgtcaaggcaatggatggcaagattctacgtggaagattgatctttgtggagatggcaaaaggacacgaaagcaagtaggacaccctccccacgagaggatttcactgaacatgaaacatgagagcgccatcagcttatgccagatggcaaatatcccaaattctcaattgatgttgcaacttatatacaaagcacaagttaattttagctagcttatctttgataacactgctaccttgccatctgaaaggttgccgtgcattggtatccgttgacctgtgtaagaaatgttggcagctctgtgccctacgaactagcctggttgattaaccaagatctgttcaaaattaaagccagtaaaacatgaatattgttaaagatttcagcaatgaatcgttgagaaaagattgataaagacgttctaattataatatactcgttagcctttaacgagtgggtctagttagcctttaacgagtgggtctagtggccgcgaggttagataagaaaatttagtgagaagaaaatttagtatgggggtcttc

SEQ ID NO: 67152 - DNA, 2091 bp, Zea Mays
gtaagattgcttttccttcttcagtttccctcctgcagaagtgcggatggagatatcgagcttgtggatgaatgcatacaccgtatttgatttcaagcattgcctttatagtcattccgccgcaaccgtgtctctctcttagcaatattagttctgcatttgcttatgggtgaatgtgagcattaattaattggttttgtagtcgatggagatcaaagagttgcggtgctaattagacgggatgccctttttcctattgagcacgttcccatccttatatttgcccttggtatcatagatggaaaactctaagtcaaaatggtatgcttttgctgcaatagaagtgtcaaactgtcaatccgggattagatacctcatacccatcccataaagttataactatctctatccccataccatcataaatataaaattcatctcataccatctccattcgggtatgaaatccgtaatggatctccatccccgacaaaaaaaataattatattatattttatatgacattaacggtcacacgacactcaacaacaatacaccactaataaatctgacatgtgacatgtaacaaaaaaatattgtttaactatgcaaaataacaaaaataaagtgacgcgtgggctggtagctgtccacggtgaatatttgcttaaaagggtttggagaggtagggttagttgttgtgtttattgactattaagatgtacacctaattttactaagtaaatattatccatggttaatcgagttcggattctatctccttgtactcatatccacacacccaatggggaagaatttctctcaaatttgtattgattaaaatcttctcatactctaaccctgatagaaaaattcacaatgagttaatgggtatcgggtccaggtgcccattgacacctctagctgctaaggtcttttgaccacatttgcttggaagaagaccttgtccatgatagaccacaaaaatgctttgacagtgtgggccatgaaaatcttgtgaaatagttctttaatcgttccaaaaggctatacacccaagagcaaatgaagaacaagtgggttgtatcataccaagtggaagaataaggccaagaatagcattgatacctacaaaatttgcatcgtcaaggtgctgaatcaggttttgggcattgtcatctcatctcctcaacaccatgtccatcatgaagctgtcacaggaggccgcctgctacaagaatcccaccacttcctgtgcttcgctctccccagggaccacctagacttaatgaggagagtggagatcatcccgatgatgatgcgaggtggaaggctcacgggtttgacctctcaggttctgaggtgcttcagcacggagatatttgtcagcagattatcattctatacgacagaggaagaattcaaagatattttttcaccatttggcaccgtagaggaagctcgacttatgagagaccaccaaactggaaggatgaagggatttggttttgtcaaatattcatcgcaagcagaggcagagaaagctgtcaaggcaatggatggcaagattctacgtggaagattgatctttgtggagatggcaaaaggacacgaaagcaagtaggacaccctccccacgagaggatttcactgaacatgaaacatgagagcgccatcagcttatgccagatggcaaatatcccaaattctcaattgatgttgcaacttatatacaaagcacaagttaattttagctagcttatctttgataacactgctaccttgccatctgaaaggttgccgtgcattggtatccgttgacctgtgtaagaaatgttggcagctctgtgccctacgaactagcctggttgattaaccaagatctgttcaaaattaaagccagtaaaacatgaatattgttaaagatttcagcaatgaatcgttgagaaaagattgataaagacgttctaattataatatactcgttagcctttaacgagtgggtctagttagcctttaacgagtgggtctagtggccgcgaggttagataagaaaatttagtgagaagaaaatttagtatgggggtcttc

SEQ ID NO: 67153 - DNA, 1970 bp, Zea Mays
gtctctctcttagcaatattagttctgcatttgcttatgggtgaatgtgagcattaattaattggttttgtagtcgatggagatcaaagagttgcggtgctaattagacgggatgccctttttcctattgagcacgttcccatccttatatttgcccttggtatcatagatggaaaactctaagtcaaaatggtatgcttttgctgcaatagaagtgtcaaactgtcaatccgggattagatacctcatacccatcccataaagttataactatctctatccccataccatcataaatataaaattcatctcataccatctccattcgggtatgaaatccgtaatggatctccatccccgacaaaaaaaataattatattatattttatatgacattaacggtcacacgacactcaacaacaatacaccactaataaatctgacatgtgacatgtaacaaaaaaatattgtttaactatgcaaaataacaaaaataaagtgacgcgtgggctggtagctgtccacggtgaatatttgcttaaaagggtttggagaggtagggttagttgttgtgtttattgactattaagatgtacacctaattttactaagtaaatattatccatggttaatcgagttcggattctatctccttgtactcatatccacacacccaatggggaagaatttctctcaaatttgtattgattaaaatcttctcatactctaaccctgatagaaaaattcacaatgagttaatgggtatcgggtccaggtgcccattgacacctctagctgctaaggtcttttgaccacatttgcttggaagaagaccttgtccatgatagaccacaaaaatgctttgacagtgtgggccatgaaaatcttgtgaaatagttctttaatcgttccaaaaggctatacacccaagagcaaatgaagaacaagtgggttgtatcataccaagtggaagaataaggccaagaatagcattgatacctacaaaatttgcatcgtcaaggtgctgaatcaggttttgggcattgtcatctcatctcctcaacaccatgtccatcatgaagctgtcacaggaggccgcctgctacaagaatcccaccacttcctgtgcttcgctctccccagggaccacctagacttaatggtttcaggaggagagtggagatcatcccgatgatgatgcgaggtggaaggctcacgggtttgacctctcaggttctgaggtgcttcagcacggagatatttgtcagcagattatcattctatacgacagaggaagaattcaaagatattttttcaccatttggcaccgtagaggaagctcgacttatgagagaccaccaaactggaaggatgaagggatttggttttgtcaaatattcatcgcaagcagaggcagagaaagctgtcaaggcaatggatggcaagattctacgtggaagattgatctttgtggagatggcaaaaggacacgaaagcaagtaggacaccctccccacgagaggatttcactgaacatgaaacatgagagcgccatcagcttatgccagatggcaaatatcccaaattctcaattgatgttgcaacttatatacaaagcacaagttaattttagctagcttatctttgataacactgctaccttgccatctgaaaggttgccgtgcattggtatccgttgacctgtgtaagaaatgttggcagctctgtgccctacgaactagcctggttgattaaccaagatctgttcaaaattaaagccagtaaaacatgaatattgttaaagatttcagcaatgaatcgttgagaaaagattgataaagacgttctaattataatatactcgttagcctttaacgagtgggtctagttagcctttaacgagtgggtctagtggccgcgaggttagataagaaaatttagtgagaagaaaatttagtatgggggtcttc

SEQ ID NO: 67154 - DNA, 716 bp, Zea Mays
acattatattataaaggattatcattctatacgacagaggaagaattcaaagatattttttcaccatttggcaccgtagaggaagctcgacttatgagagaccaccaaactggaaggatgaagggatttggttttgtcaaatattcatcgcaagcagaggcagagaaagctgtcaaggcaatggatggcaagattctacgtggaagattgatctttgtggagatggcaaaaggacacgaaagcaagtaggacaccctccccacgagaggatttcactgaacatgaaacatgagagcgccatcagcttatgccagatggcaaatatcccaaattctcaattgatgttgcaacttatatacaaagcacaagttaattttagctagcttatctttgataacactgctaccttgccatctgaaaggttgccgtgcattggtatccgttgacctgtgtaagaaatgttggcagctctgtgccctacgaactagcctggttgattaaccaagatctgttcaaaattaaagccagtaaaacatgaatattgttaaagatttcagcaatgaatcgttgagaaaagattgataaagacgttctaattataatatactcgttagcctttaacgagtgggtctagttagcctttaacgagtgggtctagtggccgcgaggttagataagaaaatttagtgagaagaaaatttagtatgggggtcttc

SEQ ID NO: 67155 - DNA, 552 bp, Zea Mays
ggagaagataatttgacttataacttagattctacgtggaagattgatctttgtggagatggcaaaaggacacgaaagcaagtaggacaccctccccacgagaggatttcactgaacatgaaacatgagagcgccatcagcttatgccagatggcaaatatcccaaattctcaattgatgttgcaacttatatacaaagcacaagttaattttagctagcttatctttgataacactgctaccttgccatctgaaaggttgccgtgcattggtatccgttgacctgtgtaagaaatgttggcagctctgtgccctacgaactagcctggttgattaaccaagatctgttcaaaattaaagccagtaaaacatgaatattgttaaagatttcagcaatgaatcgttgagaaaagattgataaagacgttctaattataatatactcgttagcctttaacgagtgggtctagttagcctttaacgagtgggtctagtggccgcgaggttagataagaaaatttagtgagaagaaaatttagtatgggggtcttc

SEQ ID NO: 67156 - DNA, 2175 bp, Zea Mays
acttctgcgtatgcacgagtatttcgtgtgcaccgaatattgggatttgggaggacaggcgcccgcactccgcctccgcttccctccgcctcgactctcgaccgcatctgagcactccgccggaggtccgcctccgcaggcaccgccacgccatgtcgaagccagcggatcagcagccgtcggacatgcaggtcgactcctccgtcgccgaggagaagccggccatcagattctccatcaacgtgcttgagctcatgagggaggcgcagatgcagcatggtctccgccagagcgactacacgcggtaccggagatactgctctgcacgactcagaaggctgtacaagtctctcaagtttttgcatggccgaggtaaatacaacagaaggaatataaccgagtcaacagtcacggatgtgagtgttttatatggccgagcgagcatggagtcatgccatggagaagaaaactgctggtacaaacgcaaaacaacgcatctacatgttgggtcgatttcggaaagcagttaaatgggcatcacttttttcacaattatgttctgtaaaaggagattccaggacatctctagaagctgaggcatatgcttcatatatgaagggtgctttgttttttgagcaagacaagaatatagatgccgcaatgataaatttcaagaatacgagggctatatatgaggagcttgggaagtatggcagtatagaaaatcaacttttatgccgtcagcgcatcgacgaagtggagcctatgattgatttctgttcacataaactaggtggatcatatttgcaagcacatgaactcctggatactgctaatgatcttctcaaggcgaagatggaggctgtattgtctgagacaagatcacagcaggcagcttccatgactgagtttaaatggcttggtcgcacttttcctattacaaatgcaaagacccgtgtctctattttgaaagcccagcagcttgagagagacttgagtgctgcagccacagaatcagttgctgctgacaaaaagcttgctatatttgataaaatattttctgcataccatgatgctcggagctgcatccgcaatgacctggcttctgctggcaatgctgaggatataaaagatgacctgaatggtcttgacaaggctgttagtgctgttctaggattgagaactatagaacgtaaccagttacttgttagcattggtaaaagtaaattcacaaagcatcgagatgaaaaaaatgagcgaaccacaaagccagaagaacttgttcggctatatgatctgcttattcagatgtttctttttggctaagtcatatagttcagcaggcaaaagagctgaagcatatgcattattctgccatgcccatactctcactggttctgcactgcaacagcattcaaacagtcatgacaaggctttaatacaagatctggagtttctatctaacaactgtagatcaaatagctgcatagaacatgcaacaggcattatggaggaggagattgttcctttaaaactttctaaaggagtctcaactatgtcacttgctgataataaaacaaaggagaacaagtatctccttgatatgctagagagctatgaatcagcgattggtgagccgaacaccaaagctccatgtcgcattgctcaattcccacctcctttccaagcagttccatgcaatcctattgtgcttgacatggcttacaactcagttgagttcccaaaccttgagaaccgtatgaaaaaagaaaagaagggtcttctgagcaggttctggggttgaaagatggcatatgcctaggattttggtacattgtcccatcatttgatatgctttgtgcatgaacggtgtaaaactagaatgtcctgataatacctctctgatgggtgaaagatcttcagtattccgcccaaggatttttgagattctttatcagaaggttaatttagccgttgcaaagtacatctagctcggtgactgatcagcataaccttttgctgttactaaattttgagcaatgactgatttcttggattatcgatatttaagttgattcattttcatatcccaaagtaggcagggaacaataatgaaaatgttttcaatattaatttaccttgctactcaattaggtataaaattttatatttcca

SEQ ID NO: 67157 - DNA, 2266 bp, Zea Mays
acttctgcgtatgcacgagtatttcgtgtgcaccgaatattgggatttgggaggacaggcgcccgcactccgcctccgcttccctccgcctcgactctcgaccgcatctgagcactccgccggaggtccgcctccgcaggcaccgccacgccatgtcgaagccagcggatcagcagccgtcggacatgcaggtcgactcctccgtcgccgaggagaagccggccatcagattctccatcaacgtgcttgagctcatgagggaggcgcagatgcagcatggtctccgccagagcgactacacgcggtaccggagatactgctctgcacgactcagaaggctgtacaagtctctcaagtttttgcatggccgaggtaaatacaacagaaggaatataaccgagtcaacagtcacggatgtgagtgttttatatggccgagcgagcatggagtcatgccatggagaagaaaactgctggtacaaacgcaaaacaacgcatctacatgttgggtcgatttcggaaagcagttaaatgggcatcacttttttcacaattatgttctgtaaaaggagattccaggacatctctagaagctgaggcatatgcttcatatatgaagggtgctttgttttttgagcaagacaagaatatagatgccgcaatgataaatttcaagaatacgagggctatatatgaggagcttgggaagtatggcagtatagaaaatcaacttttatgccgtcagcgcatcgacgaagtggagcctatgattgatttctgttcacataaactaggtggatcatatttgcaagcacatgaactcctggatactgctaatgatcttctcaaggcgaagatggaggctgtattgtctgagacaagatcacagcaggcagcttccatgactgagtttaaatggcttggtcgcacttttcctattacaaatgcaaagacccgtgtctctattttgaaagcccagcagcttgagagagacttgagtgctgcagccacagaatcagttgctgctgacaaaaagcttgctatatttgataaaatattttctgcataccatgatgctcggagctgcatccgcaatgacctggcttctgctggcaatgctgaggatataaaagatgacctgaatggtcttgacaaggctgttagtgctgttctaggattgagaactatagaacgtaaccagttacttgttagcattggtaaaagtaaattcacaaagcatcgagatgaaaaaaatgagcgaaccacaaagccagaagaacttgttcggctatatgatctgcttattcagatttagttagctctggaagaaacaaaaatgaagaagaaaactcttttattcatgagtatgagctgaaaggcttggctttccgagctgagagatgtttctttttggctaagtcatatagttcagcaggcaaaagagctgaagcatatgcattattctgccatgcccatactctcactggttctgcactgcaacagcattcaaacagtcatgacaaggctttaatacaagatctggagtttctatctaacaactgtagatcaaatagctgcatagaacatgcaacaggcattatggaggaggagattgttcctttaaaactttctaaaggagtctcaactatgtcacttgctgataataaaacaaaggagaacaagtatctccttgatatgctagagagctatgaatcagcgattggtgagccgaacaccaaagctccatgtcgcattgctcaattcccacctcctttccaagcagttccatgcaatcctattgtgcttgacatggcttacaactcagttgagttcccaaaccttgagaaccgtatgaaaaaagaaaagaagggtcttctgagcaggttctggggttgaaagatggcatatgcctaggattttggtacattgtcccatcatttgatatgctttgtgcatgaacggtgtaaaactagaatgtcctgataatacctctctgatgggtgaaagatcttcagtattccgcccaaggatttttgagattctttatcagaaggttaatttagccgttgcaaagtacatctagctcggtgactgatcagcataaccttttgctgttactaaattttgagcaatgactgatttcttggattatcgatatttaagttgattcattttcatatcccaaagtaggcagggaacaataatgaaaatgttttcaatattaatttaccttgctactcaattaggtataaaattttatatttcca

SEQ ID NO: 67158 - DNA, 2452 bp, Zea Mays
acttctgcgtatgcacgagtatttcgtgtgcaccgaatattgggatttgggaggacaggcgcccgcactccgcctccgcttccctccgcctcgactctcgaccgcatctgagcactccgccggaggtccgcctccgcaggcaccgccacgccatgtcgaagccagcggatcagcagccgtcggacatgcaggtcgactcctccgtcgccgaggagaagccggccatcagattctccatcaacgtgcttgagctcatgagggaggcgcagatgcagcatggtctccgccagagcgactacacgcggtaccggagatactgctctgcacgactcagaaggctgtacaagtctctcaagtttttgcatggccgaggtaaatacaacagaaggaatataaccgagtcaacagtcacggatgtgaggtgtggtctcttctgctgataatatgctatatagcatgttgcttgtcttcatatttctctttgcagtgttatataaaccttgtctgatgtttggagttggactattacaatttgtttaaacctggagaagacttatgaagcaatttaacatgtgggagtaggtttctccatgtagtgttttatatggccgagcgagcatggagtcatgccatggagaagaaaactgctggtacaaacgcaaaacaacgcatctacatgttgggtcgatttcggaaagcagttaaatgggcatcacttttttcacaattatgttctgtaaaaggagattccaggacatctctagaagctgaggcatatgcttcatatatgaagggtgctttgttttttgagcaagacaagaatatagatgccgcaatgataaatttcaagaatacgagggctatatatgaggagcttgggaagtatggcagtatagaaaatcaacttttatgccgtcagcgcatcgacgaagtggagcctatgattgatttctgttcacataaactaggtggatcatatttgcaagcacatgaactcctggatactgctaatgatcttctcaaggcgaagatggaggctgtattgtctgagacaagatcacagcaggcagcttccatgactgagtttaaatggcttggtcgcacttttcctattacaaatgcaaagacccgtgtctctattttgaaagcttgagagagacttgagtgctgcagccacagaatcagttgctgctgacaaaaagcttgctatatttgataaaatattttctgcataccatgatgctcggagctgcatccgcaatgacctggcttctgctggcaatgctgaggatataaaagatgacctgaatggtcttgacaaggctgttagtgctgttctaggattgagaactatagaacgtaaccagttacttgttagcattggtaaaagtaaattcacaaagcatcgagatgaaaaaaatgagcgaaccacaaagccagaagaacttgttcggctatatgatctgcttattcagaatgtaacggacttgacagatttagttagctctggaagaaacaaaaatgaagaagaaaactcttttattcatgagtatgagctgaaaggcttggctttccgagctgagagatgtttctttttggctaagtcatatagttcagcaggcaaaagagctgaagcatatgcattattctgccatgcccatactctcactggttctgcactgcaacagcattcaaacagtcatgacaaggctttaatacaagatctggagtttctatctaacaactgtagatcaaatagctgcatagaacatgcaacaggcattatggaggaggagattgttcctttaaaactttctaaaggagtctcaactatgtcacttgctgataataaaacaaaggagaacaagtatctccttgatatgctagagagctatgaatcagcgattggtgagccgaacaccaaagctccatgtcgcattgctcaattcccacctcctttccaagcagttccatgcaatcctattgtgcttgacatggcttacaactcagttgagttcccaaaccttgagaaccgtatgaaaaaagaaaagaagggtcttctgagcaggttctggggttgaaagatggcatatgcctaggattttggtacattgtcccatcatttgatatgctttgtgcatgaacggtgtaaaactagaatgtcctgataatacctctctgatgggtgaaagatcttcagtattccgcccaaggatttttgagattctttatcagaaggttaatttagccgttgcaaagtacatctagctcggtgactgatcagcataaccttttgctgttactaaattttgagcaatgactgatttcttggattatcgatatttaagttgattcattttcatatcccaaagtaggcagggaacaataatgaaaatgttttcaatattaatttaccttgctactcaattaggtataaaattttatatttcca

SEQ ID NO: 67159 - DNA, 3564 bp, Zea Mays
ctcgtatattaaccccgcctctgcctctcttcccctctttccccccgtctccgcctccctcccaccgccccacggccccaccagattcctccgcaccgccatggacgacctcgagcaggcaatactgctggcctccgactctcccgccgccgccgcggcgtccccgtccgtccgcgcggaggctctcgccttctgcgcccgcgcccgcgacgagtcgccgccgtcgtcgctcctccgcctgtgcctctccggcatcgcctcctccccgcacgcgcaggtccacttctggtgcctccagtccctccacgacttgctcctccgccgccgcctcgtgctccccgacgacctcgcgctgctccgatcctctctcctatcgctggcggtttcctctcacgccgcgtcgccgcctttcctccgcaacaagctcgcgcagcttgtcgcgctcctcgtccgcctcgactacccccatgtctacccttcctacttcctggacctcctcccgcccgcgccgccgcagcccggccccacggacatgttcgcgcgggttctaatctccctcgacgacgacctgctctcccaggagtacccccgcagttctgaagaggccgccgacgctatgcgggtgaaggattccatgcgcgtgcagtgcgtgtcccagatcgccagccactggcacaccgccgccgtgaccctccgtacagccgaccctgcggttgcggcagtggcccttgacgcggcgcgcaggtgcatttcgtggatcgatgtcggactggtcgccaatgatgtgttcgttcctcttctctttgacattgccatgtcccctgcaagcatgcctccgcttgctgctgcagcggtggggtgcctttctgctgtggcaacaaagaggatggatttcagggcgaaggtgggattgttgaggtcactcctggctgcacatcaggggcttggtagcccagacagtggggtgaagatggcacccttggtgacaacatatgcagccgaggctctggaatgtcatcgcaggcttggccctactgatgctgatggagctgcagcgttggagatgctggaagaggtgctaccagctgtatttgcagctgcagagagcggtaacgatgaagatgtggattctggttccgtgcttgagttcttatctggctatgtgagcataatgaaggcaccgtctgagaagcagttggcgcacttgggacggatcttggatctggtgcgggtgcagatgtcatttgatccagtatatagggggcaccttgacgtgcttgacaagatagggaaggaggaggaggacctcatggcggagcaacgaaaagatttgattgtattgttccggagcatttgtcgtgtcgcaccagctgccgctcagctgttcataagagggctgattatgacagctctctcgtctgcagaagctagtgtggaggatgttgaggttgctcttaccctgttcttccggcttggagaagctgtgggtgaagaggagattcggagtggggcagggctcctaggagagcttgtgcccatgctcctttcagcgaggttcttgtgtcacacacatcgcttagttgcattggtgtatctggagacagttacccgctacatgaagtttgtacaggagcatgtgcagtatgtaccacacctgcttggtgtgttcttggataaccgtggaatacaccatcagaatgcccacgtgagccgtcgtgcaggatacttattcatgagggcagtcaagtcattgaaggcaaatctagtgccttacctggataccatattgcagagtctgcaagatgtactaagtcaattcacttctatggattgggcaaacaaagatactaagttccccagctccgaggatggcagccaaatttttgaggctgttggattattgattggcattgaagaggtatcaccagagaagcaggctcaatgcttgactgctcttctaaatcctctctgtcaccagattgagtcacttgttatggatgccaaagcacgagggcttgaggaatcattaccaagagctattagtcttcaacaaatcattgttgcattgaatatggtcagcaagggctttaatgagcgccttgtgatggtaaataggccagctattggggtcatgttcaagaaaacccttgatgtagttttgcaagtccttgtttcatttcctagtgtaagacctctgcgatctaaggtgatatcgtttctgcatcgtatgatcgagatattaggtatctcagtgcttccatgtattccaatcgcactgagacaattgcttcttgataacgaggctaaggatatggtggaatttctcgtattggtaaatcaaataatctgcaaatttaaatcgtcagctagcgccatattggaggaagtcttccctactattgcaagtcatttgtctgtgatattatcacaagatgcattttcagctggtcttgcaagcaatactgaggaaatgcgagaactacaagagttgcagaggacattatacatattcttgcatgccatggcaacacatgatctttctacagttctccttacttctagctctaggcagtatctggagaccataatgcaattgcttttatttacctcatgcaaacataaggatatactgctacgcaagattttcgtgaatcttgtaaaagactggtgctctaactctgaagataaggttcctggcttccgagtatttatgattgagaagtttgctactaattgctgtttatacagtgtacttgataaatcatttgatttacgcgatgcaaactcgcttgtcctttttggtgaaattgtgctggcccagaagattatgtatgaaagatttggggaggaattcattatgaactttgtagctaaaggtcttcctgaagttcactgcccaccggacctagctgaacagtactaccagaagttaaagggaaatgatatcaaggcattcaggtcattttatcaatcacttgttgagaagataagaccacaaggaaatgggagtcttgttttcagatagcatcattctttgattttcaatatgtcttccaccaaaagactcctcaactgtgttattcaattataggctagttgtgccatcaatgtacatagagctataatttctgagattggaagacgtattactgcggcattatctttaccaagtttggcaaccatggtggcgtccttattcattatattctatctgagatgcaggggaattcatcccacaatagtttctactttctactaagaaggaaatacatggttctactttctcatcttggcctttctccccaaatcggactgttctgctgtctgggcctgaaattttgcatggtatttcctgtgaactagttgtgtataggggcaaaaagagtgtcgtgtaggctgtgttttttcctgatgaaaaatgtcgcaccgcctgttgtgttatgagtcgggttgtaccaaattttgcgaaacggcagcggttttttgcaccccccctgttgccatctggggtgatgtacatatttttttttggcattccccattttatttcataaattcttttat

SEQ ID NO: 67160 - DNA, 3576 bp, Zea Mays
ctcgtatattaaccccgcctctgcctctcttcccctctttccccccgtctccgcctccctcccaccgccccacggccccaccagattcctccgcaccgccatggacgacctcgagcaggcaatactgctggcctccgactctcccgccgccgccgcggcgtccccgtccgtccgcgcggaggctctcgccttctgcgcccgcgcccgcgacgagtcgccgccgtcgtcgctcctccgcctgtgcctctccggcatcgcctcctccccgcacgcgcaggtccacttctggtgcctccagtccctccacgacttgctcctccgccgccgcctcgtgctccccgacgacctcgcgctgctccgatcctctctcctatcgctggcggtttcctctcacgccgcgtcgccgcctttcctccgcaacaagctcgcgcagcttgtcgcgctcctcgtccgcctcgactacccccatgtctacccttcctacttcctggacctcctcccgcccgcgccgccgcagcccggccccacggacatgttcgcgcgggttctaatctccctcgacgacgacctgctctcccaggagtacccccgcagttctgaagaggccgccgacgctatgcgggtgaaggattccatgcgcgtgcagtgcgtgtcccagatcgccagccactggcacaccgccgccgtgaccctccgtacagccgaccctgcggttgcggcagtggcccttgacgcggcgcgcaggtgcatttcgtggatcgatgtcggactggtcgccaatgatgtgttcgttcctcttctctttgacattgccatgtcccctgcaagcatgcctccgcttgctgctgcagcggtggggtgcctttctgctgtggcaacaaagaggatggatttcagggcgaaggtgggattgttgaggtcactcctggctgcacatcaggggcttggtagcccagacagtggggtgaagatggcacccttggtgacaacatatgcagccgaggctctggaatgtcatcgcaggcttggccctactgatgctgatggagctgcagcgttggagatgctggaagaggtgctaccagctgtatttgcagctgcagagagcggtaacgatgaagatgtggattctggttccgtgcttgagttcttatctggctatgtgagcataatgaaggcaccgtctgagaagcagttggcgcacttgggacggatcttggatctggtgcgggtgcagatgtcatttgatccagtatatagggggcaccttgacgtgcttgacaagatagggaaggaggaggaggacctcatggcggagcaacgaaaagatttgattgtattgttccggagcatttgtcgtgtcgcaccagctgccgctcagctgttcataagagggctgattatgacagctctctcgtctgcagaagctagtgtggaggatgttgaggttgctcttaccctgttcttccggcttggagaagctgtgggtgaagaggagattcggagtggggcagggctcctaggagagcttgtgcccatgctcctttcagcgaggttcttgtgtcacacacatcgcttagttgcattggtgtatctggagacagttacccgctacatgaagtttgtacaggagcatgtgcagtatgtaccacacctgcttggtgtgttcttggataaccgtggaatacaccatcagaatgcccacgtgagccgtcgtgcaggatacttattcatgagggcagtcaagtcattgaaggcaaatctagtgccttacctggataccatattgcagagtctgcaagatgtactaagtcaattcacttctatggattgggcaaacaaagatactaagttccccagctccgaggatggcagccaaatttttgaggctgttggattattgattggcattgaagaggtatcaccagagaagcaggctcaatgcttgactgctcttctaaatcctctctgtcaccagattgagtcacttgttatggatgccaaagcacgagggcttgaggaatcattaccaagagctattagtcttcaacaaatcattgttgcattgaatatggtcagcaagggctttaatgagcgccttgtgatggtaaataggccagctattggggtcatgttcaagaaaacccttgatgtagttttgcaagtccttgtttcatttcctagtgtaagacctctgcgatctaaggtgatatcgtttctgcatcgtatgatcgagatattaggtatctcagtgcttccatgtattccaatcgcactgagacaattgcttcttgataacgaggctaaggatatggtggaatttctcgtattggtaaatcaaataatctgcaaatttaaatcgtcagctagcgccatattggaggaagtcttccctactattgcaagtcatttgtctgtgatattatcacaagatgcattttcagctggtcttgcaagcaatactgaggaaatgcgagaactacaagagttgcagaggacattatacatattcttgcatgccatggcaacacatgatctttctacagttctccttacttctagctctaggcagtatctggagaccataatgcaattgcttttatttacctcatgcaaacataaggatatactgctacgcaaggcatgtgttcagattttcgtgaatcttgtaaaagactggtgctctaactctgaagataaggttcctggcttccgagtatttatgattgagaagtttgctactaattgctgtttatacagtgtacttgataaatcatttgatttacgcgatgcaaactcgcttgtcctttttggtgaaattgtgctggcccagaagattatgtatgaaagatttggggaggaattcattatgaactttgtagctaaaggtcttcctgaagttcactgcccaccggacctagctgaacagtactaccagaagttaaagggaaatgatatcaaggcattcaggtcattttatcaatcacttgttgagaagataagaccacaaggaaatgggagtcttgttttcagatagcatcattctttgattttcaatatgtcttccaccaaaagactcctcaactgtgttattcaattataggctagttgtgccatcaatgtacatagagctataatttctgagattggaagacgtattactgcggcattatctttaccaagtttggcaaccatggtggcgtccttattcattatattctatctgagatgcaggggaattcatcccacaatagtttctactttctactaagaaggaaatacatggttctactttctcatcttggcctttctccccaaatcggactgttctgctgtctgggcctgaaattttgcatggtatttcctgtgaactagttgtgtataggggcaaaaagagtgtcgtgtaggctgtgttttttcctgatgaaaaatgtcgcaccgcctgttgtgttatgagtcgggttgtaccaaattttgcgaaacggcagcggttttttgcaccccccctgttgccatctggggtgatgtacatatttttttttggcattccccattttatttcataaattcttttat

SEQ ID NO: 67161 - DNA, 3706 bp, Zea Mays
ctcgtatattaaccccgcctctgcctctcttcccctctttccccccgtctccgcctccctcccaccgccccacggccccaccagattcctccgcaccgccatggacgacctcgagcaggcaatactgctggcctccgactctcccgccgccgccgcggcgtccccgtccgtccgcgcggaggctctcgccttctgcgcccgcgcccgcgacgagtcgccgccgtcgtcgctcctccgcctgtgcctctccggcatcgcctcctccccgcacgcgcaggtccacttctggtgcctccagtccctccacgacttgctcctccgccgccgcctcgtgctccccgacgacctcgcgctgctccgatcctctctcctatcgctggcggtttcctctcacgccgcgtcgccgcctttcctccgcaacaagctcgcgcagcttgtcgcgctcctcgtccgcctcgactacccccatgtctacccttcctacttcctggacctcctcccgcccgcgccgccgcagcccggccccacggacatgttcgcgcgggttctaatctccctcgacgacgacctgctctcccaggagtacccccgcagttctgaagaggccgccgacgctatgcgggtgaaggattccatgcgcgtgcagtgcgtgtcccagatcgccagccactggcacaccgccgccgtgaccctccgtacagccgaccctgcggttgcggcagtggcccttgacgcggcgcgcaggtgcatttcgtggatcgatgtcggactggtcgccaatgatgtgttcgttcctcttctctttgacattgccatgtcccctgcaagcatgcctccgcttgctgctgcagcggtggggtgcctttctgctgtggcaacaaagaggatggatttcagggcgaaggtgggattgttgaggtcactcctggctgcacatcaggggcttggtagcccagacagtggggtgaagatggcacccttggtgacaacatatgcagccgaggctctggaatgtcatcgcaggcttggccctactgatgctgatggagctgcagcgttggagatgctggaagaggtgctaccagctgtatttgcagctgcagagagcggtaacgatgaagatgtggattctggttccgtgcttgagttcttatctggctatgtgagcataatgaaggcaccgtctgagaagcagttggcgcacttgggacggatcttggatctggtgcgggtgcagatgtcatttgatccagtatatagggggcaccttgacgtgcttgacaagatagggaaggaggaggaggacctcatggcggagcaacgaaaagatttgattgtattgttccggagcatttgtcgtgtcgcaccagctgccgctcagctgttcataagagggctgattatgacagctctctcgtctgcagaagctagtgtggaggatgttgaggttgctcttaccctgttcttccggcttggagaagctgtgggtgaagaggagattcggagtggggcagggctcctaggagagcttgtgcccatgctcctttcagcgaggttcttgtgtcacacacatcgcttagttgcattggtgtatctggagacagttacccgctacatgaagtttgtacaggagcatgtgcagtatgtaccacacctgcttggtgtgttcttggataaccgtggaatacaccatcagaatgcccacgtgagccgtcgtgcaggatacttattcatgagggcagtcaagtcattgaaggcaaatctagtgccttacctggataccatattgcagagtctgcaagatgtactaagtcaattcacttctatggattgggcaaacaaagatactaagttccccagctccgaggatggcagccaaatttttgaggctgttggattattgattggcattgaagaggtatcaccagagaagcaggctcaatgcttgactgctcttctaaatcctctctgtcaccagattgagtcacttgttatggatgccaaagcacgagggcttgaggaatcattaccaagagctattagtcttcaacaaatcattgttgcattgaatatggtcagcaagggctttaatgagcgccttgtgatggtaaataggccagctattggggtcatgttcaagaaaacccttgatgtagttttgcaagtccttgtttcatttcctagtgtaagacctctgcgatctaaggtgatatcgtttctgcatcgtatgatcgagatattaggtatctcagtgcttccatgtattccaatcgcactgagacaattgcttcttgataacgaggctaaggatatggtggaatttctcgtattggtaaatcaaataatctgcaaatttaaatcgtcagctagcgccatattggaggaagtcttccctactattgcaagtcatttgtctgtgatattatcacaagatgcattttcagctggtcttgcaagcaatactgaggaaatgcgagaactacaagagttgcagaggacattatacatattcttgcatgccatggcaacacatgatctttctacagttctccttacttctagctctaggcagtatctggagaccataatgcaattgcttttatttacctcatgcaaacataaggatatactgctacgcaaggcatgtgttcagattttcgtgaatcttgtaaaagactggtgctctaactctgaagataaggttcctggcttccgagtatttatgattgagaagtttgctactaattgctgtttatacagtgtacttgataaatcatttgatttacgcgatgcaaactcgcttgtcctttttggtgaaattgtgctggcccagaagattatgtatgaaagatttggggaggaattcattatgaactttgtagctaaaggtcttcctgaagttcactgcccaccggacctagctgaacagtactaccagaagttaaagggaaatgatatcaaggcattcaggtcattttatcaatcacttgttgagaagataagaccacaaggaaatgggagtcttgttttcagatagcatcattctttgattttcaatatgtcttccaccaaaagactcctcaactgtgttattcaattataggctagttgtgccatcaatgtacatagagctataatttctgagattggaaggggaattcatcccacaatagtttctactttctactaagaaggaaatacatggttctactttctcatcttggcctttctccccaaatcggactgttctgctgtctgggcctgaaattttgcatggtacggcgggaaataagcataggtgatagaactagcacactacaggactgcggaactgtgacatacgactagggcagcatgcatgtggctgtggactcggcatgaggttgctctccctcgctccatattttcttttgacctaatataaacacttaggccacgggtacacacctgcgtgccggagctggatctaccacacatcacttgtctaaggccatcttcagaagagcgtgtttatggatccgtaaaatattgttctgtactgtagattatactgtttatagagtgaaatttaaaataaaaagtgaaatattgaaataaagagtgagatagggtaggataggatagaaggccgccggagatagcctaatcatcgtttgtttgacacagatctagatgatcaatgttaatagaaataagcttatcgttc

SEQ ID NO: 67162 - DNA, 3787 bp, Zea Mays
ctcgtatattaaccccgcctctgcctctcttcccctctttccccccgtctccgcctccctcccaccgccccacggccccaccagattcctccgcaccgccatggacgacctcgagcaggcaatactgctggcctccgactctcccgccgccgccgcggcgtccccgtccgtccgcgcggaggctctcgccttctgcgcccgcgcccgcgacgagtcgccgccgtcgtcgctcctccgcctgtgcctctccggcatcgcctcctccccgcacgcgcaggtccacttctggtgcctccagtccctccacgacttgctcctccgccgccgcctcgtgctccccgacgacctcgcgctgctccgatcctctctcctatcgctggcggtttcctctcacgccgcgtcgccgcctttcctccgcaacaagctcgcgcagcttgtcgcgctcctcgtccgcctcgactacccccatgtctacccttcctacttcctggacctcctcccgcccgcgccgccgcagcccggccccacggacatgttcgcgcgggttctaatctccctcgacgacgacctgctctcccaggagtacccccgcagttctgaagaggccgccgacgctatgcgggtgaaggattccatgcgcgtgcagtgcgtgtcccagatcgccagccactggcacaccgccgccgtgaccctccgtacagccgaccctgcggttgcggcagtggcccttgacgcggcgcgcaggtgcatttcgtggatcgatgtcggactggtcgccaatgatgtgttcgttcctcttctctttgacattgccatgtcccctgcaagcatgcctccgcttgctgctgcagcggtggggtgcctttctgctgtggcaacaaagaggatggatttcagggcgaaggtgggattgttgaggtcactcctggctgcacatcaggggcttggtagcccagacagtggggtgaagatggcacccttggtgacaacatatgcagccgaggctctggaatgtcatcgcaggcttggccctactgatgctgatggagctgcagcgttggagatgctggaagaggtgctaccagctgtatttgcagctgcagagagcggtaacgatgaagatgtggattctggttccgtgcttgagttcttatctggctatgtgagcataatgaaggcaccgtctgagaagcagttggcgcacttgggacggatcttggatctggtgcgggtgcagatgtcatttgatccagtatatagggggcaccttgacgtgcttgacaagatagggaaggaggaggaggacctcatggcggagcaacgaaaagatttgattgtattgttccggagcatttgtcgtgtcgcaccagctgccgctcagctgttcataagagggctgattatgacagctctctcgtctgcagaagctagtgtggaggatgttgaggttgctcttaccctgttcttccggcttggagaagctgtgggtgaagaggagattcggagtggggcagggctcctaggagagcttgtgcccatgctcctttcagcgaggttcttgtgtcacacacatcgcttagttgcattggtgtatctggagacagttacccgctacatgaagtttgtacaggagcatgtgcagtatgtaccacacctgcttggtgtgttcttggataaccgtggaatacaccatcagaatgcccacgtgagccgtcgtgcaggatacttattcatgagggcagtcaagtcattgaaggcaaatctagtgccttacctggataccatattgcagagtctgcaagatgtactaagtcaattcacttctatggattgggcaaacaaagatactaagttccccagctccgaggatggcagccaaatttttgaggctgttggattattgattggcattgaagaggtatcaccagagaagcaggctcaatgcttgactgctcttctaaatcctctctgtcaccagattgagtcacttgttatggatgccaaagcacgagggcttgaggaatcattaccaagagctattagtcttcaacaaatcattgttgcattgaatatggtcagcaagggctttaatgagcgccttgtgatggtaaataggccagctattggggtcatgttcaagaaaacccttgatgtagttttgcaagtccttgtttcatttcctagtgtaagacctctgcgatctaaggtgatatcgtttctgcatcgtatgatcgagatattaggtatctcagtgcttccatgtattccaatcgcactgagacaattgcttcttgataacgaggctaaggatatggtggaatttctcgtattggtaaatcaaataatctgcaaatttaaatcgtcagctagcgccatattggaggaagtcttccctactattgcaagtcatttgtctgtgatattatcacaagatgcattttcagctggtcttgcaagcaatactgaggaaatgcgagaactacaagagttgcagaggacattatacatattcttgcatgccatggcaacacatgatctttctacagttctccttacttctagctctaggcagtatctggagaccataatgcaattgcttttatttacctcatgcaaacataaggatatactgctacgcaaggcatgtgttcagattttcgtgaatcttgtaaaagactggtgctctaactctgaagataaggttcctggcttccgagtatttatgattgagaagtttgctactaattgctgtttatacagtgtacttgataaatcatttgatttacgcgatgcaaactcgcttgtcctttttggtgaaattgtgctggcccagaagattatgtatgaaagatttggggaggaattcattatgaactttgtagctaaaggtcttcctgaagttcactgcccaccggacctagctgaacagtactaccagaagttaaagggaaatgatatcaaggcattcaggtcattttatcaatcacttgttgagaagataagaccacaaggaaatgggagtcttgttttcagatagcatcattctttgattttcaatatgtcttccaccaaaagactcctcaactgtgttattcaattataggctagttgtgccatcaatgtacatagagctataatttctgagattggaagacgtattactgcggcattatctttaccaagtttggcaaccatggtggcgtccttattcattatattctatctgagatgcaggggaattcatcccacaatagtttctactttctactaagaaggaaatacatggttctactttctcatcttggcctttctccccaaatcggactgttctgctgtctgggcctgaaattttgcatggtacggcgggaaataagcataggtgatagaactagcacactacaggactgcggaactgtgacatacgactagggcagcatgcatgtggctgtggactcggcatgaggttgctctccctcgctccatattttcttttgacctaatataaacacttaggccacgggtacacacctgcgtgccggagctggatctaccacacatcacttgtctaaggccatcttcagaagagcgtgtttatggatccgtaaaatattgttctgtactgtagattatactgtttatagagtgaaatttaaaataaaaagtgaaatattgaaataaagagtgagatagggtaggataggatagaaggccgccggagatagcctaatcatcgtttgtttgacacagatctagatgatcaatgttaatagaaataagcttatcgttc

SEQ ID NO: 67163 - DNA, 3715 bp, Zea Mays
ctcgtatattaaccccgcctctgcctctcttcccctctttccccccgtctccgcctccctcccaccgccccacggccccaccagattcctccgcaccgccatggacgacctcgagcaggcaatactgctggcctccgactctcccgccgccgccgcggcgtccccgtccgtccgcgcggaggctctcgccttctgcgcccgcgcccgcgacgagtcgccgccgtcgtcgctcctccgcctgtgcctctccggcatcgcctcctccccgcacgcgcaggtccacttctggtgcctccagtccctccacgacttgctcctccgccgccgcctcgtgctccccgacgacctcgcgctgctccgatcctctctcctatcgctggcggtttcctctcacgccgcgtcgccgcctttcctccgcaacaagctcgcgcagcttgtcgcgctcctcgtccgcctcgactacccccatgtctacccttcctacttcctggacctcctcccgcccgcgccgccgcagcccggccccacggacatgttcgcgcgggttctaatctccctcgacgacgacctgctctcccaggagtacccccgcagttctgaagaggccgccgacgctatgcgggtgaaggattccatgcgcgtgcagtgcgtgtcccagatcgccagccactggcacaccgccgccgtgaccctccgtacagccgaccctgcggttgcggcagtggcccttgacgcggcgcgcaggtgcatttcgtggatcgatgtcggactggtcgccaatgatgtgttcgttcctcttctctttgacattgccatgtcccctgcaagcatgcctccgcttgctgctgcagcggtggggtgcctttctgctgtggcaacaaagaggatggatttcagggcgaaggtgggattgttgaggtcactcctggctgcacatcaggggcttggtagcccagacagtggggtgaagatggcacccttggtgacaacatatgcagccgaggctctggaatgtcatcgcaggcttggccctactgatgctgatggagctgcagcgttggagatgctggaagaggtgctaccagctgtatttgcagctgcagagagcggtaacgatgaagatgtggattctggttccgtgcttgagttcttatctggctatgtgagcataatgaaggcaccgtctgagaagcagttggcgcacttgggacggatcttggatctggtgcgggtgcagatgtcatttgatccagtatatagggggcaccttgacgtgcttgacaagatagggaaggaggaggaggacctcatggcggagcaacgaaaagatttgattgtattgttccggagcatttgtcgtgtcgcaccagctgccgctcagctgttcataagagggctgattatgacagctctctcgtctgcagaagctagtgtggaggatgttgaggttgctcttaccctgttcttccggcttggagaagctgtgggtgaagaggagattcggagtggggcagggctcctaggagagcttgtgcccatgctcctttcagcgaggttcttgtgtcacacacatcgcttagttgcattggtgtatctggagacagttacccgctacatgaagtttgtacaggagcatgtgcagtatgtaccacacctgcttggtgtgttcttggataaccgtggaatacaccatcagaatgcccacgtgagccgtcgtgcaggatacttattcatgagggcagtcaagtcattgaaggcaaatctagtgccttacctggataccatattgcagagtctgcaagatgtactaagtcaattcacttctatggattgggcaaacaaagatactaagttccccagctccgaggatggcagccaaatttttgaggctgttggattattgattggcattgaagaggtatcaccagagaagcaggctcaatgcttgactgctcttctaaatcctctctgtcaccagattgagtcacttgttatggatgccaaagcacgagggcttgaggaatcattaccaagagctattagtcttcaacaaatcattgttgcattgaatatggtcagcaagggctttaatgagcgccttgtgatggtaaataggccagctattggggtcatgttcaagaaaacccttgatgtagttttgcaagtccttgtttcatttcctagtgtaagacctctgcgatctaaggtgatatcgtttctgcatcgtatgatcgagatattaggtatctcagtgcttccatgtattccaatcgcactgagacaattgcttcttgataacgaggctaaggatatggtggaatttctcgtattggtaaatcaaataatctgcaaatttaaatcgtcagctagcgccatattggaggaagtcttccctactattgcaagtcatttgtctgtgatattatcacaagatgcattttcagctggtcttgcaagcaatactgaggaaatgcgagaactacaagagttgcagaggacattatacatattcttgcatgccatggcaacacatgatctttctacagttctccttacttctagctctaggcagtatctggagaccataatgcaattgcttttatttacctcatgcaaacataaggatatactgctacgcaaggcatgtgttcagattttcgtgaatcttgtaaaagactggtgctctaactctgaagataaggttcctggcttccgagtatttatgattgagaagtttgctactaattgctgtttatacagtgtacttgataaatcatttgatttacgcgatgcaaactcgcttgtcctttttggtgaaattgtgctggcccagaagattatgtatgaaagatttggggaggaattcattatgaactttgtagctaaaggtcttcctgaagttcactgcccaccggacctagctgaacagtactaccagaagttaaagggaaatgatatcaaggcattcaggtcattttatcaatcacttgttgagaagataagaccacaaggaaatgggagtcttgttttcagatagcatcattctttgattttcaatatgtcttccaccaaaagactcctcaactgtgttattcaattataggctagttgtgccatcaatgtacatagagctataatttctgagattggaagacgtattactgcggcattatctttaccaagtttggcaaccatggtggcgtccttattcattatattctatctgagatgcaggggaattcatcccacaatagtttctactttctactaagaaggaaatacatggtacggcgggaaataagcataggtgatagaactagcacactacaggactgcggaactgtgacatacgactagggcagcatgcatgtggctgtggactcggcatgaggttgctctccctcgctccatattttcttttgacctaatataaacacttaggccacgggtacacacctgcgtgccggagctggatctaccacacatcacttgtctaaggccatcttcagaagagcgtgtttatggatccgtaaaatattgttctgtactgtagattatactgtttatagagtgaaatttaaaataaaaagtgaaatattgaaataaagagtgagatagggtaggataggatagaaggccgccggagatagcctaatcatcgtttgtttgacacagatctagatgatcaatgttaatagaaataagcttatcgttc

SEQ ID NO: 67164 - DNA, 1880 bp, Zea Mays
cacactccatctccatcgtccataagaaataagtggtgacgatgcactgattttcatgtgttgacctggcatacgcatgagctgatgatgagcaaagcatgattggttagcaaagaaagccgggttcctacctactactaaaccattgcagtactacgtactagcagtacataagctcacatacgaaaccagcgcggcggaatcattagaaagaatgcttgtgtgtgcagggaagagcagcattcattcattcattgcacactagctagctaggtttccccttccttgagccatcttccaagctttgactagtaatggtaggctgctttgcttgcccaaatgcaggtctgaccaagccaagatttgactgtactcgctgcccaaatgcaggacgcatggcgttgttattgtattattagcaggatgccgagctagcatttgaccagtaatggtaggctgcttgcttgcttgcttgcacagcacgcaggatagggacaggggctcccgcgcgggtcagaagctggtgaagtcacgtatagttgctggatcaatgtcgacgatcaccggctgatccgttcttgcccagattcctgccgtgctgccctggtcgacccgactaaacattgcagtaggcgccgccaagggtttggcgttcctccacgacgccgagaagccggtcatctaccgtgacttcaaggcctccaacatcttgctcgactcggactacaaggccaagctgtcagacttcgggctggccaaggacgggccggagggcgacgacacgcacgtgtcgacgcgcgtgatggggacgcacggctacgcggcgccggagtacatcatgacgggccacctcacggccaagagcgacgtgtacagcttcggcgtggtgctgctggagatcctcacgggccgccggtccgtcgacaagacccgccccagccgggagcagaacctggtggactacgcgcggccgtgcctcaaggacccgctcaggctgggccggatcatggacccggccatggagggccagtactcgccgcgggcggcccagagcgcggcgctggtcgcgtaccggtgcctcagcgccagccccaagaaccggccggacatgtccgccgtcgtccgggcgctggagccgctgctcgacctccacgacgacgtgcccgtggcgcccctgggccacgccggccccgtcgtgctgttcgtagcggccgccgccgaggaggagaagaaggagcgggccccgaggaaggacgtccacgtccaccggcgcaggcccatgtcgcccaaggcgagccccaggaagcgccccggcaccggcgccggcaccaaggaggagttctgggtgtggcatctgccggtgccggccgaccataagacacgtccgaccttgggcggcggcgttgtgcaagcgtgtgcgtgagccaaggtgctattggggctcagattgtgccttggaccaaattgttgtgtttttcagtctgctgttacagtgagatgagatgcagagtgactcgagcaaattgtacaccggaagccatcgttctctactccagtatacccttgtatacgcttgtattcagatgaagcgacgatggcaattcgcaaacgaacagaaacgtttgcgtacgtacaggccatgggcatgtgacaagagggtataaatcatggagcagtgattggcttttggcatcatgatttcttctgattgactatactctcttggtgatttacaaaccaaacaaaacggtagtacaagaaaaatccttttcatggagatgtgacggtttttggatgtaatttcaaaaaaaaaaaagcaaaaaacttccttcttcgatacccgaatttcttgctccaattgttacaatacctttaatctt

SEQ ID NO: 67165 - DNA, 3171 bp, Zea Mays
gtgagaggcaaagaaagattagataccaaccctcaggttccaccataacaacagcattgtaccaacccaatctcactggcttacccccaacgattaacgacggacgaatcaatcaatcagccagccacagcccacacaggtcgtcgtcgtccacgcgacgccaccacgcacacggcgcctctccctcctcacgtttattctcacacgcccacgcagccgaccacgccccagccagctcatcatttccctctccgggcgcggacgggaggggcagtttcatcaatccacatctcgcccttcgcctgccttccttcacccggacgcagcagcggccaaccaaataaaaacacgccgcgccgccccgacgcggcgcgctccgtcttcctctctccccgatccctgcgacgggcgacgcggccttgccttccacatcaaaaccaacctgaccgccacagccgccgcgtcctcgtcctcttcctctgccatcctcccggcatcgcccttcgggatcaccgcgtcggaaccctaccggatcaccattcgttcgcgcgcgccccgccccgccatggaggacttcgcgcgcgcggtggaggacggactcaagctctcgaagaggctcgtgctcccgggaggggtgccgccgccgcgcccgccggcggggatggagcgcaccgtgtcggccgcctcggcgtcgggtcccgacccgcggctgctccctaccgcgccgatggcctacgcgctcgtcaccgacccggccgccgtcgacacccccgacgtgcccagctaccagccctacgtctacggcgacctcgacccgcccgcgctcatcccgctgcagatgaaggaggtcgacctggccgtcgactgcgcgctcgacgccgcgcacgtcaccctgcgcgcgcgctggtggctgcactgcatcacgcgaagccgcgactccgacgtgcgcctcgtcgtgcccttgggcgagcaggcgctgaggttactgttggaagaagatcatataatacccaagtaatcgaagtagaagaccacactttggagaaacatgcaaaaattgagagtggtggccttttgcagccacatctgtttttcttgacaatacctcaggttgagggaggagcagatatttgtgctacatttcaatggtctcagaagttactttatgatagcgggcgtttctctgttgacatacctttccgttttccgtactttgtgaatccattaccaaaagtgttcatgaagaaggaaaaaattcagttgactgtgcacagtggtttcagtaaagagattttgctgcaaggaacaagccacccgttgaaggaaaagagtaggcaaggagataaattgtttttccatcatgaagccattgttgagaattggtcgatcaaagatttcaatttttcatacaatgtttactcgggtgatttgtctggtggtgtgcttgtgcaaccagcaacattatgtgactatgatgatagagatatgttctgcatttttcttctacctggaagtggcaacagaaaggtatttggaaaagcagttgtgtttattgttgacacaagtggaagcatgcaaggaaagcctcttgagaatgtcaagcatgcagtttctactgctctttcagagcttgtggaaggggattatttcaacattataacatttaatgatgagcttcactcattctcttcctgtttagagcaagtaaatgacaaagcaatagcaagcgcaactgagtggatgaatgcaaactttgttgctgagggtggtacagatattatgcatcctttgagtgaggcaatggcattactatcaagtgttcatgacacacttccacaaatatatcttatcacggatggttctgttgatgatgagcataacatctgccgaactacaaaaactgatctctccaacagagggtctaggtctcctcgaatttctacttttggactaggatcgtattgcaaccactatttcctgcgcatgttagcttcaattggcaagggacattatgatgctgcacttgggacagcatcaatcgagaatcagattcttaaatggttcaggagagcgtcgagtacaattgtggcaaatatctccattgatgctttgacacatcttgatgaattcgaagtggattctgagtacattccagacctttcagcgaactctcctttgtgtgtatctggaaaatacaaaggaaaattcccggacacaattaaagctaaaggttacttagctgacatgaaggagatctcggttgaactgaaggtccaacaactaaaggaaatacctcttgacaaagtattggtgatacaacagattgattttatgacatcaaaggcatggatgtctgcagataaacaagtggagagaaaggtgattaaattaagtacacaaaatggtgttccgtcggagtacacagatatgatctttcttcaaacaaatctggataaagtagaaggaacacaaaaggtcaagcaaaaactgaaaggacacaaaggcagagatgagcaacagatttatggcctgaaactgggattcggtaacaaagatgctacacgggaaaatctcatcacaggatttggagacatgaatccggcagagaaatctgtgatgctccaaaagggatcgggctgttgcagccgcgtcgcagactgcctctgctgcatgtgctgcatcaaggcgtgcaacaggatgaacgaccagtgcgccgttctgatggcacagatctgcgcggctctagcgtgcctcggctgctacgagtgttgtgcagaggtgtgctgtggagggtcggagtcgtagtaggaagtgttttgtatatttgtatggaagattggagaattggagtgtacataatagagttcgcggaagcccggttctggcccggctcttggttgtatccgtccaaacgttctataatttgctcgttacatgcaatgcaaaagagggatggcacacttgagtagtattttgctgttgtgcagtgcaaacgagggatgtatctgctggcagttcgtgtgcttggagtcggaggtgatataaaataacagttatcattagatctagatcggatgtaccagatcgtttgattgcatgcttgcatcaggataagtgattgcataggatattttcccgacttgttatgctattaagtagctaaaattaggg

SEQ ID NO: 67166 - DNA, 2240 bp, Zea Mays
attcattcctttgtccatgggcaatgttggttctgccaagaggcgctgaggttactgttggaagaagatcatataatacccaagtaatcgaagtagaagaccacactttggagaaacatgcaaaaattgagagtggtggccttttgcagccacatctgtttttcttgacaatacctcaggttgagggaggagcagatatttgtgctacatttcaatggtctcagaagttactttatgatagcgggcgtttctctgttgacatacctttccgttttccgtactttgtgaatccattaccaaaagtgttcatgaagaaggaaaaaattcagttgactgtgcacagtggtttcagtaaagagattttgctgcaaggaacaagccacccgttgaaggaaaagagtaggcaaggagataaattgtttttccatcatgaagccattgttgagaattggtcgatcaaagatttcaatttttcatacaatgtttactcgggtgatttgtctggtggtgtgcttgtgcaaccagcaacattatgtgactatgatgatagagatatgttctgcatttttcttctacctggaagtggcaacagaaaggtatttggaaaagcagttgtgtttattgttgacacaagtggaagcatgcaaggaaagcctcttgagaatgtcaagcatgcagtttctactgctctttcagagcttgtggaaggggattatttcaacattataacatttaatgatgagcttcactcattctcttcctgtttagagcaagtaaatgacaaagcaatagcaagcgcaactgagtggatgaatgcaaactttgttgctgagggtggtacagatattatgcatcctttgagtgaggcaatggcattactatcaagtgttcatgacacacttccacaaatatatcttatcacggatggttctgttgatgatgagcataacatctgccgaactacaaaaactgatctctccaacagagggtctaggtctcctcgaatttctacttttggactaggatcgtattgcaaccactatttcctgcgcatgttagcttcaattggcaagggacattatgatgctgcacttgggacagcatcaatcgagaatcagattcttaaatggttcaggagagcgtcgagtacaattgtggcaaatatctccattgatgctttgacacatcttgatgaattcgaagtggattctgagtacattccagacctttcagcgaactctcctttgtgtgtatctggaaaatacaaaggaaaattcccggacacaattaaagctaaaggttacttagctgacatgaaggagatctcggttgaactgaaggtccaacaactaaaggaaatacctcttgacaaagtattggtgatacaacagattgattttatgacatcaaaggcatggatgtctgcagataaacaagtggagagaaaggtgattaaattaagtacacaaaatggtgttccgtcggagtacacagatatgatctttcttcaaacaaatctggataaagtagaaggaacacaaaaggtcaagcaaaaactgaaaggacacaaaggcagagatgagcaacagatttatggcctgaaactgggattcggtaacaaagatgctacacgggaaaatctcatcacaggatttggagacatgaatccggcagagaaatctgtgatgctccaaaagggatcgggctgttgcagccgcgtcgcagactgcctctgctgcatgtgctgcatcaaggcgtgcaacaggatgaacgaccagtgcgccgttctgatggcacagatctgcgcggctctagcgtgcctcggctgctacgagtgttgtgcagaggtgtgctgtggagggtcggagtcgtagtaggaagtgttttgtatatttgtatggaagattggagaattggagtgtacataatagagttcgcggaagcccggttctggcccggctcttggttgtatccgtccaaacgttctataatttgctcgttacatgcaatgcaaaagagggatggcacacttgagtagtattttgctgttgtgcagtgcaaacgagggatgtatctgctggcagttcgtgtgcttggagtcggaggtgatataaaataacagttatcattagatctagatcggatgtaccagatcgtttgattgcatgcttgcatcaggataagtgattgcataggatattttcccgacttgttatgctattaagtagctaaaattaggg

SEQ ID NO: 67167 - DNA, 1167 bp, Zea Mays
gtttgctcttgtttttacatgttacaagcatcaatcgagaatcagattcttaaatggttcaggagagcgtcgagtacaattgtggcaaatatctccattgatgctttgacacatcttgatgaattcgaagtggattctgagtacattccagacctttcagcgaactctcctttgtgtgtatctggaaaatacaaaggaaaattcccggacacaattaaagctaaaggttacttagctgacatgaaggagatctcggttgaactgaaggtccaacaactaaaggaaatacctcttgacaaagtattggtgatacaacagattgattttatgacatcaaaggcatggatgtctgcagataaacaagtggagagaaaggtgattaaattaagtacacaaaatggtgttccgtcggagtacacagatatgatctttcttcaaacaaatctggataaagtagaaggaacacaaaaggtcaagcaaaaactgaaaggacacaaaggcagagatgagcaacagatttatggcctgaaactgggattcggtaacaaagatgctacacgggaaaatctcatcacaggatttggagacatgaatccggcagagaaatctgtgatgctccaaaagggatcgggctgttgcagccgcgtcgcagactgcctctgctgcatgtgctgcatcaaggcgtgcaacaggatgaacgaccagtgcgccgttctgatggcacagatctgcgcggctctagcgtgcctcggctgctacgagtgttgtgcagaggtgtgctgtggagggtcggagtcgtagtaggaagtgttttgtatatttgtatggaagattggagaattggagtgtacataatagagttcgcggaagcccggttctggcccggctcttggttgtatccgtccaaacgttctataatttgctcgttacatgcaatgcaaaagagggatggcacacttgagtagtattttgctgttgtgcagtgcaaacgagggatgtatctgctggcagttcgtgtgcttggagtcggaggtgatataaaataacagttatcattagatctagatcggatgtaccagatcgtttgattgcatgcttgcatcaggataagtgattgcataggatattttcccgacttgttatgctattaagtagctaaaattaggg

SEQ ID NO: 67168 - DNA, 814 bp, Zea Mays
aaaaaaacttaagtgaactcaggtgattaaattaagtacacaaaatggtgttccgtcggagtacacagatatgatctttcttcaaacaaatctggataaagtagaaggaacacaaaaggtcaagcaaaaactgaaaggacacaaaggcagagatgagcaacagatttatggcctgaaactgggattcggtaacaaagatgctacacgggaaaatctcatcacaggatttggagacatgaatccggcagagaaatctgtgatgctccaaaagggatcgggctgttgcagccgcgtcgcagactgcctctgctgcatgtgctgcatcaaggcgtgcaacaggatgaacgaccagtgcgccgttctgatggcacagatctgcgcggctctagcgtgcctcggctgctacgagtgttgtgcagaggtgtgctgtggagggtcggagtcgtagtaggaagtgttttgtatatttgtatggaagattggagaattggagtgtacataatagagttcgcggaagcccggttctggcccggctcttggttgtatccgtccaaacgttctataatttgctcgttacatgcaatgcaaaagagggatggcacacttgagtagtattttgctgttgtgcagtgcaaacgagggatgtatctgctggcagttcgtgtgcttggagtcggaggtgatataaaataacagttatcattagatctagatcggatgtaccagatcgtttgattgcatgcttgcatcaggataagtgattgcataggatattttcccgacttgttatgctattaagtagctaaaattaggg

SEQ ID NO: 67169 - DNA, 954 bp, Zea Mays
agcgaatacgaggataaacaatttcgagcaatccgttcccgtgggtttttagtcgcggcctcacgggatttgggtggaaaccgcggggggtcctttataagcgcgtgggcgcgcggcgtgctcacacgagcccccccgcgttcacgagccagaagagaagagaggctaaccaccgcagcggctgcgacctgcgagtgcgacaacctccgcggaggagttggagccggcggcggggatatttgcttgcccggctggggttgcggcggaaggagggagagacaatcggcgatggcggcgtccgcgaggcccggggagagggcgaccagcttcgccgtcgcgtgcagcctcctcagccgcttcgtccgccagaacggcgtcgcggctgccgacctaggcctcaggatcaaagacaccatatcaaactgctccttcagatgccgcaccagtcaagaaggagcctgagagccagccatggctcggattaggaccgaatgccgtggattccagcctgaacctcagctagtacacaacaacacagccataataagacggcacagcaacggcacccaccatgacctggaatttgctttgccactagatcgagttcagaaaccataaatattcttagttatcgtgttttagtgttcgcttatgtcgtggttctacgccctcttgtcgcatagttctggatgtaaagaaaagtagccagtcatgaccatcaccgggagtcggggagaagtttttggagggtgttaacacacggcgactctgaattggccatgctaaggaaaaggatagtgcaatgtgaggtatatgtattttctgaaagccagatcgtttgggtctagccctgatgtatgcagaacaagtgattattgtaatggatcctgattatcctcatcatcctattgttgttttctgatcacatggcttcaccaacccaagtttgtttgg

SEQ ID NO: 67170 - DNA, 1662 bp, Zea Mays
agcgaatacgaggataaacaatttcgagcaatccgttcccgtgggtttttagtcgcggcctcacgggatttgggtggaaaccgcggggggtcctttataagcgcgtgggcgcgcggcgtgctcacacgagcccccccgcgttcacgagccagaagagaagagaggctaaccaccgcagcggctgcgacctgcgagtgcgacaacctccgcggaggagttggagccggcggcggggatatttgcttgcccggctggggttgcggcggaaggagggagagacaatcggcgatggcggcgtccgcgaggcccggggagagggcgaccagcttcgccgtcgcgtgcagcctcctcagccgcttcgtccgccagaacggcgtcgcggctgccgacctaggcctcaggatcaaaggtgagcggcggaatccggcggcggccttgtcgaggccgggctccttctgctcggtggtgggaggatttcgaaatccgggagggtgtgtggggggtccagtttcgtttccagtggggagcgtgttgtgctggtgtgagatctgggcggggcctttgttatccggtttgaaaccacgttttcgggcttcgaattttacggtcccttatccagatgttttgttttgttttgttcccgttctcaggcgaggtcgagcagcagaggacgccggcgacaactaactcgctccccggagcggagggcgaggaggtcgaaaggaggaaggagaccatggagctgttcccgcagagcgtcgggttcagcatcaaggatgctgctgcccctagggaggagcaaggagataaagagaagcctaagcagctcacaatcttctatggcgggaaggtgctggtatttgacgatttccccgccgacaaggcaaaggatctgatgcagctggccagcaagggcagcccagtggtacagaacgttgctttgcctcaaccctctgcagcagctgctgtcactactgacaaggccgtgctggacccggtcatcagcttggccgctgctaagaagcctgctcgcacaaatgcttctgatatgcctattatgaggaaggcttctcttcaccgcttccttgagaagagaaaagatcgcctcaatgcaaagacaccatatcaaactgctccttcagatgccgcaccagtcaagaaggagcctgagagccagccatggctcggattaggaccgaatgccgtggattccagcctgaacctcagctagtacacaacaacacagccataataagacggcacagcaacggcacccaccatgacctggaatttgctttgccactagatcgagttcagaaaccataaatattcttagttatcgtgttttagtgttcgcttatgtcgtggttctacgccctcttgtcgcatagttctggatgtaaagaaaagtagccagtcatgaccatcaccgggagtcggggagaagtttttggagggtgttaacacacggcgactctgaattggccatgctaaggaaaaggatagtgcaatgtgaggtatatgtattttctgaaagccagatcgtttgggtctagccctgatgtatgcagaacaagtgattattgtaatggatcctgattatcctcatcatcctattgttgttttctgatcacatggcttcaccaacccaagtttgtttgg

SEQ ID NO: 67171 - DNA, 3022 bp, Zea Mays
agaacttgagagtgctcatggtggcctcgccgcgtcctgaatcctgactctctcgcctaccggctaccgctgctcgactgcttttctttctcccttctgttcctttttcaatccgcggctcctggtaggtgggccaccttgaccccgcatgccagtgaaacatagaagaacaagtctggccccagctgaggccgcacgagtacacgcgtcggacgatggacgctgccgcacgagggccacctaccctgttgccgcagcggatcccgctgactcctccgctcctactcccctgcgtctgctcgtcgtctccccgctccaaaccctaactcgaagccggaacgaccgacaaaattcgggaaaatcgctcacaatttcgctccaaactacttcctggacggtgatgcgatgatgcacatgctggtagccccggataggggcggaggggagctgcagccgtacgtagcgccgcccgcagagcaggagctggagctcctccgcgacaacgccgatgacggcctcgagggccacgtgcgatgcctaaggtgtggaatatcccggcaatgcgacgccccatatgcgccgggggcctgatggcccaagaactctttgcaatgcgtgtggcattgcttacaggaaggggaaaatgagaagaatgatagaagctgaaccacccatagatgaggctgctcttgcaaagctggttccagaggtaggcatggaatttgtgagtgaggaaaaggcatacgaattctacaacaaatatgctgggcatgttggctttagcgttaggaaaagtacatcacataaatcttcagaaaatattaccaaagttagaacttttgtgtgctcaagagaaggctacaacagggataaaaaatcactggaagccaagaagccaagattggatacacgaatcggttgcccagcgagattgattataaaagtcacaccagagtgcaagtatagagtaactgattttaaagcagatcacaatcatcagctggccccaccttcaacgatgcatatgttaaggtcgcagaggatattgacagaacttcagcctggagaagcagaattatcagatgattctgtagtgacaccaacaacaaaggcaactggtgatcttgttgtgagacaagtcagttttcttcggagtttatctctcctcccagctgattacaagaattatctccgttcgaagcgtatgaaggccatgcaacctggtgatggtggagcaatattgaaatatttacagacaatgcaaatggataacccctcgttcttttacactatgcagatcgatgaggatgacaaactgacaaacttcttttgggccgaccaaaaatcgagagatgacttcaactatttcgctatgctttatgatgaatcatttgattcatacaagtggctttttgatagttttaagatcgccatgcatggaaaacagcctgcagtagctttgatagatcaatctattccattgagcagtgcaatggcagccgcctggccaagtaccactcaacgaatttgtgcttggcatgtgtatcagaattctcttaagcacctcaatcatgttttccaaggttcgaagacattcgcgaaggacttcggcaaatgtgtctttggctacgaggatgaagatgaattcgtgttttcatggagaagtatgctggagaaatatgatcttagacataatgaatggttgtctaaagtgtttgctgagaaggaacagtgggccttggcatatgatagacatatattttgcgctgacatcataagtgcacttcaagccgagagtttcagtagtattttgaagaaattcttgagtcctcaactggagctgctgtccttcttcaagcactatgaaagagcagtggacgaacatcgctatgctgagctgcaagccgacttccaagctagtcagagctatccaagaatacccccagccaagatgttaaagcaaactgctcatacatataccccggtggtatttgagatctttcgtaaagagtttgagctattcatggactctgtgttattcagttgtggggaggctgggacgacatctgagtacaaggttgcttcatctgagaaacccaaggagcactttgttcggttcgattcaagtgattgctcctgtctgtgcacttgtaggaagtttgagtttatgggtatcccgtgctgtcacatgttgaaggtgctagattacagaaatatcaaagagcttcctcaaaaatatctgttgaaacggtggagaaggaccgccaaatctgcaaatgaagacaatgaaggcaatgcaacaaacgccaacaacgggtcattattgattgtccctgctcctcctacaaatcaccatgggcttcagagcttcagtgcaatgattcaagatgcttcagtttctagcatgcattagaatgcatctcatagaagctcttaatgcaggaacttgcagggtcaatgccaacgacgcgtttataccttgcaagactccacagcgttggccactgaagaagcattggatgggccggccaccgtcaagattcaaccacgcatgtgttcaccgtgtaagactcggcgccgttggccactgaagcaacagttaggcggccgcccgtcaaccgcgcccttggataagttgggtgggcggacctgtgttgtacattgttcagccgtaggggatttcagtcaccgaggcaccggtccttagcctaggctgtagagtagatttttttttttaaattttagttttaaaaggcataatgcttgtatttgcgctgccaataatccaggaattttgtgcgcgcctaataaatgctagcccgtttattaggagcaaaaaaaaaatgcaattcaggcccttgtactgtgctggagaagagagagggtgcgtgcgtgcgtctgaaacctgtgtgcagacagacaggcctctgaccttgtggccggccgccggcctgtgcagagcaagtaggcgccctcactcatgatttgatacggaggtgagtacagtttcagttagattcag

SEQ ID NO: 67172 - DNA, 2958 bp, Zea Mays
aacaagtctggccccagctgaggccgcacgagtacacgcgtcggacgatggacgctgccgcacgagggccacctaccctgttgccgcagcggatcccgctgactcctccgctcctactcccctgcgtctgctcgtcgtctccccgctccaaaccctaactcgaagccggaacgaccgacaaaattcgggaaaatcgctcacaatttcgctccaaactacttcctggacggtgatgcgatgatgcacatgctggtagccccggataggggcggaggggagctgcagccgtacgtagcgccgcccgcagagcaggagctggagctcctccgcgacaacgccgatgacggcctcgagggccacgtgcgatgcctaaggtgtggaatatcccggcaatgcgacgccccatatgcgccgggggcctgatggcccaagaactctttgcaatgcgtgtggcattgcttacaggaaggggaaaatgagaagaatgatagaagctgaaccacccatagatgaggctgctcttgcaaagctggttccagaggtaggcatggaatttgtgagtgaggaaaaggcatacgaattctacaacaaatatgctgggcatgttggctttagcgttaggaaaagtacatcacataaatcttcagaaaatattaccaaagttagaacttttgtgtgctcaagagaaggctacaacagggataaaaaatcactggaagccaagaagccaagattggatacacgaatcggttgcccagcgagattgattataaaagtcacaccagagtgcaagtatagagtaactgattttaaagcagatcacaatcatcagctggccccaccttcaacgatgcatatgttaaggtcgcagaggatattgacagaacttcagcctggagaagcagaattatcagatgattctgtagtgacaccaacaacaaaggcaactggtgatcttgttgtgagacaagtcagttttcttcggagtttatctctcctcccagctgattacaagaattatctccgttcgaagcgtatgaaggccatgcaacctggtgatggtggagcaatattgaaatatttacagacaatgcaaatggataacccctcgttcttttacactatgcagatcgatgaggatgacaaactgacaaacttcttttgggccgaccaaaaatcgagagatgacttcaactatttcggtgatgtgctctgcttagacacaacatacaaaataaacggttatggtagaccgcttgcgttattccttggtgtgaatcaccataaacaaacgattatttttggtgcagctatgctttatgatgaatcatttgattcatacaagtggctttttgatagttttaagatcgccatgcatggaaaacagcctgcagtagctttgatagatcaatctattccattgagcagtgcaatggcagccgcctggccaagtaccactcaacgaatttgtgcttggcatgtgtatcagaattctcttaagcacctcaatcatgttttccaaggttcgaagacattcgcgaaggacttcggcaaatgtgtctttggctacgaggatgaagatgaattcgtgttttcatggagaagtatgctggagaaatatgatcttagacataatgaatggttgtctaaagtgtttgctgagaaggaacagtgggccttggcatatgatagacatatattttgcgctgacatcataagtgcacttcaagccgagagtttcagtagtattttgaagaaattcttgagtcctcaactggagctgctgtccttcttcaagcactatgaaagagcagtggacgaacatcgctatgctgagctgcaagccgacttccaagctagtcagagctatccaagaatacccccagccaagatgttaaagcaaactgctcatacatataccccggtggtatttgagatctttcgtaaagagtttgagctattcatggactctgtgttattcagttgtggggaggctgggacgacatctgagtacaaggttgcttcatctgagaaacccaaggagcactttgttcggttcgattcaagtgattgctcctgtctgtgcacttgtaggaagtttgagtttatgggtatcccgtgctgtcacatgttgaaggtgctagattacagaaatatcaaagagcttcctcaaaaatatctgttgaaacggtggagaaggaccgccaaatctgcaaatgaagacaatgaaggcaatgcaacaaacgccaacaacgggtcattattgattgtccctgctcctcctacaaatcaccatgggcttcagagcttcagtgcaatgattcaagatgcttcagtttctagcatgcattagaatgcatctcatagaagctcttaatgcaggaacttggtcaatgccaacgacgcgtttataccttgcaagactccacagcgttggccactgaagaagcattggatgggccggccaccgtcaagattcaaccacgcatgtgttcaccgtgtaagactcggcgccgttggccactgaagcaacagttaggcggccgcccgtcaaccgcgcccttggataagttgggtgggcggacctgtgttgtacattgttcagccgtaggggatttcagtcaccgaggcaccggtccttagcctaggctgtagagtagatttttttttttaaattttagttttaaaaggcataatgcttgtatttgcgctgccaataatccaggaattttgtgcgcgcctaataaatgctagcccgtttattaggagcaaaaaaaaaatgcaattcaggcccttgtactgtgctggagaagagagagggtgcgtgcgtgcgtctgaaacctgtgtgcagacagacaggcctctgaccttgtggccggccgccggcctgtgcagagcaagtaggcgccctcactcatgatttgatacggaggtgagtacagtttcagttagattcag

SEQ ID NO: 67173 - DNA, 3342 bp, Zea Mays
aacaagtctggccccagctgaggccgcacgagtacacgcgtcggacgatggacgctgccgcacgagggccacctaccctgttgccgcagcggatcccgctgactcctccgctcctactcccctgcgtctgctcgtcgtctccccgctccaaaccctaactcgaagccggaacgaccgacaaaattcgggaaaatcgctcacaatttcgctccaaactacttcctggacggtgatgcgatgatgcacatgctggtagccccggataggggcggaggggagctgcagccgtacgtagcgccgcccgcagagcaggagctggagctcctccgcgacaacgccgatgacggcctcgagggccacgtgcgatgcctaaggtgtggaatatcccggcaatgcgacgccccatatgcgccgggggcctgatggcccaagaactctttgcaatgcgtgtggcattgcttacaggaaggggaaaatgagaagaatgatagaagctgaaccacccatagatgaggctgctcttgcaaagctggttccagaggtaggcatggaatttgtgagtgaggaaaaggcatacgaattctacaacaaatatgctgggcatgttggctttagcgttaggaaaagtacatcacataaatcttcagaaaatattaccaaagttagaacttttgtgtgctcaagagaaggctacaacagggataaaaaatcactggaagccaagaagccaagattggatacacgaatcggttgcccagcgagattgattataaaagtcacaccagagtgcaagtatagagtaactgattttaaagcagatcacaatcatcagctggccccaccttcaacgatgcatatgttaaggtcgcagaggatattgacagaacttcagcctggagaagcagaattatcagatgattctgtagtgacaccaacaacaaaggcaactggtgatcttgttgtgagacaagtcagttttcttcggagtttatctctcctcccagctgattacaagaattatctccgttcgaagcgtatgaaggccatgcaacctggtgatggtggagcaatattgaaatatttacagacaatgcaaatggataacccctcgttcttttacactatgcagatcgatgaggatgacaaactgacaaacttcttttgggccgaccaaaaatcgagagatgacttcaactatttcggtgatgtgctctgcttagacacaacatacaaaataaacggttatggtagaccgcttgcgttattccttggtgtgaatcaccataaacaaacgattatttttggtgcagctatgctttatgatgaatcatttgattcatacaagtggctttttgatagttttaagatcgccatgcatggaaaacagcctgcagtagctttgatagatcaatctattccattgagcagtgcaatggcagccgcctggccaagtaccactcaacgaatttgtgcttggcatgtgtatcagaattctcttaagcacctcaatcatgttttccaaggttcgaagacattcgcgaaggacttcggcaaatgtgtctttggctacgaggatgaagatgaattcgtgttttcatggagaagtatgctggagaaatatgatcttagacataatgaatggttgtctaaagtgtttgctgagaaggaacagtgggccttggcatatgatagacatatattttgcgctgacatcataagtgcacttcaagccgagagtttcagtagtattttgaagaaattcttgagtcctcaactggagctgctgtccttcttcaagcactatgaaagagcagtggacgaacatcgctatgctgagctgcaagccgacttccaagctagtcagagctatccaagaatacccccagccaagatgttaaagcaaactgctcatacatataccccggtggtatttgagatctttcgtaaagagtttgagctattcatggactctgtgttattcagttgtggggaggctgggacgacatctgagtacaaggttgcttcatctgagaaacccaaggagcactttgttcggttcgattcaagtgattgctcctgtctgtgcacttgtaggaagtttgagtttatgggtatcccgtgctgtcacatgttgaaggtgctagattacagaaatatcaaagagcttcctcaaaaatatctgttgaaacggtggagaaggaccgccaaatctgcaaatgaagacaatgaaggcaatgcaacaaacgccaacaacgggtcattattgattgtccctgctcctcctacaaatcaccatgggcttcagagcttcagtgcaatgattcaagatgcttcagtttctagcatgcattagaatgcatctcatagaagctcttaatgcaggaacttgcaggtattagaattcgtttcggtaatttcctattttttacgctcgagaaatttttgtatgctcagcacctccttttccagttaattatatctggattagttccccgtccatctggttttagggagaccgccgtagatagcctaacaaatcgaaacttttcgtgcgtgccaacaagaaatcatctttgagctccattcatttgtgacttttggctttgtggctgttgaattttctgtgcgctgttgtgtttggccttatgggagatcctgacgttctcctagaaaggcagcctaaacattctgataaaaaaaacagtctcatctctcacgagctttcgatcctgttgtctgactcatcaacttgcttgaaccgtcgtgacgcagggtcaatgccaacgacgcgtttataccttgcaagactccacagcgttggccactgaagaagcattggatgggccggccaccgtcaagattcaaccacgcatgtgttcaccgtgtaagactcggcgccgttggccactgaagcaacagttaggcggccgcccgtcaaccgcgcccttggataagttgggtgggcggacctgtgttgtacattgttcagccgtaggggatttcagtcaccgaggcaccggtccttagcctaggctgtagagtagatttttttttttaaattttagttttaaaaggcataatgcttgtatttgcgctgccaataatccaggaattttgtgcgcgcctaataaatgctagcccgtttattaggagcaaaaaaaaaatgcaattcaggcccttgtactgtgctggagaagagagagggtgcgtgcgtgcgtctgaaacctgtgtgcagacagacaggcctctgaccttgtggccggccgccggcctgtgcagagcaagtaggcgccctcactcatgatttgatacggaggtgagtacagtttcagttagattcag

SEQ ID NO: 67174 - DNA, 1894 bp, Zea Mays
cagcggatcccgctgactcctccgctcctactcccctgcgtctgctcgtcgtctccccgctccaaaccctaactcgaagccggaacgaccgacaaaattcgggaaaatcgctcacaatttcgctccaaactacttcctggacggtgatgcgatgatgcacatgctggtagccccggataggggcggaggggagctgcagccgtacgtagcgccgcccgcagagcaggagctggagctcctccgcgacaacgccgatgacggcctcgagggccacgtgcgatgcctaaggtgtggaatatcccggcaatgcgacgccccatatgcgccgggggcctgatggcccaagaactctttgcaatgcgtgtggcattgcttacaggaaggggaaaatgagaagaatgatagaagctgaaccacccatagatgaggctgctcttgcaaagctggttccagaggttcgaagacattcgcgaaggacttcggcaaatgtgtctttggctacgaggatgaagatgaattcgtgttttcatggagaagtatgctggagaaatatgatcttagacataatgaatggttgtctaaagtgtttgctgagaaggaacagtgggccttggcatatgatagacatatattttgcgctgacatcataagtgcacttcaagccgagagtttcagtagtattttgaagaaattcttgagtcctcaactggagctgctgtccttcttcaagcactatgaaagagcagtggacgaacatcgctatgctgagctgcaagccgacttccaagctagtcagagctatccaagaatacccccagccaagatgttaaagcaaactgctcatacatataccccggtggtatttgagatctttcgtaaagagtttgagctattcatggactctgtgttattcagttgtggggaggctgggacgacatctgagtacaaggttgcttcatctgagaaacccaaggagcactttgttcggttcgattcaagtgattgctcctgtctgtgcacttgtaggaagtttgagtttatgggtatcccgtgctgtcacatgttgaaggtgctagattacagaaatatcaaagagcttcctcaaaaatatctgttgaaacggtggagaaggaccgccaaatctgcaaatgaagacaatgaaggcaatgcaacaaacgccaacaacgggtcattattgattgtccctgctcctcctacaaatcaccatgggcttcagagcttcagtgcaatgattcaagatgcttcagtttctagcatgcattagaatgcatctcatagaagctcttaatgcaggaacttgcagggtcaatgccaacgacgcgtttataccttgcaagactccacagcgttggccactgaagaagcattggatgggccggccaccgtcaagattcaaccacgcatgtgttcaccgtgtaagactcggcgccgttggccactgaagcaacagttaggcggccgcccgtcaaccgcgcccttggataagttgggtgggcggacctgtgttgtacattgttcagccgtaggggatttcagtcaccgaggcaccggtccttagcctaggctgtagagtagatttttttttttaaattttagttttaaaaggcataatgcttgtatttgcgctgccaataatccaggaattttgtgcgcgcctaataaatgctagcccgtttattaggagcaaaaaaaaaatgcaattcaggcccttgtactgtgctggagaagagagagggtgcgtgcgtgcgtctgaaacctgtgtgcagacagacaggcctctgaccttgtggccggccgccggcctgtgcagagcaagtaggcgccctcactcatgatttgatacggaggtgagtacagtttcagttagattcag

SEQ ID NO: 67175 - DNA, 5336 bp, Zea Mays
gtccgtattccagtctctaaagagagcttaacgtctacaatcacacaaacactttagccagccatcaagctagtaatctctctcaaatacccccacttttttcttcttctttattttagcttcaagtcttcaacattcctctgcagcagccagcagccaccagtgaggccgtgagggtgagtcgagtcgagtccaccaccaccaccaccaccaccaaatagccaaacacgcagtggtgctgctctctagtcctcccttcttccactccgctaaccccccgtcgcaagcacgcacgcgcgcgctcatcggattcggctacgcgccggcgagatccgggccgccgcagcacggtccggcagacgccgccgaaggcgcaagccgcgatcttgtcgccgcgggagctgcattggcgccccacgcggccgttccggcgtttcttgggaggttgcggcggcgggaggagttcgtgtccgggatccgccagatccgtgctcgccggcggcggcagcagtggtggtggccgccatggaggccgatgcgccgctcgacctcgcgctcttccagctatcccctcggcgtcagcggtgcgagctagtggtgtgcggcaatgggcggacggagaagatcgcgtcagggtcggtgaagccgttcgtggcgcacctgcgggctgcggaggaacaggcgtcggctcagccaccgccgctggccatccggctgcagctggagcggcccgccccgtggtttagcaagggcacccttgagaggttcgtgcgcttcgtgagcacaccggaggtgctggagttggcgaacacctatgatctggagatgtcgcagctggaaggggccaggaagatttatgcgcagggaggtactggagatgctacttcaggtggagctggtatgtaggatgattttatctagtgtttggatcgcccttctattgtcaattggggtttgaatattgctagcttagttcatctatgttcatacctggtaatgtttctctgcacttttttactttgggggaatttagtccaagttagcttgatcgacactgaaatttcaaatacacattgatggtaaaatcagaagaaaagaaggaaaaatataggtaggaatataactgggataattgatccacatggaattttaggaactcttgactatgaaataatgcatcggatagcaccagctttgcattggaagcaatctacgtctaattcaggaaagacataaatgctgtaattagttggtaactgttctgtgaagttattgaatattgatataatgtcgcattgttagtacaatcttgcatatcttctgttactgaatctagtttatgtaatctctggccatgcttattggcagctgaaaatgttacagcctcagcggcagcggcggcagatattacaaagaaagaacttcttagggcaattgatgtgcgtctaagttcccttaaacaagatctggccgcagcttgttctcgagcatcctctgctgggttcaatcctatcagtgtatctgagcttattctttttgctaaccattttggtgccagtcggctgagcgaagcatgcacaaagttcatgtcactttgccagcggcgtcctgacatcagtcctcaaactgcacagccagcagtttcatcacactggaaggtctttgacgatgggaatgtccgtggttcttcgagttcagacatgtctatagatgaaccactagttgatctcagtgaatccaagaacaaatctacagtcagtggaagtggctctcaggtccacagactaagcaacatccaaggtttagaatctgctgcagcacagcaacccaagccaaccatccaacaagcagtagataaacaagaagcagaaacagatgcgtctcctgcaccttctaaaggagagctttcaaggcggctgagtgtgaaggacaggataaacatgtttgagagccagaaaaaggagcagactccaagttctggtaacagcaactctgccggtactggtagagtggttccagggaaaggtgagcaccgcagggttccttctggcgcctccatggagaagttagttagaaggtggagcagtgttagcgacatgagtattgacctcagcaacaatgagagtagtagcttaaatgacaaaaaggataatggaactcctgccgggactccaacatctactgatttggaggccgactctaaagtaagagctaatgaggactctaatggacagaaggattcaatcacgtcacactcttggccttgtcaaaaggataatgtaccaatggatctggccaccacagatttgtgcccaccctcaattttaagtaatacacttgctcctcataaagagagtatatatggtgatggtgcagaaaacgacatggttatgaactctagcattgaaagtgaagcatcctttgggaaagaaccgggggttattcaaggacacacaaggatgtcaaatcatgctacttcaaatgtttccactcaagaccgtctaaaatcttctgcaaagtcagttgaagaagccttgctgaaaaataaagttattgtaactagtgcatcgtcagaggagcatgtctgcatgatagacaaggaaatcacagctgttgctcatgaagtaccagttgcaagtgaacagattccccagaatgatattagaggtctccatacaaaagatattcacactgaagcagaagtgactggaaggaaggatcagccttcacgatcatttggaagggtatctggtggtgttaatcctaaaccaaaagcctcatccaattcccgagctaatgctaaaggctcatctgttagggatgcgattgcctctacagaaactgagttccgtgacgttagtttgcagcggaatcgtctaccacggaagtcagaagatgtagggaaaaaggttacagctggttctgattcagattgctctggtcgtcagggaaaaaatttgagcaggcaatcatccattaccgatcaggaactaaacttgcaggctagagtgacaagaccaggaaaagggaaccaagatcggcatggtgaattgcaaatgaaggccaatgagttggagaaattatttgctgaacacaagttaacatcctcccgacgaggtaaacctacagatgtgcaggttgaaagcacacctatggtgagtgaggtaaagccgacaatggttcttcatgagacaattcatacaaaacaagttgtaaaggagagtataactgtcaatgattttgatgccggtgagcttctgaagatggtgaataatcaagaatttaacattagcacaccacaaaaacttggcattctaagtttagaagagtcgagagggaagttttatgagcattatatgcagaagagggatgcaaaactgaaggaaggctggaagctgcagagagaggagaaggaagcaatgttaaaggctatgcatgacagcctagaacggagcaaggctgagttgcttacaaaattctctcggtctgcagatgtccctgactcaacttatgtttcccattgttctcagaagattcctccttcgcgatcagcaagaaaaaataaagatcagggggttggctcattcttggtggaagaggaaatgaatagtgactacctatctggtgatggttcttccaggagtgctgattccagaaagcatttttcaaataaagttgcttctacccaaaatgcatctgctggtcctatccataaacgttcatcaagaaccgcaagctctggttatgctaatcgcaggaatccaccagaaaatcctctcgcacagtctgtccccagtttttctgacttgagaaaagaaaatacaaagccttcacctggagtcagtagagtgagtgcaagagttcagcaaaagtcttttgcccgtagcaagagtattattgaagagtcaaagagcatattgaaagaagatcaatcgaggaggtcacaatctatgaggaagaaccaaattcctgatgagcttaaggacatttcgtcagggaatgatgatatttacaattgggctccctcaagaatttccaagaatcaatcagagggaccttttgcttacagtacccgtagatcgggtccaccaaagccttttcttaggaaaggcaatgggactcaccctgttattggtatagctggatttcaggctgcagctgccatgatggcgaatgccctccagcatggtgacagtggtgattttgaagatcagcaagaggattcccctgatgatgccaaagaagaggaagaatatgaaagcatggaagaaaatcttagagaaagtgactttcctgctgattctgacagtgagaacccaagagtgagtcatgaatttggaaattcagatgacccagggtcagaaaacggtgatgctgattttccaagcaaaacacctgccattggcagtactaagttcactgcttttacaggaaatgttcacaatccagctggtgatgttccagcaccctggagttctcgtcttccacagctgttcccttacacgaatgataattcagatggtgacgcctttgctgattcaccatcgggaagtccatcaccatggaattctcattcactggatgaaataacagatgctgatgtatctcggatgcggaaaaagtggggcagtgcacagatgccttttgctggtgtcaatgcacctcaacagccacgcaaagatgtttccaaaggattgaagaaattgtggaaatttggtaggaagactagaggcggtgacggtttagtaaatgattgggtatctgcctccactgcctcagaatgtgatgatgacatggaagatggacgggatctggtagtaggatcttctgatgatttcagaaagtctcgaatgggttatcttgcttcatatgacggttttgttgagaacgaggttttttctgaacaagaacaatcactacgcagctccattccaaacccacctgcaaatttcagattgagggaggatcagctgactggaagttctcttaaagcgccgcgttctttcttctccctgtcaacattccgaagcaagggaggtgatgccaggctcaggtgatcctcagaagacaccagaggtgtggtgtgtataaaatatcttgtcaagttagagttggacttttgcaatctgttctttcaactggcccaggactcctgtattttttttcattgtttttgtgatatatctgtatctccctctcaacttgtttcttcattcacatatatcacaaattcaagatatatggtaattttgccaactatagcaaaccacctgagatgctagctctgcttgtgataaaattgaaacgagtttgtgacaaaattgaaacgagagtcg

SEQ ID NO: 67176 - DNA, 4961 bp, Zea Mays
ctttagccagccatcaagctagtaatctctctcaaatacccccacttttttcttcttctttattttagcttcaagtcttcaacattcctctgcagcagccagcagccaccagtgaggccgtgagggtgagtcgagtcgagtccaccaccaccaccaccaccaccaaatagccaaacacgcagtggtgctgctctctagtcctcccttcttccactccgctaaccccccgtcgcaagcacgcacgcgcgcgctcatcggattcggctacgcgccggcgagatccgggccgccgcagcacggtccggcagacgccgccgaaggcgcaagccgcgatcttgtcgccgcgggagctgcattggcgccccacgcggccgttccggcgtttcttgggaggttgcggcggcgggaggagttcgtgtccgggatccgccagatccgtgctcgccggcggcggcagcagtggtggtggccgccatggaggccgatgcgccgctcgacctcgcgctcttccagctatcccctcggcgtcagcggtgcgagctagtggtgtgcggcaatgggcggacggagaagatcgcgtcagggtcggtgaagccgttcgtggcgcacctgcgggctgcggaggaacaggcgtcggctcagccaccgccgctggccatccggctgcagctggagcggcccgccccgtggtttagcaagggcacccttgagaggttcgtgcgcttcgtgagcacaccggaggtgctggagttggcgaacacctatgatctggagatgtcgcagctggaaggggccaggaagatttatgcgcagggaggtactggagatgctacttcaggtggagctgctgaaaatgttacagcctcagcggcagcggcggcagatattacaaagaaagaacttcttagggcaattgatgtgcgtctaagttcccttaaacaagatctggccgcagcttgttctcgagcatcctctgctgggttcaatcctatcagtgtatctgagcttattctttttgctaaccattttggtgccagtcggctgagcgaagcatgcacaaagttcatgtcactttgccagcggcgtcctgacatcagtcctcaaactgcacagccagcagtttcatcacactggaaggtctttgacgatgggaatgtccgtggttcttcgagttcagacatgtctatagatgaaccactagttgatctcagtgaatccaagaacaaatctacagtcagtggaagtggctctcaggtccacagactaagcaacatccaaggtttagaatctgctgcagcacagcaacccaagccaaccatccaacaagcagtagataaacaagaagcagaaacagatgcgtctcctgcaccttctaaaggagagctttcaaggcggctgagtgtgaaggacaggataaacatgtttgagagccagaaaaaggagcagactccaagttctggtaacagcaactctgccggtactggtagagtggttccagggaaaggtgagcaccgcagggttccttctggcgcctccatggagaagttagttagaaggtggagcagtgttagcgacatgagtattgacctcagcaacaatgagagtagtagcttaaatgacaaaaaggataatggaactcctgccgggactccaacatctactgatttggaggccgactctaaagtaagagctaatgaggactctaatggacagaaggattcaatcacgtcacactcttggccttgtcaaaaggataatgtaccaatggatctggccaccacagatttgtgcccaccctcaattttaagtaatacacttgctcctcataaagagagtatatatggtgatggtgcagaaaacgacatggttatgaactctagcattgaaagtgaagcatcctttgggaaagaaccgggggttattcaaggacacacaaggatgtcaaatcatgctacttcaaatgtttccactcaagaccgtctaaaatcttctgcaaagtcagttgaagaagccttgctgaaaaataaagttattgtaactagtgcatcgtcagaggagcatgtctgcatgatagacaaggaaatcacagctgttgctcatgaagtaccagttgcaagtgaacagattccccagaatgatattagaggtctccatacaaaagatattcacactgaagcagaagtgactggaaggaaggatcagccttcacgatcatttggaagggtatctggtggtgttaatcctaaaccaaaagcctcatccaattcccgagctaatgctaaaggctcatctgttagggatgcgattgcctctacagaaactgagttccgtgacgttagtttgcagcggaatcgtctaccacggaagtcagaagatgtagggaaaaaggttacagctggttctgattcagattgctctggtcgtcagggaaaaaatttgagcaggcaatcatccattaccgatcaggaactaaacttgcaggctagagtgacaagaccaggaaaagggaaccaagatcggcatggtgaattgcaaatgaaggccaatgagttggagaaattatttgctgaacacaagttaacatcctcccgacgaggtaaacctacagatgtgcaggttgaaagcacacctatggtgagtgaggtaaagccgacaatggttcttcatgagacaattcatacaaaacaagttgtaaaggagagtataactgtcaatgattttgatgccggtgagcttctgaagatggtgaataatcaagaatttaacattagcacaccacaaaaacttggcattctaagtttagaagagtcgagagggaagttttatgagcattatatgcagaagagggatgcaaaactgaaggaaggctggaagctgcagagagaggagaaggaagcaatgttaaaggctatgcatgacagcctagaacggagcaaggctgagttgcttacaaaattctctcggtctgcagatgtccctgactcaacttatgtttcccattgttctcagaagattcctccttcgcgatcagcaagaaaaaataaagatcagggggttggctcattcttggtggaagaggaaatgaatagtgactacctatctggtgatggttcttccaggagtgctgattccagaaagcatttttcaaataaagttgcttctacccaaaatgcatctgctggtcctatccataaacgttcatcaagaaccgcaagctctggttatgctaatcgcaggaatccaccagaaaatcctctcgcacagtctgtccccagtttttctgacttgagaaaagaaaatacaaagccttcacctggagtcagtagagtgagtgcaagagttcagcaaaagtcttttgcccgtagcaagagtattattgaagagtcaaagagcatattgaaagaagatcaatcgaggaggtcacaatctatgaggaagaaccaaattcctgatgagcttaaggacatttcgtcagggaatgatgatatttacaattgggctccctcaagaatttccaagaatcaatcagagggaccttttgcttacagtacccgtagatcgggtccaccaaagccttttcttaggaaaggcaatgggactcaccctgttattggtatagctggatttcaggctgcagctgccatgatggcgaatgccctccagcatggtgacagtggtgattttgaagatcagcaagaggattcccctgatgatgccaaagaagaggaagaatatgaaagcatggaagaaaatcttagagaaagtgactttcctgctgattctgacagtgagaacccaagagtgagtcatgaatttggaaattcagatgacccagggtcagaaaacggtgatgctgattttccaagcaaaacacctgccattggcagtactaagttcactgcttttacaggaaatgttcacaatccagctggtgatgttccagcaccctggagttctcgtcttccacagctgttcccttacacgaatgataattcagatggtgacgcctttgctgattcaccatcgggaagtccatcaccatggaattctcattcactggatgaaataacagatgctgatgtatctcggatgcggaaaaagtggggcagtgcacagatgccttttgctggtgtcaatgcacctcaacagccacgcaaagatgtttccaaaggattgaagaaattgtggaaatttggtaggaagactagaggcggtgacggtttagtaaatgattgggtatctgcctccactgcctcagaatgtgatgatgacatggaagatggacgggatctggtagtaggatcttctgatgatttcagaaagtctcgaatgggttatcttgcttcatatgacggttttgttgagaacgaggttttttctgaacaagaacaatcactacgcagctccattccaaacccacctgcaaatttcagattgagggaggatcagctgactggaagttctcttaaagcgccgcgttctttcttctccctgtcaacattccgaagcaagggaggtgatgccaggctcaggtgatcctcagaagacaccagaggtgtggtgtgtataaaatatcttgtcaagttaggtatggttatcaaattttcagggtggtacgtggatgctgctagcttgtgattatatatatattgtgtatctatggcggttcatataagctaccagttgagctctctccattgttgccgtttgattattcttttttcccctgtgtagagttggacttttgcaatctgttctttcaactggcccaggactcctgtattttttttcattgtttttgtgatatatctgtatctccctctcaacttgtttcttcattcacatatatcacaaattcaagatatatggtaattttgccaactatagcaaaccacctgagatgctagctctgcttgtgataaaattgaaacgagtttgtgacaaaattgaaacgagagtcg

SEQ ID NO: 67177 - DNA, 5954 bp, Zea Mays
tgcagcagccagcagccaccagtgaggccgtgagggtgagtcgagtcgagtccaccaccaccaccaccaccaccaaatagccaaacacgcagtggtgctgctctctagtcctcccttcttccactccgctaaccccccgtcgcaagcacgcacgcgcgcgctcatcggattcggctacgcgccggcgagatccgggccgccgcagcacggtccggcagacgccgccgaaggcgcaagccgcgatcttgtcgccgcgggagctgcattggcgccccacgcggccgttccggcgtttcttgggaggttgcggcggcgggaggagttcgtgtccgggatccgccagatccgtgctcgccggcggcggcagcagtggtggtggccgccatggaggccgatgcgccgctcgacctcgcgctcttccagctatcccctcggcgtcagcggtgcgagctagtggtgtgcggcaatgggcggacggagaagatcgcgtcagggtcggtgaagccgttcgtggcgcacctgcgggctgcggaggaacaggcgtcggctcagccaccgccgctggccatccggctgcagctggagcggcccgccccgtggtttagcaagggcacccttgagaggttcgtgcgcttcgtgagcacaccggaggtgctggagttggcgaacacctatgatctggagatgtcgcagctggaaggggccaggaagatttatgcgcagggaggtactggagatgctacttcaggtggagctgtacaatcttgcatatcttctgttactgaatctagtttatgtaatctctggccatgcttattggcagctgaaaatgttacagcctcagcggcagcggcggcagatattacaaagaaagaacttcttagggcaattgatgtgcgtctaagttcccttaaacaagatctggccgcagcttgttctcgagcatcctctgctgggttcaatcctatcagtgtatctgagcttattctttttgctaaccattttggtgccagtcggctgagcgaagcatgcacaaagttcatgtcactttgccagcggcgtcctgacatcagtcctcaaactgcacagccagcagtttcatcacactggaaggtctttgacgatgggaatgtccgtggttcttcgagttcagacatgtctatagatgaaccactagttgatctcagtgaatccaagaacaaatctacagtcagtggaagtggctctcaggtccacagactaagcaacatccaaggtttagaatctgctgcagcacagcaacccaagccaaccatccaacaagcagtagataaacaagaagcagaaacagatgcgtctcctgcaccttctaaaggagagctttcaaggcggctgagtgtgaaggacaggataaacatgtttgagagccagaaaaaggagcagactccaagttctggtaacagcaactctgccggtactggtagagtggttccagggaaaggtgagcaccgcagggttccttctggcgcctccatggagaagttagttagaaggtggagcagtgttagcgacatgagtattgacctcagcaacaatgagagtagtagcttaaatgacaaaaaggataatggaactcctgccgggactccaacatctactgatttggaggccgactctaaagtaagagctaatgaggactctaatggacagaaggattcaatcacgtcacactcttggccttgtcaaaaggataatgtaccaatggatctggccaccacagatttgtgcccaccctcaattttaagtaatacacttgctcctcataaagagagtatatatggtgatggtgcagaaaacgacatggttatgaactctagcattgaaagtgaagcatcctttgggaaagaaccgggggttattcaaggacacacaaggatgtcaaatcatgctacttcaaatgtttccactcaagaccgtctaaaatcttctgcaaagtcagttgaagaagccttgctgaaaaataaagttattgtaactagtgcatcgtcagaggagcatgtctgcatgatagacaaggaaatcacagctgttgctcatgaagtaccagttgcaagtgaacagattccccagaatgatattagaggtctccatacaaaagatattcacactgaagcagaagtgactggaaggaaggatcagccttcacgatcatttggaagggtatctggtggtgttaatcctaaaccaaaagcctcatccaattcccgagctaatgctaaaggctcatctgttagggatgcgattgcctctacagaaactgagttccgtgacgttagtttgcagcggaatcgtctaccacggaagtcagaagatgtagggaaaaaggttacagctggttctgattcagattgctctggtcgtcagggaaaaaatttgagcaggcaatcatccattaccgatcaggaactaaacttgcaggctagagtgacaagaccaggaaaagggaaccaagatcggcatggtgaattgcaaatgaaggccaatgagttggagaaattatttgctgaacacaagttaacatcctcccgacgaggtaaacctacagatgtgcaggttgaaagcacacctatggtgagtgaggtaaagccgacaatggttcttcatgagacaattcatacaaaacaagttgtaaaggagagtataactgtcaatgattttgatgccggtgagcttctgaagatggtgaataatcaagaatttaacattagcacaccacaaaaacttggcattctaagtttagaagagtcgagagggaagttttatgagcattatatgcagaagagggatgcaaaactgaaggaaggctggaagctgcagagagaggagaaggaagcaatgttaaaggctatgcatgacagcctagaacggagcaaggctgagttgcttacaaaattctctcggtctgcagatgtccctgactcaacttatgtttcccattgttctcagaagattcctccttcgcgatcagcaagaaaaaataaagatcagggggttggctcattcttggtggaagaggaaatgaatagtgactacctatctggtgatggttcttccaggagtgctgattccagaaagcatttttcaaataaagttgcttctacccaaaatgcatctgctggtcctatccataaacgttcatcaagaaccgcaagctctggttatgctaatcgcaggaatccaccagaaaatcctctcgcacagtctgtccccagtttttctgacttgagaaaagaaaatacaaagccttcacctggagtcagtagagtgagtgcaagagttcagcaaaagtcttttgcccgtagcaagagtattattgaagagtcaaagagcatattgaaagaagatcaatcgaggaggtcacaatctatgaggaagaaccaaattcctgatgagcttaaggacatttcgtcagggaatgatgatatttacaattgggctccctcaagaatttccaagaatcaatcagagggaccttttgcttacagtacccgtagatcgggtccaccaaagccttttcttaggaaaggcaatgggactcaccctgttattggtatagctggatttcaggctgcagctgccatgatggcgaatgccctccagcatggtgacagtggtgattttgaagatcagcaagaggattcccctgatgatgccaaagaagaggaagaatatgaaagcatggaagaaaatcttagagaaagtgactttcctgctgattctgacagtgagaacccaagagtgagtcatgaatttggaaattcagatgacccagggtcagaaaacggtgatgctgattttccaagcaaaacacctgccattggcagtactaagttcactgcttttacaggaaatgttcacaatccagctggtgatgttccagcaccctggagttctcgtcttccacagctgttcccttacacgaatgataattcagatggtgacgcctttgctgattcaccatcgggaagtccatcaccatggaattctcattcactggatgaaataacagatgctgatgtatctcggatgcggaaaaagtggggcagtgcacagatgccttttgctggtgtcaatgcacctcaacagccacgcaaagatgtttccaaaggattgaagaaattgtggaaatttggtaggaagactagaggcggtgacggtttagtaaatgattgggtatctgcctccactgcctcagaatgtgatgatgacatggaagatggacgggatctggtagtaggatcttctgatgatttcagaaagtctcgaatgggttatcttgcttcatatgacggttttgttgagaacgaggttttttctgaacaaggtatttgactttctaattctgtaaaaggtcttctcgttgtcattaaattagttagtatgcttctcaaaatactattcccacaatttatttgcactagataaagtttaaagaaatgggcctttctaatatggtcatcacactcctaaaattcaaaaaaaagtatctgaaggttccaaccatgtctatgagttggcaaacaatttaattgataacttaagatttctgttctccatctacccgaacaaaattgaaactgttggaacagctattctgagcattactcattctcgatgaggtattcctaggatataacctcttattcttggctgatgttatgcgcactaaccctgggccattggttctgccttatggcttgagtagttcagtatattgttcatacttcagtttgttaagagtgagtgacctggtggacgttcctctgttaatgcactttgcattgatgatgcacatgttatgtcgctccctagatcatgttagtggatgcaacatttcgaatgtgtggattttgaaaaagaaagggaaaaaggtgctagagctgtaatgtttcctatgcaatccctgcagtgctatccgaaagaatccaataacttctttttgtgaagcatggcctgaggatcctccctgcaatggctcgggaggagtaagatacaacctttgaaaactattgaccctagtaactaggcccagatgttaaaattgtaatccccccaaagcagtaacttccgtggatcactggatcatgatgatatggaggcccagtgatgttatacatagagtacatgatagacacaggaggaaaacactagattaggggattacgctaatacccctggctatcataccttaacagcactcgcaggggtttattagctcggacttctgaatcttaagggacctgtaagcctgtatatcctttggttactgtccaattttaactcttgccacacattttttttattcaagcccagaagcttgatgaaggtccttaatttgcagaacaatcactacgcagctccattccaaacccacctgcaaatttcagattgagggaggatcagctgactggaagttctcttaaagcgccgcgttctttcttctccctgtcaacattccgaagcaagggaggtgatgccaggctcaggtgatcctcagaagacaccagaggtgtggtgtgtataaaatatcttgtcaagttaggtatggttatcaaattttcagggtggtacgtggatgctgctagcttgtgattatatatatattgtgtatctatggcggttcatataagctaccagttgagctctctccattgttgccgtttgattattcttttttcccctgtgtagagttggacttttgcaatctgttctttcaactggcccaggactcctgtattttttttcattgtttttgtgatatatctgtatctccctctcaacttgtttcttcattcacatatatcacaaattcaagatatatggtaattttgccaactatagcaaaccacctgagatgctagctctgcttgtgataaaattgaaacgagtttgtgacaaaattgaaacgagagtcg

SEQ ID NO: 67178 - DNA, 4618 bp, Zea Mays
gtcgagtccaccaccaccaccaccaccaccaaatagccaaacacgcagtggtgctgctctctagtcctcccttcttccactccgctaaccccccgtcgcaagcacgcacgcgcgcgctcatcggattcggctacgcgccggcgagatccgggccgccgcagcacggtccggcagacgccgccgaaggcgcaagccgcgatcttgtcgccgcgggagctgcattggcgccccacgcggccgttccggcgtttcttgggaggttgcggcggcgggaggagttcgtgtccgggatccgccagatccgtgctcgccggcggcggcagcagtggtggtggccgccatggaggccgatgcgccgctcgacctcgcgctcttccagctatcccctcggcgtcagcggtgcgagctagtggtgtgcggcaatgggcggacggagaagatcgcgtcagggtcggtgaagccgttcgtggcgcacctgcgggctgcggaggaacaggcgtcggctcagccaccgccgctggccatccggctgcagctggagcggcccgccccgtggtttagcaagggcacccttgagaggttcgtgcgcttcgtgagcacaccggaggtgctggagttggcgaacacctatgatctggagatgtcgcagctggaaggggccaggaagatttatgcgcagggaggtactggagatgctacttcaggtggagctgctgaaaatgttacagcctcagcggcagcggcggcagatattacaaagaaagaacttcttagggcaattgatgtgcgtctaagttcccttaaacaagatctggccgcagcttgttctcgagcatcctctgctgggttcaatcctatcagtgtatctgagcttattctttttgctaaccattttggtgccagtcggctgagcgaagcatgcacaaagttcatgtcactttgccagcggcgtcctgacatcagtcctcaaactgcacagccagcagtttcatcacactggaaggtctttgacgatgggaatgtccgtggttcttcgagttcagacatgtctatagatgaaccactagttgatctcagtgaatccaagaacaaatctacagtcagtggaagtggctctcaggtccacagactaagcaacatccaaggtttagaatctgctgcagcacagcaacccaagccaaccatccaacaagcagtagataaacaagaagcagaaacagatgcgtctcctgcaccttctaaaggagagctttcaaggcggctgagtgtgaaggacaggataaacatgtttgagagccagaaaaaggagcagactccaagttctggtaacagcaactctgccggtactggtagagtggttccagggaaaggtgagcaccgcagggttccttctggcgcctccatggagaagttagttagaaggtggagcagtgttagcgacatgagtattgacctcagcaacaatgagagtagtagcttaaatgacaaaaaggataatggaactcctgccgggactccaacatctactgatttggaggccgactctaaagtaagagctaatgaggactctaatggacagaaggattcaatcacgtcacactcttggccttgtcaaaaggataatgtaccaatggatctggccaccacagatttgtgcccaccctcaattttaagtaatacacttgctcctcataaagagagtatatatggtgatggtgcagaaaacgacatggttatgaactctagcattgaaagtgaagcatcctttgggaaagaaccgggggttattcaaggacacacaaggatgtcaaatcatgctacttcaaatgtttccactcaagaccgtctaaaatcttctgcaaagtcagttgaagaagccttgctgaaaaataaagttattgtaactagtgcatcgtcagaggagcatgtctgcatgatagacaaggaaatcacagctgttgctcatgaagtaccagttgcaagtgaacagattccccagaatgatattagaggtctccatacaaaagatattcacactgaagcagaagtgactggaaggaaggatcagccttcacgatcatttggaagggtatctggtggtgttaatcctaaaccaaaagcctcatccaattcccgagctaatgctaaaggctcatctgttagggatgcgattgcctctacagaaactgagttccgtgacgttagtttgcagcggaatcgtctaccacggaagtcagaagatgtagggaaaaaggttacagctggttctgattcagattgctctggtcgtcagggaaaaaatttgagcaggcaatcatccattaccgatcaggaactaaacttgcaggctagagtgacaagaccaggaaaagggaaccaagatcggcatggtgaattgcaaatgaaggccaatgagttggagaaattatttgctgaacacaagttaacatcctcccgacgaggtaaacctacagatgtgcaggttgaaagcacacctatggtgagtgaggtaaagccgacaatggttcttcatgagacaattcatacaaaacaagttgtaaaggagagtataactgtcaatgattttgatgccggtgagcttctgaagatggtgaataatcaagaatttaacattagcacaccacaaaaacttggcattctaagtttagaagagtcgagagggaagttttatgagcattatatgcagaagagggatgcaaaactgaaggaaggctggaagctgcagagagaggagaaggaagcaatgttaaaggctatgcatgacagcctagaacggagcaaggctgagttgcttacaaaattctctcggtctgcagatgtccctgactcaacttatgtttcccattgttctcagaagattcctccttcgcgatcagcaagaaaaaataaagatcagggggttggctcattcttggtggaagaggaaatgaatagtgactacctatctggtgatggttcttccaggagtgctgattccagaaagcatttttcaaataaagttgcttctacccaaaatgcatctgctggtcctatccataaacgttcatcaagaaccgcaagctctggttatgctaatcgcaggaatccaccagaaaatcctctcgcacagtctgtccccagtttttctgacttgagaaaagaaaatacaaagccttcacctggagtcagtagagtgagtgcaagagttcagcaaaagtcttttgcccgtagcaagagtattattgaagagtcaaagagcatattgaaagaagatcaatcgaggaggtcacaatctatgaggaagaaccaaattcctgatgagcttaaggacatttcgtcagggaatgatgatatttacaattgggctccctcaagaatttccaagaatcaatcagagggaccttttgcttacagtacccgtagatcgggtccaccaaagccttttcttaggaaaggcaatgggactcaccctgttattggtatagctggatttcaggctgcagctgccatgatggcgaatgccctccagcatggtgacagtggtgattttgaagatcagcaagaggattcccctgatgatgccaaagaagaggaagaatatgaaagcatggaagaaaatcttagagaaagtgactttcctgctgattctgacagtgagaacccaagagtgagtcatgaatttggaaattcagatgacccagggtcagaaaacggtgatgctgattttccaagcaaaacacctgccattggcagtactaagttcactgcttttacaggaaatgttcacaatccagctggtgatgttccagcaccctggagttctcgtcttccacagctgttcccttacacgaatgataattcagatggtgacgcctttgctgattcaccatcgggaagtccatcaccatggaattctcattcactggatgaaataacagatgctgatgtatctcggatgcggaaaaagtggggcagtgcacagatgccttttgctggtgtcaatgcacctcaacagccacgcaaagatgtttccaaaggattgaagaaattgtggaaatttggtaggaagactagaggcggtgacggtttagtaaatgattgggtatctgcctccactgcctcagaatgtgatgatgacatggaagatggacgggatctggtagtaggatcttctgatgatttcagaaagtctcgaatgggttatcttgcttcatatgacggttttgttgagaacgaggttttttctgaacaaggtatttgactttctaattctgtaaaaggtcttctcgttgtcattaaattagttagtatgcttctcaaaatactattcccacaatttatttgcactagataaagtttaaagaaatgggcctttctaatatggtcatcacactcctaaaattcaaaaaaaagtatctgaaggttccaaccatgtctatgagttggcaaacaatttaattgataacttaagatttctgttctccatctacccgaacaaaattgaaactgttggaacagctattctgagcattactcattctcgatgaggtattcctaggatataacctcttattcttggctgatgttatgcgcactaaccctgggccattggttctgc

SEQ ID NO: 67179 - DNA, 4922 bp, Zea Mays
gtcgagtccaccaccaccaccaccaccaccaaatagccaaacacgcagtggtgctgctctctagtcctcccttcttccactccgctaaccccccgtcgcaagcacgcacgcgcgcgctcatcggattcggctacgcgccggcgagatccgggccgccgcagcacggtccggcagacgccgccgaaggcgcaagccgcgatcttgtcgccgcgggagctgcattggcgccccacgcggccgttccggcgtttcttgggaggttgcggcggcgggaggagttcgtgtccgggatccgccagatccgtgctcgccggcggcggcagcagtggtggtggccgccatggaggccgatgcgccgctcgacctcgcgctcttccagctatcccctcggcgtcagcggtgcgagctagtggtgtgcggcaatgggcggacggagaagatcgcgtcagggtcggtgaagccgttcgtggcgcacctgcgggctgcggaggaacaggcgtcggctcagccaccgccgctggccatccggctgcagctggagcggcccgccccgtggtttagcaagggcacccttgagaggttcgtgcgcttcgtgagcacaccggaggtgctggagttggcgaacacctatgatctggagatgtcgcagctggaaggggccaggaagatttatgcgcagggaggtactggagatgctacttcaggtggagctggtatgtaggatgattttatctagtgtttggatcgcccttctattgtcaattggggtttgaatattgctagcttagttcatctatgttcatacctgctgaaaatgttacagcctcagcggcagcggcggcagatattacaaagaaagaacttcttagggcaattgatgtgcgtctaagttcccttaaacaagatctggccgcagcttgttctcgagcatcctctgctgggttcaatcctatcagtgtatctgagcttattctttttgctaaccattttggtgccagtcggctgagcgaagcatgcacaaagttcatgtcactttgccagcggcgtcctgacatcagtcctcaaactgcacagccagcagtttcatcacactggaaggtctttgacgatgggaatgtccgtggttcttcgagttcagacatgtctatagatgaaccactagttgatctcagtgaatccaagaacaaatctacagtcagtggaagtggctctcaggtccacagactaagcaacatccaaggtttagaatctgctgcagcacagcaacccaagccaaccatccaacaagcagtagataaacaagaagcagaaacagatgcgtctcctgcaccttctaaaggagagctttcaaggcggctgagtgtgaaggacaggataaacatgtttgagagccagaaaaaggagcagactccaagttctggtaacagcaactctgccggtactggtagagtggttccagggaaaggtgagcaccgcagggttccttctggcgcctccatggagaagttagttagaaggtggagcagtgttagcgacatgagtattgacctcagcaacaatgagagtagtagcttaaatgacaaaaaggataatggaactcctgccgggactccaacatctactgatttggaggccgactctaaagtaagagctaatgaggactctaatggacagaaggattcaatcacgtcacactcttggccttgtcaaaaggataatgtaccaatggatctggccaccacagatttgtgcccaccctcaattttaagtaatacacttgctcctcataaagagagtatatatggtgatggtgcagaaaacgacatggttatgaactctagcattgaaagtgaagcatcctttgggaaagaaccgggggttattcaaggacacacaaggatgtcaaatcatgctacttcaaatgtttccactcaagaccgtctaaaatcttctgcaaagtcagttgaagaagccttgctgaaaaataaagttattgtaactagtgcatcgtcagaggagcatgtctgcatgatagacaaggaaatcacagctgttgctcatgaagtaccagttgcaagtgaacagattccccagaatgatattagaggtctccatacaaaagatattcacactgaagcagaagtgactggaaggaaggatcagccttcacgatcatttggaagggtatctggtggtgttaatcctaaaccaaaagcctcatccaattcccgagctaatgctaaaggctcatctgttagggatgcgattgcctctacagaaactgagttccgtgacgttagtttgcagcggaatcgtctaccacggaagtcagaagatgtagggaaaaaggttacagctggttctgattcagattgctctggtcgtcagggaaaaaatttgagcaggcaatcatccattaccgatcaggaactaaacttgcaggctagagtgacaagaccaggaaaagggaaccaagatcggcatggtgaattgcaaatgaaggccaatgagttggagaaattatttgctgaacacaagttaacatcctcccgacgaggtaaacctacagatgtgcaggttgaaagcacacctatggtgagtgaggtaaagccgacaatggttcttcatgagacaattcatacaaaacaagttgtaaaggagagtataactgtcaatgattttgatgccggtgagcttctgaagatggtgaataatcaagaatttaacattagcacaccacaaaaacttggcattctaagtttagaagagtcgagagggaagttttatgagcattatatgcagaagagggatgcaaaactgaaggaaggctggaagctgcagagagaggagaaggaagcaatgttaaaggctatgcatgacagcctagaacggagcaaggctgagttgcttacaaaattctctcggtctgcagatgtccctgactcaacttatgtttcccattgttctcagaagattcctccttcgcgatcagcaagaaaaaataaagatcagggggttggctcattcttggtggaagaggaaatgaatagtgactacctatctggtgatggttcttccaggagtgctgattccagaaagcatttttcaaataaagttgcttctacccaaaatgcatctgctggtcctatccataaacgttcatcaagaaccgcaagctctggttatgctaatcgcaggaatccaccagaaaatcctctcgcacagtctgtccccagtttttctgacttgagaaaagaaaatacaaagccttcacctggagtcagtagagtgagtgcaagagttcagcaaaagtcttttgcccgtagcaagagtattattgaagagtcaaagagcatattgaaagaagatcaatcgaggaggtcacaatctatgaggaagaaccaaattcctgatgagcttaaggacatttcgtcagggaatgatgatatttacaattgggctccctcaagaatttccaagaatcaatcagagggaccttttgcttacagtacccgtagatcgggtccaccaaagccttttcttaggaaaggcaatgggactcaccctgttattggtatagctggatttcaggctgcagctgccatgatggcgaatgccctccagcatggtgacagtggtgattttgaagatcagcaagaggattcccctgatgatgccaaagaagaggaagaatatgaaagcatggaagaaaatcttagagaaagtgactttcctgctgattctgacagtgagaacccaagagtgagtcatgaatttggaaattcagatgacccagggtcagaaaacggtgatgctgattttccaagcaaaacacctgccattggcagtactaagttcactgcttttacaggaaatgttcacaatccagctggtgatgttccagcaccctggagttctcgtcttccacagctgttcccttacacgaatgataattcagatggtgacgcctttgctgattcaccatcgggaagtccatcaccatggaattctcattcactggatgaaataacagatgctgatgtatctcggatgcggaaaaagtggggcagtgcacagatgccttttgctggtgtcaatgcacctcaacagccacgcaaagatgtttccaaaggattgaagaaattgtggaaatttggtaggaagactagaggcggtgacggtttagtaaatgattgggtatctgcctccactgcctcagaatgtgatgatgacatggaagatggacgggatctggtagtaggatcttctgatgatttcagaaagtctcgaatgggttatcttgcttcatatgacggttttgttgagaacgaggttttttctgaacaagaacaatcactacgcagctccattccaaacccacctgcaaatttcagattgagggaggatcagctgactggaagttctcttaaagcgccgcgttctttcttctccctgtcaacattccgaagcaagggaggtgatgccaggctcaggtgatcctcagaagacaccagaggtgtggtgtgtataaaatatcttgtcaagttaggtatggttatcaaattttcagggtggtacgtggatgctgctagcttgtgattatatatatattgtgtatctatggcggttcatataagctaccagttgagctctctccattgttgccgtttgattattcttttttcccctgtgtagagttggacttttgcaatctgttctttcaactggcccaggactcctgtattttttttcattgtttttgtgatatatctgtatctccctctcaacttgtttcttcattcacatatatcacaaattcaagatatatggtaattttgccaactatagcaaaccacctgagatgctagctctgcttgtgataaaattgaaacgagtttgtgacaaaattgaaacgagagtcg

SEQ ID NO: 67180 - DNA, 1806 bp, Zea Mays
tgtagtcctgcaaatgctcaggggggtgtttggtttctagggactaatttttagtccctacattttattacattttagttccaaaattgctaaatatggaaactaaaactctattttaatttctatatttgacaatttatatactaaaatggaataaaatgaagagactaaacattagtccctagaaaccaaacaccccctcagtattctaactttctcagcttatttgacctttgcagcagaaggtaggcttaagttttttttttttttttgaagagaagatatatatctggaaacttcagtgaaggcatgggtttcagctaagcagtcctaatcgtccttaaagacagagaataaattgattaaaagtctagaaataataggtgctatgggtgcatcttatcatttaagtggggaacatcacttatggaaattggaatattcccttactaagtctggatgattgcgacgtaggagtagtatacataaatacatcgtcaaaggacagcacgcatttacatgcatgtagttagcatgccagcgcacttctgaagaatgaagtgtgatgaatagctgaacggatttgagttatgtttcagttgcgatgagtaggaccgggattagatctgaacagttatttcagaggcattttagttttctcgcctttattgcctactgttggttacagatcgagagtagaaatccactttgctgccgtttgttgtctgtcagtctgttcgcttgactttaatccatacaggttctaatgcttatacaatgttttttctagccagcgtcgctacaaaggtacgttctacagttttttttgcggtacataactactacatttaaaactgcaaattggaatgtaatgtcttcactgaaaacacatgtagatcaattagtcagtatgttctttcacatctgatggttgaaaatgtcagttgcaatactggaatctgctgatttcatcgaaattgattcataaattttgagttcacttcaatacgtagatgctagttttgtaacgtggtacttcttattgcagtatccataggcatctggtatgttgttttatcttgcatttccaggagggttcagctgttttggtgaaataaacatgtcctacatttttttaaaaagggttgtgagggtgtacagttggcaaagacgaggcagcagggatttacgttttattaaaaaaagaatggaggataatctaccggttaatgcccgggaaaaccaagaacggccaagaaaacactcccaaagatgcactatgattatatcaacaatgggggagcagaggatgagtatacactgatgagagggagaacattgcagcatacggaaggattctgttacggccacgagtcctttagacgtgagcaagatatacatgtgaacaagcttattaggatctaatatgtcatcgccaataattgccactcgtacaggatggcacaaatcagcaaatctagaaggggaggtgtggccacagcaagagcttctgcagcatgtggtaccgtaatggtgctttccttgtcatcaagctgcagagtcgaggaggtcgcctccatggtcattcgcttttatcagttatatgtacgagacgggatgtttcggcaacattggtacggcgggctgggagtctaggattattcagggcaattgttttgacagtccagacgcctgtgcttggcagatgtgaatgctgctgtcagaaacaagtacagtagtgcttgtatctctgctaaaatatctcctaaagttgagcgaagttatgttcttctacaattcataatt

SEQ ID NO: 67181 - DNA, 2096 bp, Zea Mays
ctttcctcgtccttctcatcaatgtggcaacggaaaacccaaagaccctgataacttatccccaaattaaccggtagcgtaaagccggtcgatttccggaccccatattttcttctatcttcccagctgccgttgccggcggaagaagccaattgacgtgatccccgccgccaagcccaaccccgccgaccggagctgcatcctctccttctctctcccataccacgacgagacgatcccatcggcgcccgcgcggtcccttcgatccaagcaagcgtagtcccttgttcctagtataacctctaaatgattccatgggaactccaaacgaaatgatggcatactcttccctgtccaaaatggacaccagccagaaccacggagctgctctgtccaatgtagttgctggaaacaactatcctgttcaggattatctttatgagcaagcatccgaaccagacttcccagagtatgattcaagggatgacctgttcgctccaacacgagctagtccaaaagtcaatctaaatactgttctaggtggtctggtttcgattgttacaggtgtaaacaagagtgaggatgatgcatcgcagcatgaaagttttagcacagacatatcattccttagatctgacaagaatggtaatgtcaatgtgcacccttccgtctgtgttccaagtgccccaccactacttgaagcgaatgctttacaatatagtgcatacaaggaggtgttgctagcagatccaccagagtggttgccagatagctctgctaatgtgtgcctacagtgcaacttgcctttcacggctctgactcgtggaaggcaccattgtcggttctgtggaggtatattctgcaaaaactgttccaaaggaagatgtttgatgcccatgaaattcaggatccgtgatcctcagagagtttgtgatgcttgctatgagaggcttgatccacttcagggattattgatcaactacaatagtaactgcatgcagcaagcaaaacacgatgtcatggattggacaagcactagaagctggttgaacatgcctgttggtgtatcaatggagtatgagatatacaaggctacaaacacaatgaagaaatattgtcaggttgctagattaaaccctgagaagtccatcccatcatctattctcaagggggcgaagggacttgcaattctaacagttgccaaggcaggtgcagttcttacatacaaagttggcactggtcttgtggttgctcgcagatctgatggatcatggtctgctccctctgcaattttatctgttggcctgggatggggagtgcagctgtcaaggctttcagcagtcgcattcatctttcacttggggcaggattgagtgctgcagcaggacccattggcagagcatttgaggcagacgttcgggccagtgaaaagggttctgggatatgctacacttacagctgcaccaaaggtgccttcgttggggtttcactggaagggaatgtggtgacaaccagaatggagaccaatctacgcttctacggtgatgcatacctgacggcaaccgatatcctgtttgggagggtggagcggccccgagctgcccagcccttgtactcagctctagatgatctgttctccaaaatggtttgctagcccatttagattggcgtgatactctgcattggtggcatgcagtcatgtatgtatataaacataaggtagcagcaaaaatcctaaacaggagatatggaagcggaaagaatgtacagcttttgatggatggtttcactactgatagcagtccatacatgtaaatattggcagaagaagatttaagggctgtttggttcgcacactactgatatcagtacgctgcagtgtgccactggtggactcatccatgcaatggaaaattttaatacatttgttagttcgtttgtggcttagattattcgatggggaagggggtatttcgctgcagtcccatgctgttgtagtagattctgttagtggaaggaacgctgcgatttttccccatactgtacctgttgtgcttactgttcacaaggatttctctatcaatagtactttcatg

SEQ ID NO: 67182 - DNA, 2139 bp, Zea Mays
ttcctcgtccttctcatcaatgtggcaacggaaaacccaaagaccctgataacttatccccaaattaaccggtagcgtaaagccggtcgatttccggaccccatattttcttctatcttcccagctgccgttgccggcggaagaagccaattgacgtgatccccgccgccaagcccaaccccgccgaccggagctgcatcctctccttctctctcccataccacgacgagacgatcccatcggcgcccgcgcggtcccttcgatccaagcaagctcccttgttcctagtataacctctaaatgattccatgggaactccaaacgaaatgatggcatactcttccctgtccaaaatggacaccagccagaaccacggagctgctctgtccaatgtagttgctggaaacaactatcctgttcaggattatctttatgagcaagcatccgaaccagacttcccagagtatgattcaagggatgacctgttcgctccaacacgagctagtccaaaagtcaatctaaatactgttctaggtggtctggtttcgattgttacaggtgtaaacaagagtgaggatgatgcatcgcagcatgaaagttttagcacagacatatcattccttagatctgacaagaatggtaatgtcaatgtgcacccttccgtctgtgttccaagtgccccaccactacttgaagcgaatgctttacaatatagtgcatacaaggaggtgttgctagcagatccaccagagtggttgccagatagctctgctaatgtgtgcctacagtgcaacttgcctttcacggctctgactcgtggaaggcaccattgtcggttctgtggaggtatattctgcaaaaactgttccaaaggaagatgtttgatgcccatgaaattcaggatccgtgatcctcagagagtttgtgatgcttgctatgagaggcttgatccacttcagggattattgatcaactacaatagtaactgcatgcagcaagcaaaacacgatgtcatggattggacaagcactagaagctggttgaacatgcctgttggtgtatcaatggagtatgagatatacaaggctacaaacacaatgaagaaatattgtcaggttgctagattaaaccctgagaagtccatcccatcatctattctcaagggggcgaagggacttgcaattctaacagttgccaaggcaggtgcagttcttacatacaaagttggcactggtcttgtggttgctcgcagatctgatggatcatggtctgctccctctgcaattttatctgttggcctgggatggggagtgcagattggaggagaactgacagacttcatcattgtgcttcatgaccgtaaagctgtcaaggctttcagcagtcgcattcatctttcacttggggcaggattgagtgctgcagcaggacccattggcagagcatttgaggcagacgttcgggccagtgaaaagggttctgggatatgctacacttacagctgcaccaaaggtgccttcgttggggtttcactggaagggaatgtggtgacaaccagaatggagaccaatctacgcttctacggtgatgcatacctgacggcaaccgatatcctgtttgggagggtggagcggccccgagctgcccagcccttgtactcagctctagatgatctgttctccaaaatggtttgctagcccatttagattggcgtgatactctgcattggtggcatgcagtcatgtatgtatataaacataaggtagcagcaaaaatcctaaacaggagatatggaagcggaaagaatgtacagcttttgatggatggtttcactactgatagcagtccatacatgtaaatattggcagaagaagatttaagggctgtttggttcgcacactactgatatcagtacgctgcagtgtgccactggtggactcatccatgcaatggaaaattttaatacatttgttagttcgtttgtggcttagattattcgatggggaagggggtatttcgctgcagtcccatgctgttgtagtagattctgttagtggaaggaacgctgcgatttttccccatactgtacctgttgtgcttactgttcacaaggatttctctatcaatagtactttcatg

SEQ ID NO: 67183 - DNA, 1979 bp, Zea Mays
gataacttatccccaaattaaccggtagcgtaaagccggtcgatttccggaccccatattttcttctatcttcccagctgccgttgccggcggaagaagccaattgacgtgatccccgccgccaagcccaaccccgccgaccggagctgcatcctctccttctctctcccataccacgacgagacgatcccatcggcgcccgcgcggtcccttcgatccaagcaagcgtagtcccttgttcctagtataacctctaaatgattccatgggaactccaaacgaaatgatggcatactcttccctgtccaaaatggacaccagccagaaccacggagctgctctgtccaatgtagttgctggaaacaactatcctgttcaggattatctttatgagcaagcatccgaaccagacttcccagagtatgattcaagggatgacctgttcgctccaacacgagctagtccaaaagtcaatctaaatactgttctaggtggtctggtttcgattgttacaggtgtaaacaagagtgaggatgatgcatcgcagcatgaaagttttagcacagacatatcattccttagatctgacaagaatggtaatgtcaatgtgcacccttccgtctgtgttccaagtgccccaccactacttgaagcgaatgctttacaatatagtgcatacaaggaggtgttgctagcagatccaccagagtggttgccagatagctctgctaatgtgtgcctacagtgcaacttgcctttcacggctctgactcgtggaaggcaccattgtcggttctgtggaggtatattctgcaaaaactgttccaaaggaagatgtttgatgcccatgaaattcaggatccgtgatcctcagagagtttgtgatgcttgctatgagaggcttgatccacttcagggattattgatcaactacaatagtaactgcatgcagcaagcaaaacacgatgtcatggattggacaagcactagaagctggttgaacatgcctgttggtgtatcaatggagtatgagatatacaaggctacaaacacaatgaagaaatattgtcaggttgctagattaaaccctgagaagtccatcccatcatctattctcaagggggcgaagggacttgcaattctaacagttgccaagattggaggagaactgacagacttcatcattgtgcttcatgaccgtaaagctgtcaaggctttcagcagtcgcattcatctttcacttggggcaggattgagtgctgcagcaggacccattggcagagcatttgaggcagacgttcgggccagtgaaaagggttctgggatatgctacacttacagctgcaccaaaggtgccttcgttggggtttcactggaagggaatgtggtgacaaccagaatggagaccaatctacgcttctacggtgatgcatacctgacggcaaccgatatcctgtttgggagggtggagcggccccgagctgcccagcccttgtactcagctctagatgatctgttctccaaaatggtttgctagcccatttagattggcgtgatactctgcattggtggcatgcagtcatgtatgtatataaacataaggtagcagcaaaaatcctaaacaggagatatggaagcggaaagaatgtacagcttttgatggatggtttcactactgatagcagtccatacatgtaaatattggcagaagaagatttaagggctgtttggttcgcacactactgatatcagtacgctgcagtgtgccactggtggactcatccatgcaatggaaaattttaatacatttgttagttcgtttgtggcttagattattcgatggggaagggggtatttcgctgcagtcccatgctgttgtagtagattctgttagtggaaggaacgctgcgatttttccccatactgtacctgttgtgcttactgttcacaaggatttctctatcaatagtactttcatg

SEQ ID NO: 67184 - DNA, 1382 bp, Zea Mays
gccggtcgatttccggaccccatattttcttctatcttcccagctgccgttgccggcggaagaagccaattgacgtgatccccgccgccaagcccaaccccgccgaccggagctgcatcctctccttctctctcccataccacgacgagacgatcccatcggcgcccgcgcggtcccttcgatccaagcaagccaagcaaaacacgatgtcatggattggacaagcactagaagctggttgaacatgcctgttggtgtatcaatggagtatgagatatacaaggctacaaacacaatgaagaaatattgtcaggttgctagattaaaccctgagaagtccatcccatcatctattctcaagggggcgaagggacttgcaattctaacagttgccaaggcaggtgcagttcttacatacaaagttggcactggtcttgtggttgctcgcagatctgatggatcatggtctgctccctctgcaattttatctgttggcctgggatggggagtgcagattggaggagaactgacagacttcatcattgtgcttcatgaccgtaaagctgtcaaggctttcagcagtcgcattcatctttcacttggggcaggattgagtgctgcagcaggacccattggcagagcatttgaggcagacgttcgggccagtgaaaagggttctgggatatgctacacttacagctgcaccaaagattgcactgttcgcagagtgaagtttgaatatgggtatgaggatggtgccttcgttggggtttcactggaagggaatgtggtgacaaccagaatggagaccaatctacgcttctacggtgatgcatacctgacggcaaccgatatcctgtttgggagggtggagcggccccgagctgcccagcccttgtactcagctctagatgatctgttctccaaaatggtttgctagcccatttagattggcgtgatactctgcattggtggcatgcagtcatgtatgtatataaacataaggtagcagcaaaaatcctaaacaggagatatggaagcggaaagaatgtacagcttttgatggatggtttcactactgatagcagtccatacatgtaaatattggcagaagaagatttaagggctgtttggttcgcacactactgatatcagtacgctgcagtgtgccactggtggactcatccatgcaatggaaaattttaatacatttgttagttcgtttgtggcttagattattcgatggggaagggggtatttcgctgcagtcccatgctgttgtagtagattctgttagtggaaggaacgctgcgatttttccccatactgtacctgttgtgcttactgttcacaaggatttctctatcaatagtactttcatg

SEQ ID NO: 67185 - DNA, 2991 bp, Zea Mays
ccgatccaaatccaccccaagggaacatctaccgccggccggctcctgtgtctggcgtgtattggaccacgaccagcaggcagcagccccgcgcacgagccaagatgcgcacgcctagcgcgacgacgaccgagaggccgagatgtgcgtttatcaggaactgaggaggcgtgccgtgcctggaccaggccatactaggccttacttctactcgccaggtcgcagcaactcacgtgttcacgagcgtctcactgagcggtgggtcacctccagcgcgatgacaggtggagccggtgtttgaacgcggcagtggctacgccgctacgggcctggctgctactcacaagtcacaagcgagaggagcatgtcgttttcgtttcagtgctgctgcctgcaagccagcaattgcttctccttcctctccctccctctctcttcccgaccgtttgcgccaccggaaggtcctggaagctggaacattgtgagatgaggagcaatagacgacgccttggaggaagaggaggaggatggggtggccagggcggtggtgtaagtgtggccgcttccttcgccgcgctgttgggctgtgtcgtggccctcgtcggcggcgccgccgggcagggcccccggcccccctccgactacaaaaccctcagcggcgccgctccacttgtggtggccaaaggtggattttcaggagtgtttccagattctagccaaggcgcctattctttcgcgatgatcaccagcgcaccggacacggccatgtggtgcgacgtccaactaacaaaggatggtgttggagtctgccttcgggatataaatatgaaaaactgcaccagtgttgatcaagcctaccccgagagaaagcggacctatgtcatcgatggtgtgcggaaaactggatggtttgtttcagacttcaccattgctgagcttcagtctgtttctctaacacaagcaatttggcctcgcactaggagattcgatggcatctatcctatcatcagtattactgactttcggtcccttgtcatgccatctcctgtttggttgaatgtacagcatgacatcttctacaaacaacatggtttggacatgaggaactacatactttcgatcaaaaagggtgtatccatggattatatctcatcacctgaactgggcttcctcaaaaatatgtctggaagagttggtcgcaaaacaaagcttgtgtttagatttcttgaaaaggccctcttagatcattctataaatcaaacatatggttcactgtcgagtaacctaccatttattaaatctattgcatctggcataatagtccctaagagttacatttggccggtgacgaaggataactatctactgccatccacatcaattgtcacagaagcccacaatgcagggctggaaatatatgcctctgattttgccaatgatagaattatcccctataactacagctatgatccgttggcagaatacctgaactttatcaatgatggtggcttctctgttgatggtgtattgtcagaacacccaattactgcatcagaggcaattggttgttttactaaactgaattcaaataagactgatcatggagaacccttagttatctcacataatggtgctagtggagactacccggactgtacagacttggcctaccatagtgcaattgatgatggtgcagacatcattgactgtcctattcaagtgacaaatgatggagttcttatgtgcatgagttccactaacctgcttgacactacgaatgttcagagaacaacttacaactctctggtttctgtcgttccagatattcagcctcaaccaggaatcttcacattcaacctcacttggtccgacattaacagtaatgttttaaaacctaaaatatcttctccagtgagtggttatttccttgtaaggaacccaagatacacaaatcaagggaagtttttgaagttatctgactttctagcaatcgcaatggataaagacttgtctggtgtcatgatcattattgagtgctgctggcttcgataatcatcctaccaaggaagttctgatcaagtcaaaagatagtgatgttcttgtcaaactgaagcagcagaaaacaaaatgcaagcttgtttacactctaccctctggcatcggggatgcttctaattcctcgttgaaagacattaagaagtttgctgaatatgtagctgtggacagcaaatctgtttttactctaagctctgacttcatcataagacagaacagtcttgtgcaagatctgcagtcagcggggctagctttgtatgcagaggtgttccagaatgagtttgtagcacaaccattggatttcttcggagatgaaactgtggaaatcaattactatattcaatcatttaatttatcaggcatcataactgatttcccgaagacagtcagaagatataaaagaaacacctgtacagttctgggaaaggatatgcccagctacatgcagcctcctcaggctggttcccttgcacagtttctacaaaccttcaaaacccagcctccatctctgccaccaatgtcgacgctgaattcttcaagcgtggaggagccacctcttcctactgttgcgttaagaagtgtatctgatggtagtgcctcgggggcgaccaagactcctggcacaccttctgatgctccaacggctacagtaaatgctggcatgctacttgtgatggttttcacagctttgctaatctgagaagccacatgagattgtatagtagacgactgaagctaatctgatctcccttggattcaggtaagctttgactagtgatctggtactaccacacacttgttttcttatttccacctttacaaatttgtcagtagaaaatgttagagtatccatttagggtttggggtttaccccgtgtaattacccgcttacccctgtgtaataggccagaccgagctaacttagtctattaatac

SEQ ID NO: 67186 - DNA, 3691 bp, Zea Mays
gttttcgtttcagtgctgctgcctgcaagccagcaattgcttctccttcctctccctccctctctcttcccgaccgtttgcgccaccggaaggtcctggaagctggaacattgtgagatgaggagcaatagacgacgccttggaggaagaggaggaggatggggtggccagggcggtggtgtaagtgtggccgcttccttcgccgcgctgttgggctgtgtcgtggccctcgtcggcggcgccgccgggcagggcccccggcccccctccgactacaaaaccctcagcggcgccgctccacttgtggtggccaaaggtggattttcaggagtgtttccagattctagccaaggcgcctattctttcgcgatgatcaccagcgcaccggacacggccatgtggtgcgacgtccaactaacaaaggatggtgttggagtctgccttcgggatataaatatgaaaaactgcaccagtgttgatcaagcctaccccgagagaaagcggacctatgtcatcgatggtgtgcggaaaactggatggtttgtttcagacttcaccattgctgagcttcagtctgtttctctaacacaagcaatttggcctcgcactaggagattcgatggcatctatcctatcatcagtattactgactttcggtcccttgtcatgccatctcctgtttggttgaatgtacagcatgacatcttctacaaacaacatggtttggacatgaggaactacatactttcgatcaaaaagggtgtatccatggattatatctcatcacctgaactgggcttcctcaaaaatatgtctggaagagttggtcgcaaaacaaagcttgtgtttagatttcttgaaaaggccctcttagatcattctataaatcaaacatatggttcactgtcgagtaacctaccatttattaaatctattgcatctggcataatagtccctaagagttacatttggccggtgacgaaggataactatctactgccatccacatcaattgtcacagaagcccacaatgcagggctggaaatatatgcctctgattttgccaatgatagaattatcccctataactacagctatgatccgttggcagaatacctgaactttatcaatgatggtggcttctctgttgatggtgtattgtcagaacacccaattactgcatcagaggcaattggttgttttactaaactgaattcaaataagactgatcatggagaacccttagttatctcacataatggtgctagtggagactacccggactgtacagacttggcctaccatagtgcaattgatgatggtgcagacatcattgactgtcctattcaagtgacaaatgatggagttcttatgtgcatgagttccactaacctgcttgacactacgaatgttcagagaacaacttacaactctctggtttctgtcgttccagatattcagcctcaaccaggaatcttcacattcaacctcacttggtccgacattaacagtaatgttttaaaacctaaaatatcttctccagtgagtggttatttccttgtaaggaacccaagatacacaaatcaagggaagtttttgaagttatctgactttctagcaatcgcaatggataaagacttgtctggtgtcatgatcattattgaggtgatactttcgctcaaacattgtattaaaaagaagacattctcacataggtcgagaaaacctccaaactcctgctccacttatacacagcggcatcattgcccatgtaaggacgaccgcaaccggggccggaccttagaccttagacttgtactttgacgtgggacagacgagggaacgatcacgaccgggagggccttagacctataatttggcatgagatagacgagtgaattttttaaccacaaaatttgctctcaaggggagtcgaactcaagacccgaggagtgatattcagaccgactaaccaactcagctagaggccctttcgcttcaaagaattggactttccacctgatttttgtctccctattatgactttatgatacctgcccattttgttcaaaaaagtatgactatgttacaagcaaaagttcacatgatagttaaccacttaacctctcaatatgttgatacataatctacatatctcttttttgaaagagctcatcatctggtttcatttttacattgacaagttatataatttgctgaacggttgtcatcttgatgagttctgctacagctactagtatagactattgcttgtataaacctctgcaaagattgtattctccccttgcacatttccaaatattccactcttttttctagaagtcaaatgttatcttaataaatggaaatctttcttaaatgatcaatcgatcttttgtactacagaatgctgcatttttagtaaattcattgggaattgacattgttgattctttaaccactgccttaagtgctgctggcttcgataatcatcctaccaaggaagttctgatcaagtcaaaagatagtgatgttcttgtcaaactgaagcagcagaaaacaaaatgcaagcttgtttacactctaccctctggcatcggggatgcttctaattcctcgttgaaagacattaagaagtttgctgaatatgtagctgtggacagcaaatctgtttttactctaagctctgacttcatcataagacagaacagtcttgtgcaagatctgcagtcagcggggctagctttgtatgcagaggtgttccagaatgagtttgtagcacaaccattggatttcttcggagatgaaactgtggaaatcaattactatattcaatcatttaatttatcaggcatcataactgatttcccgaagacagtcagaagatataaaagaaacacctgtacagttctgggaaaggatatgcccagctacatgcagcctcctcaggctggttcccttgcacagtttctacaaaccttcaaaacccagcctccatctctgccaccaatgtcgacgctgaattcttcaagcgtggaggagccacctcttcctactgttgcgttaagaagtgtatctgatggtagtgcctcgggggcgaccaagactcctggcacaccttctgatgctccaacggctacagtaaatgctggcatgctacttgtgatggttttcacagctttgctaatctgagaagccacatgagattgtatagtagacgactgaagctaatctgatctcccttggattcaggtcaagaacaggtaccacaggatgaggcgcttggaggatgctgcgatgtgttcatgagaggtctaggccgtcgtctcccagtcaactgtgggttgctggaccgttgtctccttataatataattatttattttgtatagaactcctattatatagtaaagttgtgacattcgatcatgtgccatgatttatcatatgtgtcagacttgctcccagcatacctggtgattatgttcgcgcccaggtcttggtgccccaaaacccgtgtgtgacataagaacactagacggagtagttacggttgttttaaggacctattgacttttgactcatcttatgcttgatgctgcttcaaaaacttgtcatttaaactgcttattttctatattcttgtctctgttgatttccttgctcaaagtttatgttatgcaaaatgcttt

SEQ ID NO: 67187 - DNA, 1680 bp, Zea Mays
ccagctttccctatgcgtgtcgagtcgtcgtttactcctctgcttatagcggcgcatgcttctgcgtaagagcaactccaacagtctctctaaactgatcagaatcggtaaaaaatagaaaagtctagataaaatcgcatccaacaggctcgctttctgcctatcttttctatccggctagttatccacgtcccttcgctaggcatctttggctagtgcatacgactcgtcattttccttcatagcgcccaaatgctctcccgccgtcgaggcaaattccagctcttgctcgtcctctgactcccgcgtgccctctcgctcccgtacgaccagaagtttgtgttgggtgtcagctctattcacaacgagctcgttcaaggagttaacacaatgttgtgttgggaacaaacgacgaagcaaagaatcaagcgccaccaaaaaataaacgacctgttcggccactctgctgggaacgaacgacgaaggaatcaagcgcaaacacaaaaatgaatgaccggcagagagaaacaatcatgcgcttaaaaggcgccgctccacttgtggtggccaaaggtggattttcaggagtgtttccagattctagccaaggcgcctattctttcgcgatgatcaccagcgcaccggacacggccatgtggtgcgacgtccaactaacaaaggatggtgttggagtctgccttcgggatataaatatgaaaaactgcaccagtgttgatcaagcctaccccgagagaaagcggacctatgtcatcgatggtgtgcggaaaactggatggtttgtttcagacttcaccattgctgagcttcagtctgtttctctaacacaagcaatttggcctcgcactaggagattcgatggcatctatcctatcatcagtattactgactttcggtcccttgtcatgccatctcctgtttggttgaatgtacagcatgacatcttctacaaacaacatggtttggacatgaggaactacatactttcgatcaaaaagggtgtatccatggattatatctcatcacctgaactgggcttcctcaaaaatatgtctggaagagttggtcgcaaaacaaagcttgtgtttagatttcttgaaaaggccctcttagatcattctataaatcaaacatatggttcactgtcgagtaacctaccatttattaaatctattgcatctggcataatagtccctaagagttacatttggccggtgacgaaggataactatctactgccatccacatcaattgtcacagaagcccacaatgcagggctggaaatatatgcctctgattttgccaatgatagaattatcccctataactacagctatgatccgttggcagaatacctgaactttatcaatgatggtggcttctctgttgatggtgtattgtcagaacacccaattactgcatcagaggcaattgattttcaagtctactaagtagaaggcacaatattacaaacctccattggaatttatcttctaacgtctcatgttgatattagattgttctgtctcttaatcccccatttagtcttatagtgttcactgtccaatgatgaaatattttattgttgtcgggcttaaaataagcttactgcattttaagatatgtccacggaaacatattgtgatgtttagttgtttttat

SEQ ID NO: 67188 - DNA, 2759 bp, Zea Mays
ccacgtcccttcgctaggcatctttggctagtgcatacgactcgtcattttccttcatagcgcccaaatgctctcccgccgtcgaggcaaattccagctcttgctcgtcctctgactcccgcgtgccctctcgctcccgtacgaccagaagtttgtgttgggtgtcagctctattcacaacgagctcgttcaaggagttaacacaatgttgtgttgggaacaaacgacgaagcaaagaatcaagcgccaccaaaaaataaacgacctgttcggccactctgctgggaacgaacgacgaaggaatcaagcgcaaacacaaaaatgaatgaccggcagagagaaacaatcatgcgcttaaaaggcgccgctccacttgtggtggccaaaggtggattttcaggagtgtttccagattctagccaaggcgcctattctttcgcgatgatcaccagcgcaccggacacggccatgtggtgcgacgtccaactaacaaaggatggtgttggagtctgccttcgggatataaatatgaaaaactgcaccagtgttgatcaagcctaccccgagagaaagcggacctatgtcatcgatggtgtgcggaaaactggatggtttgtttcagacttcaccattgctgagcttcagtctgtttctctaacacaagcaatttggcctcgcactaggagattcgatggcatctatcctatcatcagtattactgactttcggtcccttgtcatgccatctcctgtttggttgaatgtacagcatgacatcttctacaaacaacatggtttggacatgaggaactacatactttcgatcaaaaagggtgtatccatggattatatctcatcacctgaactgggcttcctcaaaaatatgtctggaagagttggtcgcaaaacaaagcttgtgtttagatttcttgaaaaggccctcttagatcattctataaatcaaacatatggttcactgtcgagtaacctaccatttattaaatctattgcatctggcataatagtccctaagagttacatttggccggtgacgaaggataactatctactgccatccacatcaattgtcacagaagcccacaatgcagggctggaaatatatgcctctgattttgccaatgatagaattatcccctataactacagctatgatccgttggcagaatacctgaactttatcaatgatggtggcttctctgttgatggtgtattgtcagaacacccaattactgcatcagaggcaattggttgttttactaaactgaattcaaataagactgatcatggagaacccttagttatctcacataatggtgctagtggagactacccggactgtacagacttggcctaccatagtgcaattgatgatggtgcagacatcattgactgtcctattcaagtgacaaatgatggagttcttatgtgcatgagttccactaacctgcttgacactacgaatgttcagagaacaacttacaactctctggtttctgtcgttccagatattcagcctcaaccaggaatcttcacattcaacctcacttggtccgacattaacagtaatgttttaaaacctaaaatatcttctccagtgagtggttatttccttgtaaggaacccaagatacacaaatcaagggaagtttttgaagttatctgactttctagcaatcgcaatggataaagacttgtctggtgtcatgatcattattgagaatgctgcatttttagtaaattcattgggaattgacattgttgattctttaaccactgccttaagtgctgctggcttcgataatcatcctaccaaggaagttctgatcaagtcaaaagatagtgatgttcttgtcaaactgaagcagcagaaaacaaaatgcaagcttgtttacactctaccctctggcatcggggatgcttctaattcctcgttgaaagacattaagaagtttgctgaatatgtagctgtggacagcaaatctgtttttactctaagctctgacttcatcataagacagaacagtcttgtgcaagatctgcagtcagcggggctagctttgtatgcagaggtgttccagaatgagtttgtagcacaaccattggatttcttcggagatgaaactgtggaaatcaattactatattcaatcatttaatttatcaggcatcataactgatttcccgaagacagtcagaagatataaaagaaacacctgtacagttctgggaaaggatatgcccagctacatgcagcctcctcaggctggttcccttgcacagtttctacaaaccttcaaaacccagcctccatctctgccaccaatgtcgacgctgaattcttcaagcgtggaggagccacctcttcctactgttgcgttaagaagtgtatctgatggtagtgcctcgggggcgaccaagactcctggcacaccttctgatgctccaacggctacagtaaatgctggcatgctacttgtgatggttttcacagctttgctaatctgagaagccacatgagattgtatagtagacgactgaagctaatctgatctcccttggattcaggtaagctttgactagtgatctggtactaccacacacttgttttcttatttccacctttacaaatttgtcagtagaaaatgttagagtatccatttagggtttggggtttaccccgtgtaattacccgcttacccctgtgtaataggccagaccgagctaacttagtctattaatac

SEQ ID NO: 67189 - DNA, 1659 bp, Zea Mays
gcaagccttccattaaagcgataagtaacacaagcaatttggcctcgcactaggagattcgatggcatctatcctatcatcagtattactgactttcggtcccttgtcatgccatctcctgtttggttgaatgtacagcatgacatcttctacaaacaacatggtttggacatgaggaactacatactttcgatcaaaaagggtgtatccatggattatatctcatcacctgaactgggcttcctcaaaaatatgtctggaagagttggtcgcaaaacaaagcttgtgtttagatttcttgaaaaggccctcttagatcattctataaatcaaacatatggttcactgtcgagtaacctaccatttattaaatctattgcatctggcataatagtccctaagagttacatttggccggtgacgaaggataactatctactgccatccacatcaattgtcacagaagcccacaatgcagggctggaaatatatgcctctgattttgccaatgatagaattatcccctataactacagctatgatccgttggcagaatacctgaactttatcaatgatggtggcttctctgttgatggtgtattgtcagaacacccaattactgcatcagaggcaattgaatgctgcatttttagtaaattcattgggaattgacattgttgattctttaaccactgccttaagtgctgctggcttcgataatcatcctaccaaggaagttctgatcaagtcaaaagatagtgatgttcttgtcaaactgaagcagcagaaaacaaaatgcaagcttgtttacactctaccctctggcatcggggatgcttctaattcctcgttgaaagacattaagaagtttgctgaatatgtagctgtggacagcaaatctgtttttactctaagctctgacttcatcataagacagaacagtcttgtgcaagatctgcagtcagcggggctagctttgtatgcagaggtgttccagaatgagtttgtagcacaaccattggatttcttcggagatgaaactgtggaaatcaattactatattcaatcatttaatttatcaggcatcataactgatttcccgaagacagtcagaagatataaaagaaacacctgtacagttctgggaaaggatatgcccagctacatgcagcctcctcaggctggttcccttgcacagtttctacaaaccttcaaaacccagcctccatctctgccaccaatgtcgacgctgaattcttcaagcgtggaggagccacctcttcctactgttgcgttaagaagtgtatctgatggtagtgcctcgggggcgaccaagactcctggcacaccttctgatgctccaacggctacagtaaatgctggcatgctacttgtgatggttttcacagctttgctaatctgagaagccacatgagattgtatagtagacgactgaagctaatctgatctcccttggattcaggtaagctttgactagtgatctggtactaccacacacttgttttcttatttccacctttacaaatttgtcagtagaaaatgttagagtatccatttagggtttggggtttaccccgtgtaattacccgcttacccctgtgtaataggccagaccgagctaacttagtctattaatac

SEQ ID NO: 67190 - DNA, 2693 bp, Zea Mays
gaacaagcgagcagagacaaagattttggtgttgccagaaaggtgtgtgcgtccatccccatgcatcgtgttcgtcgaccatgactgcatgccgtttgtggccgagcgattctcacgccatgattcctacgcccgtggctgccacagactggagctcatgtgcatgcaaataaaacaaacatgcaaactaaactacatttcgcagaaacgttcccgcgcaagcgccttcatcagaatgaccttctgcttcttgctctgcccggtgatacgattgtccccaagaaagaacagagtgcctgatgtgctcttgtccgcgtcgacgtcgccggcgtgatcactatcactgaacccgatgaggtgaccctcgttcttagtgaagtaatagtgttggggcgaaagcaaagacgctacccttcactcgatgccttcgtcgtctagctgctccaacgaagaccacgcccgagcggtctcccttcgttctctccattgcaagacgaaggcaagactccgacgaagtctgcaagtcccacgtcctcatcgcgctcggaggcccatgagggattcggcccattgtaatgggccccgcgcgtataagcgtgtaacgggcctcatctgtaatagccttttctgtaatgacgatctgtaacctccccatgtgggaatattctggggatagtccgggtacccgagggcataaatgtccttaccggaggacaatagacacttgggtacctataaataccctcgtacagtgcccttgagcggccagattaacagagatattgtcattccccgtcgaactttgcaaacactctctccactctcccgttggatacacttactcagaaaagcaagtaccaacaaatagtcgtagcctattgtgccgacaatgtagcgcaacaccttcttcacagcaactagatgctcggtggtgggcttctccaagaagaggagtattaggatatgtaaatcaggatcaattagacaggctagctgctatgtatagcacccaggaatagcttccttgtataggtgatagcctactatgtctgttctttccatgtatgcttgattggcatcttccatgtatgcctgattgacaccttccatgtatgcctgattggctatatatatgaaaggctccccacccacattgggtgtgtggtggttctctccttccctgcttattctacatggtatcagcttaaccgatccttccacccctccccaccgcacctctctgttgtgctgcccctctcacctaggtcaccatgtcgaccaactctgccaccagcttctcctcctcctccagcacctccagcagcatgggctccttccccgcccatgctgtcctcgttgctccctatgcaacagtcactgtcaagaaccacatccccgtgaccctggagctgcagaggcccaacttcaaccagtgggaaccgtttttcatagaaaatgattttttatgtgaaaataaatgctagaaacttgtatatatcatagaaaattcatattaaatccaaattgatccatttcaatttttataattttgtactattattgtttatcaaatagtgtctttgtgttgacatgaaaaccatattaaaattaatctactaatcaatcttgtacctagcacctagaacttttggaaattcataacttaaaatccataactccaaaattaatgattcatgtccttatgatcttattttaatatgtagattattaatatgtattttttcttatgtttggtgtgatgatgtttttgcctataccatgtttgtctgtattgctacgtttagcagtgaggacacgtgtcacctaaagagcaagttggtacctggaatctcaagtgcgaggaaagttgtgcccttgatcacttttttacccaatcataatggttcgcataggttaattttgatgggacccaataggtcaccctagtttgactatctttatgccttgtttaccactgaactttttgggtagtacttgctagtgctatatgtgaatttgggcattaagatacacattattcatacttttgttatcagttgttatttattgttcatgataagatcattatgttaattggaacatggagcgaccatccgggaaaacagtgccaccacaagggtagtatgggatgcccttggctgattaactagaaaatctagtggatgactaccttacccgaaaggggcaagggcagtaggggagtggtcagtgtatggagttccttgggttgattttgctgcgatggtggtcagacgagggatccctgcattggagcttcctataaattgtagcgggttttatgaagctagtggaactttgtaaaggccaggtagtgttaccctgcctcgcttccttagtagaggtgtatggggcccatacaaccccgtggcatatgggtaatatgacttgtgggtaaagatgcgcaacctctgcagagtgtaaaactggtatactagccgtgctcacggtcatgagcagctcggaccctcacatgattaatttatggaactaaatttaatttgtcatatgcattgcatcgcaggtgatgttgttacttttgttctactacttaattgagttggtatttacttatacttagtaactgctaataaaattttaaccaactttaaaagcaatgctcagcttcaaccatcctctttggtaagccttac

SEQ ID NO: 67191 - DNA, 2817 bp, Zea Mays
gttcggcctagtgtgtgctcggtcttcgcctagacatacataactgacttagttgttgtatatacgtttgtacgagtatgtacgatagactactgattagcaggtgctaaataaggctgcctagagtgcacggagagaaaagcagcgcctgcaagcatataaaatgagtggaacgacaaaagaggcccttttttgtctgacatataaaagttggtcctctttcttggagcctgcagacgaatggtgcagcggtgaaggcaggaggaggaggaggacataggaggggataggagccgccgcagacatggctggcggggtggccgttggggtcgtggcgctgttcttggctgcagcttcatttggggctaatgccaacaccgactcgaatgatgtgaatgccctcaatgtgttctacacaaccatgaattcgccgccgcagctgacgaactgggtgtcccaaaatggggatccctgtgggcagtcgtggctgggggtcacctgctcgggttccagagtgacagcaataaagttatctgggatgaggcttaacggcaccttgggctacaacatgaaccagctcactgcactagttcagctggatatgagcaataataatcttggaggcagtgacattccttataatcttcctccgaatctccagagctttaaataacttcactgggactgtaccttactccatctcccagatggttgcacttagggatttaaatcttgatcataatcagctctcgaacatcaacgatatgtttagtcagctcacaaatttaacaacgttggatctatcatacaacacattctctggtgatatcccacatagctttaactccttgacaagtttgaaaacactttaccttcagaacaacaaatttaacggcacaatagatgttctcactgatcttcctcttactgacttaaatgtcgaaaacaaccaactcaccggttggatacccgataaactaaagggaatcaataatctccagacaagtggaaactcgtttaacaatggccctgctccaccacctccaccatcaccattatcacctccatcgacaaatacccctcctccctctcggcagcatgctgttccaagtagcgctggtaaaaataccccatctgaaaatggtggaaaacactcgaaacttggtggtggtgcagtagcaggaatcataatatgtttgctggttgttagcgcaatagttgcattccttgtgatcaaaaggaaatcatggaggttatcacagggacaagaccctgaacaaaatgaacctctcagcccttttgcttcaggacttaaacagatgaaatcgatcaaatctatcaaaatcgtatcaacaatgggaaaagaagaattgcagaagactgtttcgatgagtttgaagcctccaacaaaaattgacctgcacaagtcctttgatgaaaatgataccactaacaaggccatctcaaggaatgtaagcttgtcttccatcacaatacctgcatacacagtggcagaccttcagatggcaacgggcagcttcagtcctgacagttttatcggtgagggatcggtaggccgtgtttacaaagccaaattcggtgatcagaaggtcatggctgtaaagaaaataaacttctctgtatttccaagccatccttcagatttgttcattgagttggttgcaaacatttcaatgttaaatcatccaaaccttgctgagcttgctggttactgttcagagcatggacaatgcttgctggcatatgaattctaccgaaacggttctcttcatgatttccttcatctgaaagatgaacacagcaagccattgtcttggaacaaccgtgtcaagattgcgcttggatctgcaagagcattagagtacctacatgagacttgttcaccctctgtggtccacaagaatttcaagtcatccaacattttattggatggtgagctgaccccccacctctctgattctgggtttgcaggccttcttgcaaaccaggaattccaggaatcggatgagaactcaggatacagggcacctgaggtgatcttggctggtcagtactccctgaagagcgacgtgtacagcttcggagtcgtcatgctagagcttctgactggccggaaaccgtttgacaggacccgaccgcggcctgagcagtcactggtccgatgggctactccgcagctgcacgacatcgacgcgctggaccagatggtcgaccccgcgctgcaagggctgtacccgtccaaatccctctcccgcttcgccgatgccatcgccctttgtgttcagcctgagccggagtttcggccgccgatgtcggaggtcgtgcagtcgctggtgcgcctggtgcagagggcgaacatgacgaggatgcacgagagccagtcgcggcgccacggcgaatccggcggggactacgagttttgagcgagacaaaactgtgcctttgcctagatttttttcttctaaaagtataaaaatagttataaactctccttgagagttttgaacttcaaatattcacatatagtttcaaactatattagataggtagtagttcagaataagtatttatctgaaataagtattggttcacatttgcctttgcgttgcaggcattttgttttgctaaagacacccccaaaacatttggaacgaacttggttgagatttcgatgtaaaggagggtaagtttgattagagtttgacctagccaaagctatccgaccatgacaccaaacattttacggaagataagaaaggatcacattttttaatttagggttattttttgcaaaag

SEQ ID NO: 67192 - DNA, 2568 bp, Zea Mays
ctgcctagagtgcacggagagaaaagcagcgcctgcaagcatataaaatgagtggaacgacaaaagaggcccttttttgtctgacatataaaagttggtcctctttcttggagcctgcagacgaatggtgcagcggtgaaggcaggaggaggaggaggacataggaggggataggagccgccgcagacatggctggcggggtggccgttggggtcgtggcgctgttcttggctgcagcttcatttggggctaatgccaacaccgactcgaatgatgtgaatgccctcaatgtgttctacacaaccatgaattcgccgccgcagctgacgaactgggtgtcccaaaatggggatccctgtgggcagtcgtggctgggggtcacctgctcgggttccagagtgacagcaataaagttatctgggatgaggcttaacggcaccttgggctacaacatgaaccagctcactgcactagttcagctggatatgagcaataataatcttggaggcagtgacattccttataatcttcctccgaatctccagagcttaaatcttgcagtaaataacttcactgggactgtaccttactccatctcccagatggttgcacttagggatttaaatcttgatcataatcagctctcgaacatcaacgatatgtttagtcagctcacaaatttaacaacgttggatctatcatacaacacattctctggtgatatcccacatagctttaactccttgacaagtttgaaaacactttaccttcagaacaacaaatttaacggcacaatagatgttctcactgatcttcctcttactgacttaaatgtcgaaaacaaccaactcaccggttggatacccgataaactaaagggaatcaataatctccagacaagtggaaactcgtttaacaatggccctgctccaccacctccaccatcaccattatcacctccatcgacaaatacccctcctccctctcggcagcatgctgttccaagtagcgctggtaaaaataccccatctgaaaatggtggaaaacactcgaaacttggtggtggtgcagtagcaggaatcataatatgtttgctggttgttagcgcaatagttgcattccttgtgatcaaaaggaaatcatggaggttatcacagggacaagaccctgaacaaaatgaacctctcagcccttttgcttcaggacttaaacagatgaaatcgatcaaatctatcaaaatcgtatcaacaatgggaaaagaagaattgcagaagactgtttcgatgagtttgaagcctccaacaaaaattgacctgcacaagtcctttgatgaaaatgataccactaacaaggccatctcaaggaatgtaagcttgtcttccatcacaatacctgcatacacagtggcagaccttcagatggcaacgggcagcttcagtcctgacagttttatcggtgagggatcggtaggccgtgtttacaaagccaaattcggtgatcagaaggtcatggctgtaaagaaaataaacttctctgtatttccaagccatccttcagatttgttcattgagttggttgcaaacatttcaatgttaaatcatccaaaccttgctgagcttgctggttactgttcagagcatggacaatgcttgctggcatatgaattctaccgaaacggttctcttcatgatttccttcatctgaaagatgaacacagcaagccattgtcttggaacaaccgtgtcaagattgcgcttggatctgcaagagcattagagtacctacatgagacttgttcaccctctgtggtccacaagaatttcaagtcatccaacattttattggatggtgagctgaccccccacctctctgattctgggtttgcaggccttcttgcaaaccaggaattccaggaatcggatgagaactcaggatacagggcacctgaggtgatcttggctggtcagtactccctgaagagcgacgtgtacagcttcggagtcgtcatgctagagcttctgactggccggaaaccgtttgacaggacccgaccgcggcctgagcagtcactggtccgatgggctactccgcagctgcacgacatcgacgcgctggaccagatggtcgaccccgcgctgcaagggctgtacccgtccaaatccctctcccgcttcgccgatgccatcgccctttgtgttcagcctgagccggagtttcggccgccgatgtcggaggtcgtgcagtcgctggtgcgcctggtgcagagggcgaacatgacgaggatgcacgagagccagtcgcggcgccacggcgaatccggcggggactacgagttttgagcgagacaaaactgtgcctttgcctagatttttttcttctaaaagcattttgttttgctaaagacacccccaaaacatttggaacgaacttggttgagatttcgatgtaaaggagggtaagtttgattagagtttgacctagccaaagctatccgaccatgacaccaaacattttacggaagataagaaaggatcacattttttaatttagggttattttttgcaaaag

SEQ ID NO: 67193 - DNA, 2661 bp, Zea Mays
cttttttgtctgacatataaaagttggtcctctttcttggagcctgcagacgaatggtgcagcggtgaaggcaggaggaggaggaggacataggaggggataggagccgccgcagacatggctggcggggtggccgttggggtcgtggcgctgttcttggctgcagcttcatttggggctaatgccaacaccgactcgaatgatgccttgttcttacatatgcagtgaatgccctcaatgtgttctacacaaccatgaattcgccgccgcagctgacgaactgggtgtcccaaaatggggatccctgtgggcagtcgtggctgggggtcacctgctcgggttccagagtgacagcaataaagttatctgggatgaggcttaacggcaccttgggctacaacatgaaccagctcactgcactagttcagctggatatgagcaataataatcttggaggcagtgacattccttataatcttcctccgaatctccagagcttaaatcttgcagtaaataacttcactgggactgtaccttactccatctcccagatggttgcacttagggatttaaatcttgatcataatcagctctcgaacatcaacgatatgtttagtcagctcacaaatttaacaacgttggatctatcatacaacacattctctggtgatatcccacatagctttaactccttgacaagtttgaaaacactttaccttcagaacaacaaatttaacggcacaatagatgttctcactgatcttcctcttactgacttaaatgtcgaaaacaaccaactcaccggttggatacccgataaactaaagggaatcaataatctccagacaagtggaaactcgtttaacaatggccctgctccaccacctccaccatcaccattatcacctccatcgacaaatacccctcctccctctcggcagcatgctgttccaagtagcgctggtaaaaataccccatctgaaaatggtggaaaacactcgaaacttggtggtggtgcagtagcaggaatcataatatgtttgctggttgttagcgcaatagttgcattccttgtgatcaaaaggaaatcatggaggttatcacagggacaagaccctgaacaaaatgaacctctcagcccttttgcttcaggacttaaacagatgaaatcgatcaaatctatcaaaatcgtatcaacaatgggaaaagaagaattgcagaagactgtttcgatgagtttgaagcctccaacaaaaattgacctgcacaagtcctttgatgaaaatgataccactaacaaggccatctcaaggaatgtaagcttgtcttccatcacaatacctgcatacacagtggcagaccttcagatggcaacgggcagcttcagtcctgacagttttatcggtgagggatcggtaggccgtgtttacaaagccaaattcggtgatcagaaggtcatggctgtaaagaaaataaacttctctgtatttccaagccatccttcagatttgttcattgagttggttgcaaacatttcaatgttaaatcatccaaaccttgctgagcttgctggttactgttcagagcatggacaatgcttgctggcatatgaattctaccgaaacggttctcttcatgatttccttcatctgaaagatgaacacagcaagccattgtcttggaacaaccgtgtcaagattgcgcttggatctgcaagagcattagagtacctacatgagacttgttcaccctctgtggtccacaagaatttcaagtcatccaacattttattggatggtgagctgaccccccacctctctgattctgggtttgcaggccttcttgcaaaccaggaattccaggaatcggatgagaactcaggatacagggcacctgaggtgatcttggctggtcagtactccctgaagagcgacgtgtacagcttcggagtcgtcatgctagagcttctgactggccggaaaccgtttgacaggacccgaccgcggcctgagcagtcactggtccgatgggctactccgcagctgcacgacatcgacgcgctggaccagatggtcgaccccgcgctgcaagggctgtacccgtccaaatccctctcccgcttcgccgatgccatcgccctttgtgttcagcctgagccggagtttcggccgccgatgtcggaggtcgtgcagtcgctggtgcgcctggtgcagagggcgaacatgacgaggatgcacgagagccagtcgcggcgccacggcgaatccggcggggactacgagttttgagcgagacaaaactgtgcctttgcctagatttttttcttctaaaagtataaaaatagttataaactctccttgagagttttgaacttcaaatattcacatatagtttcaaactatattagataggtagtagttcagaataagtatttatctgaaataagtattggttcacatttgcctttgcgttgcaggcattttgttttgctaaagacacccccaaaacatttggaacgaacttggttgagatttcgatgtaaaggagggtaagtttgattagagtttgacctagccaaagctatccgaccatgacaccaaacattttacggaagataagaaaggatcacattttttaatttagggttattttttgcaaaag

SEQ ID NO: 67194 - DNA, 2426 bp, Zea Mays
taaaagttggtcctctttcttggagcctgcagacgaatggtgcagcggtgaaggcaggaggaggaggaggacataggaggggataggagccgccgcagacatggctggcggggtggccgttggggtcgtggcgctgttcttggctgcagcttcatttggggctaatgccaacaccgactcgaatgatgtgaatgccctcaatgtgttctacacaaccatgaattcgccgccgcagctgacgaactgggtgtcccaaaatggggatccctgtgggcagtcgtggctgggggtcacctgctcgggttccagagtgacagcaataaagttatctgggatgaggcttaacggcaccttgggctacaacatgaaccagctcactgcactagttcagctggatatgagcaataataatcttggaggcagtgacattccttataatcttcctccgaatctccagagcttaaatcttgcagtaaataacttcactgggactgtaccttactccatctcccagatggttgcacttagggatttaaatcttgatcataatcagctctcgaacatcaacgatatgtttagtcagctcacaaatttaacaacgttggatctatcatacaacacattctctggtgatatcccacatagctttaactccttgacaagtttgaaaacactttaccttcagaacaacaaatttaacggcacaatagatgttctcactgatcttcctcttactgacttaaatgtcgaaaacaaccaactcaccggttggatacccgataaactaaagggaatcaataatctccagacaagtggaaactcgtttaacaatggccctgctccaccacctccaccatcaccattatcacctccatcgacaaatacccctcctccctctcggcagcatgctgttccaagtagcgctgagatgaaatcgatcaaatctatcaaaatcgtatcaacaatgggaaaagaagaattgcagaagactgtttcgatgagtttgaagcctccaacaaaaattgacctgcacaagtcctttgatgaaaatgataccactaacaaggccatctcaaggaatgtaagcttgtcttccatcacaatacctgcatacacagtggcagaccttcagatggcaacgggcagcttcagtcctgacagttttatcggtgagggatcggtaggccgtgtttacaaagccaaattcggtgatcagaaggtcatggctgtaaagaaaataaacttctctgtatttccaagccatccttcagatttgttcattgagttggttgcaaacatttcaatgttaaatcatccaaaccttgctgagcttgctggttactgttcagagcatggacaatgcttgctggcatatgaattctaccgaaacggttctcttcatgatttccttcatctgaaagatgaacacagcaagccattgtcttggaacaaccgtgtcaagattgcgcttggatctgcaagagcattagagtacctacatgagacttgttcaccctctgtggtccacaagaatttcaagtcatccaacattttattggatggtgagctgaccccccacctctctgattctgggtttgcaggccttcttgcaaaccaggaattccaggaatcggatgagaactcaggatacagggcacctgaggtgatcttggctggtcagtactccctgaagagcgacgtgtacagcttcggagtcgtcatgctagagcttctgactggccggaaaccgtttgacaggacccgaccgcggcctgagcagtcactggtccgatgggctactccgcagctgcacgacatcgacgcgctggaccagatggtcgaccccgcgctgcaagggctgtacccgtccaaatccctctcccgcttcgccgatgccatcgccctttgtgttcagcctgagccggagtttcggccgccgatgtcggaggtcgtgcagtcgctggtgcgcctggtgcagagggcgaacatgacgaggatgcacgagagccagtcgcggcgccacggcgaatccggcggggactacgagttttgagcgagacaaaactgtgcctttgcctagatttttttcttctaaaagtataaaaatagttataaactctccttgagagttttgaacttcaaatattcacatatagtttcaaactatattagataggtagtagttcagaataagtatttatctgaaataagtattggttcacatttgcctttgcgttgcaggcattttgttttgctaaagacacccccaaaacatttggaacgaacttggttgagatttcgatgtaaaggagggtaagtttgattagagtttgacctagccaaagctatccgaccatgacaccaaacattttacggaagataagaaaggatcacattttttaatttagggttattttttgcaaaag

SEQ ID NO: 67195 - DNA, 2500 bp, Zea Mays
agcaaagcatatgaaagaaataccggctgctgactggtttcttgaaatttcggttcagatacagtgaatgccctcaatgtgttctacacaaccatgaattcgccgccgcagctgacgaactgggtgtcccaaaatggggatccctgtgggcagtcgtggctgggggtcacctgctcgggttccagagtgacagcaataaagttatctgggatgaggcttaacggcaccttgggctacaacatgaaccagctcactgcactagttcagctggatatgagcaataataatcttggaggcagtgacattccttataatcttcctccgaatctccagagcttaaatcttgcagtaaataacttcactgggactgtaccttactccatctcccagatggttgcacttagggatttaaatcttgatcataatcagctctcgaacatcaacgatatgtttagtcagctcacaaatttaacaacgttggatctatcatacaacacattctctggtgatatcccacatagctttaactccttgacaagtttgaaaacactttaccttcagaacaacaaatttaacggcacaatagatgttctcactgatcttcctcttactgacttaaatgtcgaaaacaaccaactcaccggttggatacccgataaactaaagggaatcaataatctccagacaagtggaaactcgtttaacaatggccctgctccaccacctccaccatcaccattatcacctccatcgacaaatacccctcctccctctcggcagcatgctgttccaagtagcgctggtaaaaataccccatctgaaaatggtggaaaacactcgaaacttggtggtggtgcagtagcaggaatcataatatgtttgctggttgttagcgcaatagttgcattccttgtgatcaaaaggaaatcatggaggttatcacagggacaagaccctgaacaaaatgaacctctcagcccttttgcttcaggacttaaacagatgaaatcgatcaaatctatcaaaatcgtatcaacaatgggaaaagaagaattgcagaagactgtttcgatgagtttgaagcctccaacaaaaattgacctgcacaagtcctttgatgaaaatgataccactaacaaggccatctcaaggaatgtaagcttgtcttccatcacaatacctgcatacacagtggcagaccttcagatggcaacgggcagcttcagtcctgacagttttatcggtgagggatcggtaggccgtgtttacaaagccaaattcggtgatcagaaggtcatggctgtaaagaaaataaacttctctgtatttccaagccatccttcagatttgttcattgagttggttgcaaacatttcaatgttaaatcatccaaaccttgctgagcttgctggttactgttcagagcatggacaatgcttgctggcatatgaattctaccgaaacggttctcttcatgatttccttcatctgaaagatgaacacagcaagccattgtcttggaacaaccgtgtcaagattgcgcttggatctgcaagagcattagagtacctacatgagacttgttcaccctctgtggtccacaagaatttcaagtcatccaacattttattggatggtgagctgaccccccacctctctgattctgggtttgcaggccttcttgcaaaccaggaattccaggaatcggatgagaactcaggatacagggcacctgaggtgatcttggctggtcagtactccctgaagagcgacgtgtacagcttcggagtcgtcatgctagagcttctgactggccggaaaccgtttgacaggacccgaccgcggcctgagcagtcactggtccgatgggctactccgcagctgcacgacatcgacgcgctggaccagatggtcgaccccgcgctgcaagggctgtacccgtccaaatccctctcccgcttcgccgatgccatcgccctttgtgttcagcctgagccggagtttcggccgccgatgtcggaggtcgtgcagtcgctggtgcgcctggtgcagagggcgaacatgacgaggatgcacgagagccagtcgcggcgccacggcgaatccggcggggactacgagttttgagcgagacaaaactgtgcctttgcctagatttttttcttctaaaagtataaaaatagttataaactctccttgagagttttgaacttcaaatattcacatatagtttcaaactatattagataggtagtagttcagaataagtatttatctgaaataagtattggttcacatttgcctttgcgttgcaggcattttgttttgctaaagacacccccaaaacatttggaacgaacttggttgagatttcgatgtaaaggagggtaagtttgattagagtttgacctagccaaagctatccgaccatgacaccaaacattttacggaagataagaaaggatcacattttttaatttagggttattttttgcaaaag

SEQ ID NO: 67196 - DNA, 1554 bp, Zea Mays
ctcaaattatcaaatcggtgagtacaatgtgctgccgcgcttgtttgaactcgaaatatgcacatttacaattattattacagccagcggggcagcgatagaaacaacaaaacccataggatacaccaagaagaagcatagaacgttagaagcccccgtcacaccttggcccttgcatataacaacggcatatgcacctgtccagctgaagcacacgtcgaactcgtcgtcagaaaatggaagaaggcaacaacgaatcagccgagctcccccctggcacaaccgccagtgtccacaacaaggcgctgtcggggaccagggaggaggtggagcgcggccgcgaggcggcggtgcaggcgtggctggcgtccatgccgctcggcgaggagctggagcggctccgcaccgaactagccgcggccaagacccgcctcgccgcgacggcggccgagataccgctgctcaagtcgcggatcgagtccacgaacgccgcggtcgccacgaggcaggaggcggcggcgaggaagaaggccgccgcggaggacctccgcctgcgcgtcgacggggcgcgcgccgagctccggcggctgcgcgcggaggtcgcggcgtcgaggggcgccaaggacgcgctggagcggcgggtgctcgtccggcgccaggccgcgcgggcgcttcagctggcggagcgcgccatcgcggcggaggcccacgcgctggcgtggtccgcggccgcggccgccgagctggccgcgcgcgcgcgcggcgacggggaggaggacccccaccacgacgtcgtggcgctgccggcgcggaagctccaggagctgcgcaggctcgtggacgccgaggagcggaaggccgaggcgcgcgtcgaggaggccgaagcagcgcggcacgcggcgaaggcgcgaagagcggcggccttggcgaggctgaacgcagcgcgcgccaagaggcgagtggctgctgaagctgaagctgagcttcgtcgccgcgcggacggggacgacgcccgcggcacgcgggcaagcgcgctggcccggaggagccggagccggagcgggaggtcgtgcttcgcggtgaagaagctgcggaggttcctgggcaacctaaccaaggcttgagcgttgaggtggctgcgggcgttcagaagagttcttcctgagccgaattgtggttggagaaatagggaattgtgttgaggtcaaaggatgcatttattttggaggagatgctgaagcacatgaaggggtggctgcagaaatatcaactgaggcatgagtcaacatcggacattggcgtcatctgattttctggggttgttttctgtcagtcctgagcttgggttttagccagtttggaaatatgggttattgttgctgtctgctggagctgcttatgttcatcttgaaggagatgtccctgtttgtagtctggaagatgggtgttagagtggagtttgttttgtttttgtgcctgttgttgggcccatggagctgtgtgcaatgtgtgttggttcctattctgtagtgtttagttcatgtttgttttctg

SEQ ID NO: 67197 - DNA, 960 bp, Zea Mays
aagattttatgcttcgcaatagcggtttccgtatgttatctaaatttacattatttatcatgtttttttttggcgtatttttgtcacaactctagcataatttggcccggggcttcacttaatcctggttccgccactgcagcgcaacctcgatcgcgcacagaggcccattccgccgaggagtggcacgaggagagacgacaggtgcggggatggggtcagttttgctgccaacgctgcggctgaagagtgaggtcgacgccgccatccgcgacaccctcgataaggtcctcgttctccgatttggtcgcgccaccgacgccacttgcctccacctagatgacatcctggataaatcttcttgggacatatccaagtttgctatggtagcattagttgacatggactctgaggagattcaagtttacattgactactttgacattactttggttccagcaaccattttcttcttcaatgcccatcacatgaagatggattcagggacacctgaccacacaaaatggataggttcttttagcagcaaacaagactttatcgatgtagttgaggcaatattcagaggtgcgatgaaaggcaaactgatagtgtcttgcccccttcctcctgagaggataccaagattccagcttcttttcaaggatgtctgagaaaactgcagctcatcacgtgcacacaatcagctacctagcccaaggtttgtatttaatcacgttcatcaaatatgacgggtatagatttcttgtttggtgttaataccttgctactagtttatattgagttttggcattttacacaaactggacctggtgtgtgtgtgtgtgtgggtgggggttggggggcgtgcccccatggcattgcatttaagaagaagcattttacacaaactacagttagataattacttgtgaacattttttagttatatgagtatttaat

SEQ ID NO: 67198 - DNA, 900 bp, Zea Mays
aatttggcccggggcttcacttaatcctggttccgccactgcagcgcaacctcgatcgcgcacagaggcccattccgccgaggagtggcacgaggagagacgacaggtgcggggatggggtcagttttgctgccaacgctgcggctgaagagtgaggtcgacgccgccatccgcgacaccctcgataaggtcctcgttctccgatttggtcgcgccaccgacgccacttgcctccacctagatgacatcctggataaatcttcttgggacatatccaagtttgctatggtagcattagttgacatggactctgaggagattcaagtttacattgactactttgacattactttggttccagcaaccattttcttcttcaatgcccatcacatgaagatggattcagggacacctgaccacacaaaatggataggttcttttagcagcaaacaagactttatcgatgtagttgaggcaatattcagaggtgcgatgaaaggcaaactgatagtgtcttgcccccttcctcctgagaggataccaagattccagcttcttttcaaggatgtctgagaaaactgcagctcatcacgtgcacacaatcagctacctagcccaaggatctgagtggtgaggaaatatcaccatcttgtgtgtgtgtgtgtgtgggtgggtggatggagttcgtagctggagttgtcctgcgagattgaagcgaggtgttcctaggagccagaaggggcaccgcattggtttctgatgtacgcacactaacggtttctgaaatttgagctagtaatctgaatgaaatccaaaccgaataaccgatacagatttttgcttaccaccctaccttccgtggggaagaaatacagcagtctgtcagtcagtcaggaaaaa

SEQ ID NO: 67199 - DNA, 484 bp, Zea Mays
gtcaataataaggaagtaggctgtggaaggacacctgaccacacaaaatggataggttcttttagcagcaaacaagactttatcgatgtagttgaggcaatattcagaggtgcgatgaaaggcaaactgatagtgtcttgcccccttcctcctgagaggataccaagattccagcttcttttcaaggatgtctgagaaaactgcagctcatcacgtgcacacaatcagctacctagcccaaggtttgtatttaatcacgttcatcaaatatgacgggtatagatttcttgtttggtgttaataccttgctactagtttatattgagttttggcattttacacaaactggacctggtgtgtgtgtgtgtgtgggtgggggttggggggcgtgcccccatggcattgcatttaagaagaagcattttacacaaactacagttagataattacttgtgaacattttttagttatatgagtatttaat

SEQ ID NO: 67200 - DNA, 2180 bp, Zea Mays
atggatttctccggcggcggcggcggcggccgcagccgcgccgagccggcccggtggctcgagatcgcccggaagctactcgccgcgcgggacctggtcggctgcaagcgactggcggagcgcgcggttgaggctgacccgtacctccccggtgcggacgagctcctcgccgtcgccgacgtcctcctcgcctcccagcgcctgctcccctccggccgccccgatccggtcggcgtgctccagctccagcccgccccgggccttgaccccgccgccgccaagcgctccttccaccgcctctcgcagctcgtgtcttccccgcgtaatccccgtcccgccgcggacaccgctcttcatttcatccaagaagcctttgctgatctctccagcaacgcctccgctgatccacctcctgctcctgctcctgctgccgctcctgttcctgttcctgcccctgcccctgctgcccctcctgctcctgttcctgctcctgctgccgctccttctcttatcccagctcctgctcctgtttctggggacgccttggcctcggctgatggcaatgcgttctggacggtgtgcccctactgctgccatgtgtatcaataccagcgtgcgctggtggggcgcgcgctcaggtgccagagcgcgggttgccggcgagcgttcgaggccacagagatcccgaacgcgccgcctattgtgcccggcacagacatgtactactgcgcgtggggcttcttccccatgggtttccctaaggcagctgatttgagcaccaactggaggccattttgccccatgtttcctgggaattctgaatctccgctgcagccagcacctgcggtcactgtgaatgttgatgtacagaatcttgagaataatggcggcactgatgtacaaaatgttgagaataatggcattgacgacaattcaacgccagcaagtgtgcagcccccaggtaagagtggtgacattgaccgtgcagcaggtccatctagaggaaggatgaagaagacaacagcccgcaagaaagttggtgctgtatctaagaagcacagttccagtggcgtggacagtggcattgagccatctatgcttggggcagattcgttgaatgggaatgcaggaagtgggcagacagtgggtactagagagatcaacataaatgaggtggcaatgccaactgatagcgccacaatgcttaattttggcggggatgaggatatcaggtttgatttggatgttgatgcgactgatgctatattggggaatttgcacaacttaccattcttgagggaggatggcaataacagaaggatgttttagttgtcacaatgtgctcagtgtaggtgttcgtagaagtgttagctagtctgctgtaccatctgggtcaataatcttcacaaatctgcagagtaaagtaccccaaattagttggggacatgtaatatgtgccacccgtgattaacataaggaggtaaatggggtgaatggaataacgcactcgacatggatgattgatgaagcttttagttttataagggttacagtgcaacagaggtcatatggagcactagcagataaatgccatttacaataatgtctcgatcaaaaactctacgcatttcttgccatcagttgattgccttcactagtcatcgaaggagctgaataagagaagtggtatggacgtgtgcctcagtttaggggccatccgtggcttgtagcctataattctttctttgttgtttgtcatatgccaagctattgatttcctcgcctgagctaatttttagtcaaacaccccctaaatggaatttgtctgtgcccaattttccatcgtaagcggaaaatagtaactgtggttggcagctagaatatttatttgtcaaccgtgttactgtagctcctggaagcattgccttcgtagtcatcacgagctccaatgctccatgacctcaaactgtactttgtatattggtatgaatttcaactacagcagcaaggatataaacaagaaaaaaagctccgaattccatatgtgaatgtttcgaatctaaaaaacataccatggaaccatagaaacaggagacacaaagtacaggttattgcaaatctatttgataaaatgcggcagggaatgccgaagagtttgcgttcatccttagagcctgttt

SEQ ID NO: 67201 - DNA, 3948 bp, Zea Mays
ccgtcgatctctcaagctgccaccgctccctgctcccttgactcctccctcactctcctcatggctacgtagcaagtgcgtgcgatgggcgggcgccgggggtggggattgcatcgcggggcgagcgcaggggcatcattcgtggggacgggcgcgggggcacgacgcgggggcaggcggggacacggtcgtgtgtttctcggcgacgggcgggggctggttttaggggaggggaggcgtcgttcgcggcggtcgggcgggtcgtggcgtttgcggcgggcgggcgggcgggcgggcaggcaggcgtagggaggcgggagcggtctacaccattctcttaatagttagtatatagagatttttaactagcatccaacattcaatgtcatatgtgctaaaatttagcattggaaatgaacgggcctgtaccagcgacgaagcgacaatcctacccgttccttggttcgtctgcatccatcgcggccctacgttcctttgcagcctttacccacggcccagcctctgtcgccgttttcgagcgaggcaccggcggccgcatagaaactcagcttccgtctctaaaccctcaaccctagcccgtcatgtggcgccgtctccccacccgccgcctcgcctccgccctcctctcctcctccccactccagcgcgccaccgccacgcacgctcctcctctcgagcgccacttccccactacggcctccggtctccttccgccgtcactcttgcccccgtggcagcaggagccgcgatggttctcatcctccgccgccgcggaggctgtgtcctcggaggatgccgaggagctgcaccacgcgatagaggagatcgtccgggcgcagccgagtccgaatctgcctcaacctcaggcggtggcagaggagcatcaggcacccgggcgggaccaccgtagccggcataggagaagtgggcgcgggcggcatgcggaagtgttggcggcggagcacgggatgacataccacaggtacacctcccttcgccggcgacaaatccgcatcgagacggaggcgtgggagcaggccgccaacgagtaccgtgagcttctcgcggacatgtgcgagcagaagctcgcccctaacctaccctacgtcaagtcgctctttcttggctggttcgagccgttgcgggatcagatcgccactgagcaagaacttgtggcagaccccgggtcccgggcctcgcacggtccatttttcagtatgctccctgcggacatgatggctgtcatcaccatgcacaagctcatggggttgctcatgacgggcagtggggacggcagtgttcgagtcatccaggccgcgtgccagattggcgaggcaattgaacacgaggttcgaattaacagatttctggagaagacaaggaagaaaaacaacaaagagatggaaaatgaagaagaagctggtgacacaaacattgctatagaacaacagcgtctaagaaagaaagtcaccgacctaatgaaaaagcaaaagttacggcaagtcaggaacatagtgaagaatcaagataaatccaggccgtggggtcaagatgctcatgcaaaacacatatacaaccaccagcaagccaatcatcagatggtctgcctgacatccgtcctgctttcagacatgaaatgagaacaatggtgaaagaacagcagaagagtagtcgcagatatggtgtgatcaagtgtgatccactggtccggcaaggcttggatagaacagcaaagcacatggtcattccgtacatgcctatgttgattcccccaatctgttggacaggatatgacaaaggagcacacctctttttaccatcatatgtaatgcgcacccatggtgctcggcaacagagggacgctgttaaaagagctccaagggaacagatgcaatttgtttttgaggccttgaatactcttgggagcacgaagtggagggttaacaaaagagttcttagcattgttgacagaatctggtcaaatggtggccggcttgctgacttggttgatcgtactgatgttcctgtaccggagaagcctgacactgaagatgaaaccttgctaaagaactggaaatggcacttgagggcagccaagaagaagaacagtgaaaggcattctcagagatgtgatgttgaactcaaacttgctgttgctagaaaaatgaaggatgaagagggattttactatccacacaaccttgattttagaggtcgggcttatccaatgcacccttatctgaaccatttgggttcagatctttgtcgaggggttctagagtttgctgaaggtcggccacttggcaagtcaggattgcgttggctgaagatacaccttgcaaatttgtatgctgctggtgttgataagttgtcatatgatggccggattgcatttgctgagaatcatttggaggaaatatttgattctgctgataggcctttagaaggcagacgatggtggcttggggctgaagatccattccagtgcctggcagtatgcatgaatctcactgaagctttaagaagctcgtctccagaaacaacaatctcacatattcctgtgcaccaggatggctcttgtaatggtctgcaacactatgcggcacttggaaaggataagttgggagccattgctgttaacttagtcgctggagaaaagcctgcagatgtttacaccggaatagctaacagggtgatggaaattatgaggatggatgcacaaaaagatccttctgtagaacctgatgcagctcgtgctcgtctgatagttgaccaggtggacagaaaattggtgaagcaaactgtgatgacatctgtgtatggtgtcacatatattggagcacgtgaacaaataagaagaagactaaaggagaggggggtcattcctaatgactccgaactgtttggtgcatcatgctatgctgctaaggttactcttacagcacttggtgagatgtttcaagctgcccgtagtatcatgaactggcttggtgactgtgccaaggtaattgcttgtgaaaatgaaccagtgagatggacgactcctcttgggctcccagttgtacaaccatatcgcaaacttgggaggcatcttattaaaacgtcattgcaggttttgacccttcagcgggagacggataaggttatggtgaagcggcagaggacagctttccctccaaactttgtgcattctcttgatggttctcatatgatgatgactgctgttgcttgcaaaaggcaaggtctgaattttgcaggagttcatgattcatattggacccatgccagtgatgttgatacaatgaataaaatactccgggaaaagtttgtggaactctatgatacacctattctggaaaatctgttggagagctttgagaaatctttccctaaattaaaattcccaccgttgccggagaggggagacttcgatatgaaggaagtccttgagtctacgtattttttcaactagcacaatcaatgttaacagttgcattatacacgctgctgcccggacatatctgagttctgagtgtagatctaccaactcgaatgatgaaagctaggtcatacatgagcataacccgaagagtggctttgcagaagttatcagaagctaagttggtactctgagcattcacaaatgcatcggcatcatttatcgcgttgaagttggcaatgaggtttgctaaataaaagtgggaaccatatcaaagttaaacgagaatccctgtaaatgtaattatgtaatttttttttgtctttagtgtttttattttccttgatcttggtactgtcgagagaaattcggctgaccggtagtttgtcggctggtgctgagtagagattatttcatactttgtagtttaacaatataatttagtaataaagtgatatactagtatttttctcgttgttttagctctg

SEQ ID NO: 67202 - DNA, 3971 bp, Zea Mays
ccgtcgatctctcaagctgccaccgctccctgctcccttgactcctccctcactctcctcatggctacgtagcaagtgcgtgcgatgggcgggcgccgggggtggggattgcatcgcggggcgagcgcaggggcatcattcgtggggacgggcgcgggggcacgacgcgggggcaggcggggacacggtcgtgtgtttctcggcgacgggcgggggctggttttaggggaggggaggcgtcgttcgcggcggtcgggcgggtcgtggcgtttgcggcgggcgggcgggcgggcgggcaggcaggcgtagggaggcgggagcggtctacaccattctcttaatagttagtatatagagatttttaactagcatccaacattcaatgtcatatgtgctaaaatttagcattggaaatgaacgggcctgtaccagcgacgaagcgacaatcctacccgttccttggttcgtctgcatccatcgcggccctacgttcctttgcagcctttacccacggcccagcctctgtcgccgttttcgagcgaggcaccggcggccgcatagaaactcagcttccgtctctaaaccctcaaccctagcccgtcatgtggcgccgtctccccacccgccgcctcgcctccgccctcctctcctcctccccactccagcgcgccaccgccacgcacgctcctcctctcgagcgccacttccccactacggcctccggtctccttccgccgtcactcttgcccccgtggcagcaggagccgcgatggttctcatcctccgccgccgcggaggctgtgtcctcggaggatgccgaggagctgcaccacgcgatagaggagatcgtccgggcgcagccgagtccgaatctgcctcaacctcaggcggtggcagaggagcatcaggcacccgggcgggaccaccgtagccggcataggagaagtgggcgcgggcggcatgcggaagtgttggcggcggagcacgggatgacataccacaggtacacctcccttcgccggcgacaaatccgcatcgagacggaggcgtgggagcaggccgccaacgagtaccgtgagcttctcgcggacatgtgcgagcagaagctcgcccctaacctaccctacgtcaagtcgctctttcttggctggttcgagccgttgcgggatcagatcgccactgagcaagaacttgtggcagaccccgggtcccgggcctcgcacggtccatttttcagtatgctccctgcggacatgatggctgtcatcaccatgcacaagctcatggggttgctcatgacgggcagtggggacggcagtgttcgagtcatccaggccgcgtgccagattggcgaggcaattgaacacgaggttcgaattaacagatttctggagaagacaaggaagaaaaacaacaaagagatggaaaatgaagaagaagctggtgacacaaacattgctatagaacaacagcgtctaagaaagaaagtcaccgacctaatgaaaaagcaaaagttacggcaagtcaggaacatagtgaagaatcaagataaatccaggccgtggggtcaagatgctcatgcaaaagtcggtagtcgtttgattgatctttttattggaacagcacatatacaaccaccagcaagccaatcatcagatggtctgcctgacatccgtcctgctttcagacatgaaatgagaacaatggaagagtagtcgcagatatggtgtgatcaagtgtgatccactggtccggcaaggcttggatagaacagcaaagcacatggtcattccgtacatgcctatgttgattcccccaatctgttggacaggatatgacaaaggagcacacctctttttaccatcatatgtaatgcgcacccatggtgctcggcaacagagggacgctgttaaaagagctccaagggaacagatgcaatttgtttttgaggccttgaatactcttgggagcacgaagtggagggttaacaaaagagttcttagcattgttgacagaatctggtcaaatggtggccggcttgctgacttggttgatcgtactgatgttcctgtaccggagaagcctgacactgaagatgaaaccttgctaaagaactggaaatggcacttgagggcagccaagaagaagaacagtgaaaggcattctcagagatgtgatgttgaactcaaacttgctgttgctagaaaaatgaaggatgaagagggattttactatccacacaaccttgattttagaggtcgggcttatccaatgcacccttatctgaaccatttgggttcagatctttgtcgaggggttctagagtttgctgaaggtcggccacttggcaagtcaggattgcgttggctgaagatacaccttgcaaatttgtatgctgctggtgttgataagttgtcatatgatggccggattgcatttgctgagaatcatttggaggaaatatttgattctgctgataggcctttagaaggcagacgatggtggcttggggctgaagatccattccagtgcctggcagtatgcatgaatctcactgaagctttaagaagctcgtctccagaaacaacaatctcacatattcctgtgcaccaggatggctcttgtaatggtctgcaacactatgcggcacttggaaaggataagttgggagccattgctgttaacttagtcgctggagaaaagcctgcagatgtttacaccggaatagctaacagggtgatggaaattatgaggatggatgcacaaaaagatccttctgtagaacctgatgcagctcgtgctcgtctgatagttgaccaggtggacagaaaattggtgaagcaaactgtgatgacatctgtgtatggtgtcacatatattggagcacgtgaacaaataagaagaagactaaaggagaggggggtcattcctaatgactccgaactgtttggtgcatcatgctatgctgctaaggttactcttacagcacttggtgagatgtttcaagctgcccgtagtatcatgaactggcttggtgactgtgccaaggtaattgcttgtgaaaatgaaccagtgagatggacgactcctcttgggctcccagttgtacaaccatatcgcaaacttgggaggcatcttattaaaacgtcattgcaggttttgacccttcagcgggagacggataaggttatggtgaagcggcagaggacagctttccctccaaactttgtgcattctcttgatggttctcatatgatgatgactgctgttgcttgcaaaaggcaaggtctgaattttgcaggagttcatgattcatattggacccatgccagtgatgttgatacaatgaataaaatactccgggaaaagtttgtggaactctatgatacacctattctggaaaatctgttggagagctttgagaaatctttccctaaattaaaattcccaccgttgccggagaggggagacttcgatatgaaggaagtccttgagtctacgtattttttcaactagcacaatcaatgttaacagttgcattatacacgctgctgcccggacatatctgagttctgagtgtagatctaccaactcgaatgatgaaagctaggtcatacatgagcataacccgaagagtggctttgcagaagttatcagaagctaagttggtactctgagcattcacaaatgcatcggcatcatttatcgcgttgaagttggcaatgaggtttgctaaataaaagtgggaaccatatcaaagttaaacgagaatccctgtaaatgtaattatgtaatttttttttgtctttagtgtttttattttccttgatcttggtactgtcgagagaaattcggctgaccggtagtttgtcggctggtgctgagtagagattatttcatactttgtagtttaacaatataatttagtaataaagtgatatactagtatttttctcgttgttttagctctg

SEQ ID NO: 67203 - DNA, 3796 bp, Zea Mays
ccgtcgatctctcaagctgccaccgctccctgctcccttgactcctccctcactctcctcatggctacgtagcaagtgcgtgcgatgggcgggcgccgggggtggggattgcatcgcggggcgagcgcaggggcatcattcgtggggacgggcgcgggggcacgacgcgggggcaggcggggacacggtcgtgtgtttctcggcgacgggcgggggctggttttaggggaggggaggcgtcgttcgcggcggtcgggcgggtcgtggcgtttgcggcgggcgggcgggcgggcgggcaggcaggcgtagggaggcgggagcggtctacaccattctcttaatagttagtatatagagatttttaactagcatccaacattcaatgtcatatgtgctaaaatttagcattggaaatgaacgggcctgtaccagcgacgaagcgacaatcctacccgttccttggttcgtctgcatccatcgcggccctacgttcctttgcagcctttacccacggcccagcctctgtcgccgttttcgagcgaggcaccggcggccgcatagaaactcagcttccgtctctaaaccctcaaccctagcccgtcatgtggcgccgtctccccacccgccgcctcgcctccgccctcctctcctcctccccactccagcgcgccaccgccacgcacgctcctcctctcgagcgccacttccccactacggcctccggtctccttccgccgtcactcttgcccccgtggcagcaggagccgcgatggttctcatcctccgccgccgcggaggctgtgtcctcggaggatgccgaggagctgcaccacgcgatagaggagatcgtccgggcgcagccgagtccgaatctgcctcaacctcaggcggtggcagaggagcatcaggcacccgggcgggaccaccgtagccggcataggagaagtgggcgcgggcggcatgcggaagtgttggcggcggagcacgggatgacataccacaggtacacctcccttcgccggcgacaaatccgcatcgagacggaggcgtgggagcaggccgccaacgagtaccgtgagcttctcgcggacatgtgcgagcagaagctcgcccctaacctaccctacgtcaagtcgctctttcttggctggttcgagccgttgcgggatcagatcgccactgagcaagaacttgtggcagaccccgggtcccgggcctcgcacggtccatttttcagtatgctccctgcggacatgatggctgtcatcaccatgcacaagctcatggggttgctcatgacgggcagtggggacggcagtgttcgagtcatccaggccgcgtgccagattggcgaggcaattgaacacgaggttcgaattaacagatttctggagaagacaaggaagaaaaacaacaaagagatggaaaatgaagaagaagctggtgacacaaacattgctatagaacaacagcgtctaagaaagaaagtcaccgacctaatgaaaaagcaaaagttacggcaagtcaggaacatagtgaagaatcaagataaatccaggccgtggggtcaagatgctcatgcaaaagtcggtagtcgtttgattgatctttttattggaacagcacatatacaaccaccagcaagccaatcatcagatggtctgcctgacatccgtcctgctttcagacatgaaatgagaacaatggtgaaagaacagcagaagagtagtcgcagatatggtgtgatcaagtgtgatccactggtccggcaaggcttggatagaacagcaaagcacatggtcattccgtacatgcctatgttgattcccccaatctgttggacaggatatgacaaaggagcacacctctttttaccatcatatgtaatgcgcacccatggtgctcggcaacagagggacgctgttaaaagagctccaagggaacagatgcaatttgtttttgaggccttgaatactcttgggagcacgaagtggagggttaacaaaagagttcttagcattgttgacagaatctggtcaaatggtggccggcttgctgacttggttgatcgtactgatgttcctgtaccggagaagcctgacactgaagatgaaaccttgctaaagaactggaaatggcacttgagggcagccaagaagaagaacagtgaaaggcattctcagagatgtgatgttgaactcaaacttgctgttgctagaaaaatgaaggatgaagagggattttactatccacacaaccttgattttagaggattgcgttggctgaagatacaccttgcaaatttgcctttagaaggcagacgatggtggcttggggctgaagatccattccagtgcctggcagtatgcatgaatctcactgaagctttaagaagctcgtctccagaaacaacaatctcacatattcctgtgcaccaggatggctcttgtaatggtctgcaacactatgcggcacttggaaaggataagttgggagccattgctgttaacttagtcgctggagaaaagcctgcagatgtttacaccggaatagctaacagggtgatggaaattatgaggatggatgcacaaaaagatccttctgtagaacctgatgcagctcgtgctcgtctgatagttgaccaggtggacagaaaattggtgaagcaaactgtgatgacatctgtgtatggtgtcacatatattggagcacgtgaacaaataagaagaagactaaaggagaggggggtcattcctaatgactccgaactgtttggtgcatcatgctatgctgctaaggttactcttacagcacttggtgagatgtttcaagctgcccgtagtatcatgaactggcttggtgactgtgccaaggtaattgcttgtgaaaatgaaccagtgagatggacgactcctcttgggctcccagttgtacaaccatatcgcaaacttgggaggcatcttattaaaacgtcattgcaggttttgacccttcagcgggagacggataaggttatggtgaagcggcagaggacagctttccctccaaactttgtgcattctcttgatggttctcatatgatgatgactgctgttgcttgcaaaaggcaaggtctgaattttgcaggagttcatgattcatattggacccatgccagtgatgttgatacaatgaataaaatactccgggaaaagtttgtggaactctatgatacacctattctggaaaatctgttggagagctttgagaaatctttccctaaattaaaattcccaccgttgccggagaggggagacttcgatatgaaggaagtccttgagtctacgtattttttcaactagcacaatcaatgttaacagttgcattatacacgctgctgcccggacatatctgagttctgagtgtagatctaccaactcgaatgatgaaagctaggtcatacatgagcataacccgaagagtggctttgcagaagttatcagaagctaagttggtactctgagcattcacaaatgcatcggcatcatttatcgcgttgaagttggcaatgaggtttgctaaataaaagtgggaaccatatcaaagttaaacgagaatccctgtaaatgtaattatgtaatttttttttgtctttagtgtttttattttccttgatcttggtactgtcgagagaaattcggctgaccggtagtttgtcggctggtgctgagtagagattatttcatactttgtagtttaacaatataatttagtaataaagtgatatactagtatttttctcgttgttttagctctg

SEQ ID NO: 67204 - DNA, 3631 bp, Zea Mays
ccgtcgatctctcaagctgccaccgctccctgctcccttgactcctccctcactctcctcatggctacgtagcaagtgcgtgcgatgggcgggcgccgggggtggggattgcatcgcggggcgagcgcaggggcatcattcgtggggacgggcgcgggggcacgacgcgggggcaggcggggacacggtcgtgtgtttctcggcgacgggcgggggctggttttaggggaggggaggcgtcgttcgcggcggtcgggcgggtcgtggcgtttgcggcgggcgggcgggcgggcgggcaggcaggcgtagggaggcgggagcggtctacaccattctcttaatagttagtatatagagatttttaactagcatccaacattcaatgtcatatgtgctaaaatttagcattggaaatgaacgggcctgtaccagcgacgaagcgacaatcctacccgttccttggttcgtctgcatccatcgcggccctacgttcctttgcagcctttacccacggcccagcctctgtcgccgttttcgagcgaggcaccggcggccgcatagaaactcagcttccgtctctaaaccctcaaccctagcccgtcatgtggcgccgtctccccacccgccgcctcgcctccgccctcctctcctcctccccactccagcgcgccaccgccacgcacgctcctcctctcgagcgccacttccccactacggcctccggtctccttccgccgtcactcttgcccccgtggcagcaggagccgcgatggttctcatcctccgccgccgcggaggctgtgtcctcggaggatgccgaggagctgcaccacgcgatagaggagatcgtccgggcgcagccgagtccgaatctgcctcaacctcaggcggtggcagaggagcatcaggcacccgggcgggaccaccgtagccggcataggagaagtgggcgcgggcggcatgcggaagtgttggcggcggagcacgggatgacataccacaggttcgaattaacagatttctggagaagacaaggaagaaaaacaacaaagagatggaaaatgaagaagaagctggtgacacaaacattgctatagaacaacagcgtctaagaaagaaagtcaccgacctaatgaaaaagcaaaagttacggcaagtcaggaacatagtgaagaatcaagataaatccaggccgtggggtcaagatgctcatgcaaaagtctgaatcctatgtcggtagtcgtttgattgatctttttattggaacagcacatatacaaccaccagcaagccaatcatcagatggtctgcctgacatccgtcctgctttcagacatgaaatgagaacaatggtgaaagaacagcagaagagtagtcgcagatatggtgtgatcaagtgtgatccactggtccggcaaggcttggatagaacagcaaagcacatggtcattccgtacatgcctatgttgattcccccaatctgttggacaggatatgacaaaggagcacacctctttttaccatcatatgtaatgcgcacccatggtgctcggcaacagagggacgctgttaaaagagctccaagggaacagatgcaatttgtttttgaggccttgaatactcttgggagcacgaagtggagggttaacaaaagagttcttagcattgttgacagaatctggtcaaatggtggccggcttgctgacttggttgatcgtactgatgttcctgtaccggagaagcctgacactgaagatgaaaccttgctaaagaactggaaatggcacttgagggcagccaagaagaagaacagtgaaaggcattctcagagatgtgatgttgaactcaaacttgctgttgctagaaaaatgaaggatgaagagggattttactatccacacaaccttgattttagaggtcgggcttatccaatgcacccttatctgaaccatttgggttcagatctttgtcgaggggttctagagtttgctgaaggtcggccacttggcaagtcaggattgcgttggctgaagatacaccttgcaaatttgtatgctgctggtgttgataagttgtcatatgatggccggattgcatttgctgagaatcatttggaggaaatatttgattctgctgataggcctttagaaggcagacgatggtggcttggggctgaagatccattccagtgcctggcagtatgcatgaatctcactgaagctttaagaagctcgtctccagaaacaacaatctcacatattcctgtgcaccaggatggctcttgtaatggtctgcaacactatgcggcacttggaaaggataagttgggagccattgctgttaacttagtcgctggagaaaagcctgcagatgtttacaccggaatagctaacagggtgatggaaattatgaggatggatgcacaaaaagatccttctgtagaacctgatgcagctcgtgctcgtctgatagttgaccaggtggacagaaaattggtgaagcaaactgtgatgacatctgtgtatggtgtcacatatattggagcacgtgaacaaataagaagaagactaaaggagaggggggtcattcctaatgactccgaactgtttggtgcatcatgctatgctgctaaggttactcttacagcacttggtgagatgtttcaagctgcccgtagtatcatgaactggcttggtgactgtgccaaggtaattgcttgtgaaaatgaaccagtgagatggacgactcctcttgggctcccagttgtacaaccatatcgcaaacttgggaggcatcttattaaaacgtcattgcaggttttgacccttcagcgggagacggataaggttatggtgaagcggcagaggacagctttccctccaaactttgtgcattctcttgatggttctcatatgatgatgactgctgttgcttgcaaaaggcaaggtctgaattttgcaggagttcatgattcatattggacccatgccagtgatgttgatacaatgaataaaatactccgggaaaagtttgtggaactctatgatacacctattctggaaaatctgttggagagctttgagaaatctttccctaaattaaaattcccaccgttgccggagaggggagacttcgatatgaaggaagtccttgagtctacgtattttttcaactagcacaatcaatgttaacagttgcattatacacgctgctgcccggacatatctgagttctgagtgtagatctaccaactcgaatgatgaaagctaggtcatacatgagcataacccgaagagtggctttgcagaagttatcagaagctaagttggtactctgagcattcacaaatgcatcggcatcatttatcgcgttgaagttggcaatgaggtttgctaaataaaagtgggaaccatatcaaagttaaacgagaatccctgtaaatgtaattatgtaatttttttttgtctttagtgtttttattttccttgatcttggtactgtcgagagaaattcggctgaccggtagtttgtcggctggtgctgagtagagattatttcatactttgtagtttaacaatataatttagtaataaagtgatatactagtatttttctcgttgttttagctctg

SEQ ID NO: 67205 - DNA, 2375 bp, Zea Mays
gtctgaatcctatcacatatacaaccaccagcaagccaatcatcagatggtctgcctgacatccgtcctgctttcagacatgaaatgagaacaatggtgaaagaacagcagaagagtagtcgcagatatggtgtgatcaagtgtgatccactggtccggcaaggcttggatagaacagcaaagcacatggtcattccgtacatgcctatgttgattcccccaatctgttggacaggatatgacaaaggagcacacctctttttaccatcatatgtaatgcgcacccatggtgctcggcaacagagggacgctgttaaaagagctccaagggaacagatgcaatttgtttttgaggccttgaatactcttgggagcacgaagtggagggttaacaaaagagttcttagcattgttgacagaatctggtcaaatggtggccggcttgctgacttggttgatcgtactgatgttcctgtaccggagaagcctgacactgaagatgaaaccttgctaaagaactggaaatggcacttgagggcagccaagaagaagaacagtgaaaggcattctcagagatgtgatgttgaactcaaacttgctgttgctagaaaaatgaaggatgaagagggattttactatccacacaaccttgattttagaggtcgggcttatccaatgcacccttatctgaaccatttgggttcagatctttgtcgaggggttctagagtttgctgaaggtcggccacttggcaagtcaggattgcgttggctgaagatacaccttgcaaatttgtatgctgctggtgttgataagttgtcatatgatggccggattgcatttgctgagaatcatttggaggaaatatttgattctgctgataggcctttagaaggcagacgatggtggcttggggctgaagatccattccagtgcctggcagtatgcatgaatctcactgaagctttaagaagctcgtctccagaaacaacaatctcacatattcctgtgcaccaggatggctcttgtaatggtctgcaacactatgcggcacttggaaaggataagttgggagccattgctgttaacttagtcgctggagaaaagcctgcagatgtttacaccggaatagctaacagggtgatggaaattatgaggatggatgcacaaaaagatccttctgtagaacctgatgcagctcgtgctcgtctgatagttgaccaggtggacagaaaattggtgaagcaaactgtgatgacatctgtgtatggtgtcacatatattggagcacgtgaacaaataagaagaagactaaaggagaggggggtcattcctaatgactccgaactgtttggtgcatcatgctatgctgctaaggttactcttacagcacttggtgagatgtttcaagctgcccgtagtatcatgaactggcttggtgactgtgccaaggtaattgcttgtgaaaatgaaccagtgagatggacgactcctcttgggctcccagttgtacaaccatatcgcaaacttgggaggcatcttattaaaacgtcattgcaggttttgacccttcagcgggagacggataaggttatggtgaagcggcagaggacagctttccctccaaactttgtgcattctcttgatggttctcatatgatgatgactgctgttgcttgcaaaaggcaaggtctgaattttgcaggagttcatgattcatattggacccatgccagtgatgttgatacaatgaataaaatactccgggaaaagtttgtggaactctatgatacacctattctggaaaatctgttggagagctttgagaaatctttccctaaattaaaattcccaccgttgccggagaggggagacttcgatatgaaggaagtccttgagtctacgtattttttcaactagcacaatcaatgttaacagttgcattatacacgctgctgcccggacatatctgagttctgagtgtagatctaccaactcgaatgatgaaagctaggtcatacatgagcataacccgaagagtggctttgcagaagttatcagaagctaagttggtactctgagcattcacaaatgcatcggcatcatttatcgcgttgaagttggcaatgaggtttgctaaataaaagtgggaaccatatcaaagttaaacgagaatccctgtaaatgtaattatgtaatttttttttgtctttagtgtttttattttccttgatcttggtactgtcgagagaaattcggctgaccggtagtttgtcggctggtgctgagtagagattatttcatactttgtagtttaacaatataatttagtaataaagtgatatactagtatttttctcgttgttttagctctg

SEQ ID NO: 67206 - DNA, 1547 bp, Zea Mays
gttaccttaccttcctttgctacaaaattgattctcgatgctacatctatagttcatctaaaaaacttctgccattggattaactcccaggttttattagccgggaattctttgattagagaactatagggaaaagttgaaggtttatttaattgcatgaagagtagtcgcagatatggtgtgatcaagtgtgatccactggtccggcaaggcttggatagaacagcaaagcacatggtcattccgtacatgcctatgttgattcccccaatctgttggacaggatatgacaaaggagcacacctctttttaccatcatatgtaatgcgcacccatggtgctcggcaacagagggacgctgttaaaagagctccaagggaacagatgcaatttgtttttgaggccttgaatactcttgggagcacgaagtggagggttaacaaaagagttcttagcattgttgacagaatctggtcaaatggtggccggcttgctgacttggttgatcgtactgatgttcctgtaccggagaagcctgacactgaagatgaaaccttgctaaagaactggaaatggcacttgagggcagccaagaagaagaacagtgaaaggcattctcagagatgtgatgttgaactcaaacttgctgttgctagaaaaatgaaggatgaagagggattttactatccacacaaccttgattttagaggtcgggcttatccaatgcacccttatctgaaccatttgggttcagatctttgtcgaggggttctagagtttgctgaaggtcggccacttggcaagtcaggattgcgttggctgaagatacaccttgcaaatttgtatgctgctggtgttgataagttgtcatatgatggccggattgcatttgctgagaatcatttggaggaaatatttgattctgctgataggcctttagaaggcagacgatggtggcttggggctgaagatccattccagtgcctggcagtatgcatgaatctcactgaagctttaagaagctcgtctccagaaacaacaatctcacatattcctgtgcaccaggatggctcttgtaatggtctgcaacactatgcggcacttggaaaggataagttgggagccattgctgttaacttagtcgctggagaaaagcctgcagatgtttacaccggaatagctaacagggtgatggaaattatgaggatggatgcacaaaaagatccttctgtagaacctgatgcagctcgtgctcgtctgatagttgaccaggtggacagaaaattggtgaagcaaactgtgatgacatctgtgtatggtgtcacatatattggagcacgtgaacaaataagaagaagactaaaggagaggggggtcattcctaatgactccgaactgtttggtgcatcatgctatgctgctaaggttactcttacagcacttggtgagatgtttcaagctgcccgtagtatcatgaactggcttggtgactgtgccaaggtcaacatatgtgctgtttgtaatggagttttcctgatatacaactg

SEQ ID NO: 67207 - DNA, 2292 bp, Zea Mays
aaaagttgaaggtttatttaattgcatgaagagtagtcgcagatatggtgtgatcaagtgtgatccactggtccggcaaggcttggatagaacagcaaagcacatggtcattccgtacatgcctatgttgattcccccaatctgttggacaggatatgacaaaggagcacacctctttttaccatcatatgtaatgcgcacccatggtgctcggcaacagagggacgctgttaaaagagctccaagggaacagatgcaatttgtttttgaggccttgaatactcttgggagcacgaagtggagggttaacaaaagagttcttagcattgttgacagaatctggtcaaatggtggccggcttgctgacttggttgatcgtactgatgttcctgtaccggagaagcctgacactgaagatgaaaccttgctaaagaactggaaatggcacttgagggcagccaagaagaagaacagtgaaaggcattctcagagatgtgatgttgaactcaaacttgctgttgctagaaaaatgaaggatgaagagggattttactatccacacaaccttgattttagaggtcgggcttatccaatgcacccttatctgaaccatttgggttcagatctttgtcgaggggttctagagtttgctgaaggtcggccacttggcaagtcaggattgcgttggctgaagatacaccttgcaaatttgtatgctgctggtgttgataagttgtcatatgatggccggattgcatttgctgagaatcatttggaggaaatatttgattctgctgataggcctttagaaggcagacgatggtggcttggggctgaagatccattccagtgcctggcagtatgcatgaatctcactgaagctttaagaagctcgtctccagaaacaacaatctcacatattcctgtgcaccaggatggctcttgtaatggtctgcaacactatgcggcacttggaaaggataagttgggagccattgctgttaacttagtcgctggagaaaagcctgcagatgtttacaccggaatagctaacagggtgatggaaattatgaggatggatgcacaaaaagatccttctgtagaacctgatgcagctcgtgctcgtctgatagttgaccaggtggacagaaaattggtgaagcaaactgtgatgacatctgtgtatggtgtcacatatattggagcacgtgaacaaataagaagaagactaaaggagaggggggtcattcctaatgactccgaactgtttggtgcatcatgctatgctgctaaggttactcttacagcacttggtgagatgtttcaagctgcccgtagtatcatgaactggcttggtgactgtgccaaggtaattgcttgtgaaaatgaaccagtgagatggacgactcctcttgggctcccagttgtacaaccatatcgcaaacttgggaggcatcttattaaaacgtcattgcaggttttgacccttcagcgggagacggataaggttatggtgaagcggcagaggacagctttccctccaaactttgtgcattctcttgatggttctcatatgatgatgactgctgttgcttgcaaaaggcaaggtctgaattttgcaggagttcatgattcatattggacccatgccagtgatgttgatacaatgaataaaatactccgggaaaagtttgtggaactctatgatacacctattctggaaaatctgttggagagctttgagaaatctttccctaaattaaaattcccaccgttgccggagaggggagacttcgatatgaaggaagtccttgagtctacgtattttttcaactagcacaatcaatgttaacagttgcattatacacgctgctgcccggacatatctgagttctgagtgtagatctaccaactcgaatgatgaaagctaggtcatacatgagcataacccgaagagtggctttgcagaagttatcagaagctaagttggtactctgagcattcacaaatgcatcggcatcatttatcgcgttgaagttggcaatgaggtttgctaaataaaagtgggaaccatatcaaagttaaacgagaatccctgtaaatgtaattatgtaatttttttttgtctttagtgtttttattttccttgatcttggtactgtcgagagaaattcggctgaccggtagtttgtcggctggtgctgagtagagattatttcatactttgtagtttaacaatataatttagtaataaagtgatatactagtatttttctcgttgttttagctctg

SEQ ID NO: 67208 - DNA, 805 bp, Zea Mays
ggcacttagaaatcatagaggttatggtgaagcggcagaggacagctttccctccaaactttgtgcattctcttgatggttctcatatgatgatgactgctgttgcttgcaaaaggcaaggtctgaattttgcaggagttcatgattcatattggacccatgccagtgatgttgatacaatgaataaaatactccgggaaaagtttgtggaactctatgatacacctattctggaaaatctgttggagagctttgagaaatctttccctaaattaaaattcccaccgttgccggagaggggagacttcgatatgaaggaagtccttgagtctacgtattttttcaactagcacaatcaatgttaacagttgcattatacacgctgctgcccggacatatctgagttctgagtgtagatctaccaactcgaatgatgaaagctaggtcatacatgagcataacccgaagagtggctttgcagaagttatcagaagctaagttggtactctgagcattcacaaatgcatcggcatcatttatcgcgttgaagttggcaatgaggtttgctaaataaaagtgggaaccatatcaaagttaaacgagaatccctgtaaatgtaattatgtaatttttttttgtctttagtgtttttattttccttgatcttggtactgtcgagagaaattcggctgaccggtagtttgtcggctggtgctgagtagagattatttcatactttgtagtttaacaatataatttagtaataaagtgatatactagtatttttctcgttgttttagctctg

SEQ ID NO: 67209 - DNA, 610 bp, Zea Mays
gccaattcttcctccgtgacagctgctgatgtttgacgatcaagacctgggcttctttgccaatttcctgggcatcttcatctttgtcttggttattgcgtaccacttcgtgatggcagacccgaagtacgaaggaaactgatgtcctctagtgcaaagatcctattatctgcaggccgaaatagggctatactgttagctaatgctagtgagatcgcttgacactttgagtgcatatcatggaagctggacatgcagttcctggcattttggttttgcccatgttttaatctgctgaattagtaaatcctggagaattcaaaagcgttttcaagtactgcagttggtggttgtttctggtcctagtgtatgcatgccagaatcttatgaataatattctttgttttgttgcctatttagctgtttagttggttgttagcctgtcaagaaactggggaacggctccgttactagactacattgagtcgtctctcacattggagtctgggagcaccaccaggcagaggcagccatgttcttatgttgttttgtgctgtctgctcaagctttcgttcatctcacctgaggcctcccttcgttgaagagagag

SEQ ID NO: 67210 - DNA, 634 bp, Zea Mays
cgaggaggaaggggtaacgccgacgcgcgcagttggctggatctggatcgagatgtttgacgatcaagacctgggcttctttgccaatttcctgggcatcttcatctttgtcttggttattgcgtaccacttcgtgatggcagacccgaagtacgaaggaaactgatgtcctctagtgcaaagatcctattatctgcaggccgaaatagggctatactgttagctaatgctagtgagatcgcttgacactttgagtgcatatcatggaagctggacatgcagttcctggcattttggttttgcccatgttttaatctgctgaattagtaaatcctggagaattcaaaagcgttttcaagtactgcagttggtggttgtttctggtcctagtgtatgcatgccagaatcttatgaataatattctttgttttgttgcctatttagctgtttagttggttgttagcctgtcaagaaactggggaacggctccgttactagactacattgagtcgtctctcacattggagtctgggagcaccaccaggcagaggcagccatgttcttatgttgttttgtgctgtctgctcaagctttcgttcatctcacctgaggcctcccttcgttgaagagagag

SEQ ID NO: 67211 - DNA, 652 bp, Zea Mays
aaggccatggccacggggcgcttcttcgactgtgctgggagtaggaacaccaagaaagtggcctcatttgatgtttgacgatcaagacctgggcttctttgccaatttcctgggcatcttcatctttgtcttggttattgcgtaccacttcgtgatggcagacccgaagtacgaaggaaactgatgtcctctagtgcaaagatcctattatctgcaggccgaaatagggctatactgttagctaatgctagtgagatcgcttgacactttgagtgcatatcatggaagctggacatgcagttcctggcattttggttttgcccatgttttaatctgctgaattagtaaatcctggagaattcaaaagcgttttcaagtactgcagttggtggttgtttctggtcctagtgtatgcatgccagaatcttatgaataatattctttgttttgttgcctatttagctgtttagttggttgttagcctgtcaagaaactggggaacggctccgttactagactacattgagtcgtctctcacattggagtctgggagcaccaccaggcagaggcagccatgttcttatgttgttttgtgctgtctgctcaagctttcgttcatctcacctgaggcctcccttcgttgaagagagag

SEQ ID NO: 67212 - DNA, 1619 bp, Zea Mays
ggccaagattgtttatgacagccaagactagggaacaacgtactcggcctcggctgcggcaacgagctggtggaggtggggagcggccatgacggcttggactccgtcgtcggcgccgtgttccccgtggacacagatgaggccgtgcgggcgttgttggagaaggagacggaccacaagcctcaagacggctatgcggagaggctggagcgcggcggattggagtactcctggaggagagacgccatggattggatttgcaaggtccattcgtactacaggtttggaccactcagtctttaccttgctgtgaattacctggatagattcctctcctcatatgatctcccacacgataagccttggatgcgacagttgttgtcagttgcttgcctagcactcgctgtcaagatggaggagaccgtgctccctcttcctgtggaccttcaggtctgcgatgtgaaatttgagttcgaagcaaggactattgggaggatggagcttcttgtgctggccaccctgaaatggagaatgcaggctgtgacccccttcactttcatcagctacttcctcgacaagttcaatggtgggaagccgccgagtttggcactagcgtcacggtgcaccgatatcataattggcacactcaaagaccatctgagattgccgcggcctcagctctagcagcagtttctgagaatcaggttgttggctcctcgagtgctctttcagcatctgaagtccctataaataaggtgatgattgctagatgctatgagctgttgcaagagcaagcgctggtgaggaagacagggcacgtcaatggaagcccttcagtgccgcagagcccgattggcgtgctggatgcaacatgcttcagctttaggagtgaagatgcaagactagtatcatcgcaatcaaacaacatcagtagtagtagtagtaacgacaatcaagtttctaagaggagaaggctaagcatatcaccaatctgagtggatcaaatctctgttggcagtgtcgcattgtgcgcttggttatgcattgatcatcttaacctcagagtttgtcagagcaacaagtagtggtacaaaaggacccagtgaagcattgtaacaagcagaggatggtgacagtaataagttagaagcagtctgttgatctctgagacgaaagaggtgacgaggaacgtttcttcctctagtaactttgaatccccttcctccccggcacctttgttttgttcctttttcctttttatcggtatctcaaggcatttgtggggagatatgtggatatgagattggagacgtgaggattagagagagagagggagggagggaggggagggagatcaacaacaacaaaaatcaggtttgttcctttgttctctgccaatatacaaaaaaactgtcgtgcgaaatcctccggatgtttcagtttattttgcttctgtagtctgaaaaatagccgtgctgattcatcgattgcattctcttatgactggttgactgcttgtttgtattacttgtccatgcctgacatttttgtgaagagaaccagccataggtacaagttatggcatggctttgcaaatataaagaaaaggagcaggcaaa

SEQ ID NO: 67213 - DNA, 1710 bp, Zea Mays
acgtctctatcctcccacttcgacccggccggccctatcaaaagctggccccttccacagcgcactccctcaccttcctccacggctccaccatcccctctcccctgccctgcccccaccgccccgcttccttccgccttgctccgttgcttcctcccaccacagtccactccactcgccggccctgcagctcagtatttgactgagactggtggtggagctgctagcagcgagcctgctacttcctggtcctgacggtgcgttcagacctcagaccagtgccgacgacgagctgtgaggagagggcaaggaaacaagcctgtgaggaaggcggcgatggagaggtacgaggtgatcaaggacataggatcgggcaacttcggggtggccaagctggtccgggacgtcaggaccaaggagctcttcgccgtcaagttcatcgagcgggggatgaagattgatgagaatgtccaaagggagatcatgaaccacaggtcactgaggcatccaaacatagttaaatttaaggaggttgtgctaactcccacacatttggccatagttatggaatatgctgctggtggtgagctatttgaaaggatctgtaatgctggaagatttagtgaggatgaggcgagatttttcttccaacaactgatttcaggagttagttattgccactcaatgcaaatatgccatagagatttgaaactagaaaacactctcctggatgatagtatagcacctcggctaaagatatgtgattttggttactccaagtcctctgtgctgcactctcaaccaaaatcaactgtcgggacaccagcttacattgctcctgaggtccttgctagaaaggaatatgatggaaaggtcgccgatgtttggtcatgtggagttactctgtatgtgatgcttgttggtgcctatccctttgaggaccccgacgaaccgaagaatttccgcaagacgcttactcgtccagtacgcggttcctgattttgtccgagtttcaatggagtgcaggcatctgctgtctcggatctttgtggcgaaacctgagcaacggataaccatcccagagatcaagaaccacccatggttcctgaagaacctgcccatcgagatgaccgacgagtaccagatgaacctacagctagtcgacatgaatgtcccctcgcaaagcctggaggagatcatgtccatcatactggaggcccggaagcccggcgacgggctgaagcatgcgggacagctccccggccttgggagcatggagctggatgacattgatgttgacgacatagacgttgaggacagtggcgactttgtatgtgccttgtgacgcggttcaggctgtccggcaccgttgctgcggtggactctcccccactctcctggtctttgtgtcttgctgttattccatgttgtttgtttcagcgagctccgagctcccattttgttgttgtaatatcacatgttttgtgtaaccaaggtagtgacgctgtggataaataatagacgttatgtgttgtattcttgctgaattgttgttcagctccttctgtttgccctgtatgaactgggcagtttcatgagtaccacaatgtgtatgttgatggctctgtcttcccttgtctcggcaatgtgttttttcttgtatttttgctagaagcaatcttatgagttacgagtactatttaccaccct

SEQ ID NO: 67214 - DNA, 1482 bp, Zea Mays
gctcctcctagcctccccgcaacttatataaaaaccaatcgtctgtcctctctgccctctcgtccaaaaccctagccctcgcgccgccgcctccttcgccacccagcgctcgagctcctcgctccctgcgagcgcgcgccgcaacgccaccatgaagttcaacatcgcgaacccttccaccgggtgccaaaagaagctggaaatcgatgacgaccagaagctgcgtgccttttatgaccgaaggatatcccaggaggtcagtggtgatgctctgggtgaggagttcaagggttatgtcttcaagatcatgggtggatgtgacaagcaaggcttcccaatgaagcaaggagttttgacttctggtcgtgttcgtcttctgctccatagggggactccctgcttccgtggttatggcaggcgtaatggtgagcgcaggaggaagtctgtccgtggttgcatcgtgagccaagacctatctgttatcaacttggtgattgtgaagaagggtgagaatgatctgcctggtctgactgacactgagaagccaaggatgaggggtcccaagagggcctccaagatcagaaagctgttcaaccttaacaaggatgatgatgtacgcaagtacgtgaacacataccgcaggacattcactaccaagaacggcaagaaggtcagcaaggcacctaagatccaacggcttgtgacacccttgaccctccagaggaagcgtgctagaatcgctgacaagaagaagaggataactaagaagaagtctgaggctgctgagtaccagaagcttcttgcccagaggctgaaggaacagagagaccgccggagcgagagcttggccaagaggaggtccaagctttctgccgccgccaaggcttctgctgccacctctgcttaagaatgttcagtgttttgggatctttgtaaggtctatcttgtaacggcaaaagtgttttgggatctttgtaagctccatagttcacatcacttaagtgcttctgctgccacctctgcttaagaatattcagtgttttgggatctttgtaaggtctatctcgttacagcgaaagtgcctctctacttagatttatgagtaattgttgcttttttgtatgaacatggtaatggcttgtcggggtaccagaggtttactatgttggtttatgctgtgaacgtaagcgagccatattctttggtatgcagtctgaactatatgttaacgtttgggatttttgttaacatgaagtatcctgcttggttgccttgatcctttttgctgtatggttctattggggctttgctgcgatctctcttctcaatccgaagcttggctgaaaagttggcctcagcagctacttattatctccggcattgttaccgtctcatctgtaaacagtgtatccatgttataggaaatttcttaagatcattgagttgaaattgcgttgaatcaagtaaacaaataagaagata

SEQ ID NO: 67215 - DNA, 328 bp, Zea Mays
ctttgaggtctgtttggtggctctggcgcaatggaaaacttcttgtagtttgacaatatttggcagatttcagtgggccgcagccacctactctgagcttccagtagtatctgaggagtacctgggggctggttggacatggcgtacttgcgaatctcggccatgcgacgatccgaccgcgggcgctggcgccgccaccgccggctccaatcgcagggttcaggaggctaaaaattgcaggcctctcaaggggatttggggattttttttttttgtctgcgcggcgaggcacttcacgggatttgagacacggcgccgtcggattgga

SEQ ID NO: 67216 - DNA, 1037 bp, Zea Mays
cgtccaccccccctcgcatcggataagcccttcttccctccagagaggcagagagagactcgagtactagactagagtctcaactcttgagcagggaaaacgagagatccttggagtcagcaatggagtctaccgcgctaatgaccgcgagactaccactgctgacctctggctcccgttccaaacccctcccctttgcttccttcaccagggcggcttgccgtctcgcctccgcccccttctccggcagcggcagcgtcgtcctgctgtcgcgccggagccgcgactatgctggcgttggttccttggtctccgccgcggcggatcctggggatacggcggacgccggatccgagtccatcctgctcagcgtccaggggatgatgtgcgacgggtgcgccgcgagcgtgaagcggatcctggagagccaacccgaggttacttctgctaccgttgattttaaggaagcaagcgcagtcgtgtggacaacagatgaggccaaggggacacaaggttggcagaagcagtatggagagaagcttgctaagcaccttggcacttgcggatttgagtctcgcctacaagagtaaggtgaagccgaaccgatattgaagttcagatcagatgtcaccttaatggtcaatttataccaggatatatgttaaatattttgtctctatggattgcagttgtaggattagtctcggtgcttgtctggtggcataatactacatacctacctttcacatgatctttagctagattgtttcgaataggatgatgtcctaaaattgtaggtgtaggccactgttgcgaggaaggagtttgcggctgggctattgttaaatccggtcttcccgttgcttcgaagatataaagtgatactacctctataactcaaaataaatcgattttttaaactcactatgagtcagattgtcttaagcttaaccaactttataaaaacgtaacaacatatatgcatttttttataatgtatcatgtgataccaatcactattatctataatatcaaat

SEQ ID NO: 67217 - DNA, 465 bp, Zea Mays
ctcgcatcggataagcccttcttccctccagagaggcagagagagactcgagtactagactagagtctcaactcttgagcagggaaaacgagagatccttggagtcagcaatggagtctaccgcgctaatgaccgcgagactaccactgctgacctctggctcccgttccaaacccctcccctttgcttccttcaccagggcggcttgccgtctcgcctccgcccccttctccggcagcggcagcgtcgtcctgctgtcgcgccggagccgcgactatgctggcgttggttccttggtctccgccgcggcggatcctggggatacggcggacgccggatccgagtccatcctgctcagcgtccaggggatgatgtgcgacgggtgcgccgcgagcgtgaagcggatcctggagagccaaggaagacctccctcatgacacagcagaaaactagcaacaccgacgg

SEQ ID NO: 67218 - DNA, 1488 bp, Zea Mays
atcggataagcccttcttccctccagagaggcagagagagactcgagtactagactagagtctcaactcttgagcagggaaaacgagagatccttggagtcagcaatggagtctaccgcgctaatgaccgcgagactaccactgctgacctctggctcccgttccaaacccctcccctttgcttccttcaccagggcggcttgccgtctcgcctccgcccccttctccggcagcggcagcgtcgtcctgctgtcgcgccggagccgcgactatgctggcgttggttccttggtctccgccgcggcggatcctggggatacggcggacgccggatccgagtccatcctgctcagcgtccaggggatgatgtgcgacgggtgcgccgcgagcgtgaagcggatcctggagagccaacccgaggttacttctgctaccgttgattttaaggaagcaagcgcagtcgtgtggacaacagatgaggccaaggggacacaaggttggcagaagcagtatggagagaagcttgctaagcaccttggcacttgcggatttgagtctcgcctacaagatgatcaacgaacgatcacgtgaagttacatgctagaagccaaagctatgtgcaaacgatgatacagttattaaagttgactataaagtggaaactgccatgagaaaacgtctagctccggatccagatgttttttttttcacgagaagagataaagatgtgtgtgtttttttgctggatttggtttagtgtacaagatggatctaaatggaatcagcatttggtcataaaatgatgagtaccgcttacttaaatcaacaatgcaaattgctcttgaaaatacgcaaaactgatttttattctgtatatgatgttgaggatgtctgaggcatagttgtaaacaacgaatagttgaggcaggttttgtccggatattgactgtaccacttcctcagtattttgaaatcatagttcaactcttgagcctgccgtgagccagtgagctaactatacctgtttctctttcagagtaaggtgaagccgaaccgatattgaagttcagatcagatgtcaccttaatggtcaatttataccaggatatatgttaaatattttgtctctatggattgcagttgtaggattagtctcggtgcttgtctggtggcataatactacatacctacctttcacatgatctttagctagattgtttcgaataggatgatgtcctaaaattgtaggtgtaggccactgttgcgaggaaggagtttgcggctgggctattgttaaatccggtcttcccgttgcttcgaagatataaagtgatactacctctataactcaaaataaatcgattttttaaactcactatgagtcagattgtcttaagcttaaccaactttataaaaacgtaacaacatatatgcatttttttataatgtatcatgtgataccaatcactattatctataatatcaaat

SEQ ID NO: 67219 - DNA, 1572 bp, Zea Mays
gcccttcttccctccagagaggcagagagagactcgagtactagactagagtctcaactcttgagcagggaaaacgagagatccttggagtcagcaatggagtctaccgcgctaatgaccgcgagactaccactgctgacctctggctcccgttccaaacccctcccctttgcttccttcaccagggcggcttgccgtctcgcctccgcccccttctccggcagcggcagcgtcgtcctgctgtcgcgccggagccgcgactatgctggcgttggttccttggtctccgccgcggcggatcctggggatacggcggacgccggatccgagtccatcctgctcagcgtccaggggatgatgtgcgacgggtgcgccgcgagcgtgaagcggatcctggagagccaacagggaagacctccctcatgacacagcagaaaactagcaacaccgacgggagcgggagtgcgcgcgggcgacgacgggagggcagttggacgcgatgaagggaaatggcgagccgtactccctcgtcaaagatacctagcaaaggggagcagacgacgagctggatagagaagatatatagaaagcgagcctgttggatacgattttaacatgcttttctattttttaccgattcttattagtttagcgaggttgttggagttgttctaaacaagacagagacataccatgttgcatgtatttgttttgcttagtatgcacgatacagttgaagatgatacaaaacttttgtggtgctcatataggagaactttttatttatctattcatggattgtttcctatatttgcatccacatcggtctgtactgatctgattaaataagtcaaggttttttttcatttcttttagtgttacttttaatttgctttcacttataaatggacgcttttgcagcccgaggttacttctgctaccgttgattttaaggaagcaagcgcagtcgtgtggacaacagatgaggccaaggggacacaaggttggcagaagcagtatggagagaagcttgctaagcaccttggcacttgcggatttgagtctcgcctacaagatgatcaacgaacgatcacgtgaagttacatgctagaagccaaagagtaaggtgaagccgaaccgatattgaagttcagatcagatgtcaccttaatggtcaatttataccaggatatatgttaaatattttgtctctatggattgcagttgtaggattagtctcggtgcttgtctggtggcataatactacatacctacctttcacatgatctttagctagattgtttcgaataggatgatgtcctaaaattgtaggtgtaggccactgttgcgaggaaggagtttgcggctgggctattgttaaatccggtcttcccgttgcttcgaagatataaagtgatactacctctataactcaaaataaatcgattttttaaactcactatgagtcagattgtcttaagcttaaccaactttataaaaacgtaacaacatatatgcatttttttataatgtatcatgtgataccaatcactattatctataatatcaaat

SEQ ID NO: 67220 - DNA, 1125 bp, Zea Mays
tccctccagagaggcagagagagactcgagtactagactagagtctcaactcttgagcagggaaaacgagagatccttggagtcagcaatggagtctaccgcgctaatgaccgcgagactaccactgctgacctctggctcccgttccaaacccctcccctttgcttccttcaccagggcggcttgccgtctcgcctccgcccccttctccggcagcggcagcgtcgtcctgctgtcgcgccggagccgcgactatgctggcgttggttccttggtctccgccgcggcggatcctggggatacggcggacgccggatccgagtccatcctgctcagcgtccaggggatgatgtgcgacgggtgcgccgcgagcgtgaagcggatcctggagagccaactatctgttctgtcacagaacggactgtacactaagcgaagctacatggccaagtttgaaatccaaaggattgcctccctgcaacaataagaaaacaaagaaggaaaaaagttcagagcaagcccgaggttacttctgctaccgttgattttaaggaagcaagcgcagtcgtgtggacaacagatgaggccaaggggacacaaggttggcagaagcagtatggagagaagcttgctaagcaccttggcacttgcggatttgagtctcgcctacaagagtaaggtgaagccgaaccgatattgaagttcagatcagatgtcaccttaatggtcaatttataccaggatatatgttaaatattttgtctctatggattgcagttgtaggattagtctcggtgcttgtctggtggcataatactacatacctacctttcacatgatctttagctagattgtttcgaataggatgatgtcctaaaattgtaggtgtaggccactgttgcgaggaaggagtttgcggctgggctattgttaaatccggtcttcccgttgcttcgaagatataaagtgatactacctctataactcaaaataaatcgattttttaaactcactatgagtcagattgtcttaagcttaaccaactttataaaaacgtaacaacatatatgcatttttttataatgtatcatgtgataccaatcactattatctataatatcaaat

SEQ ID NO: 67221 - DNA, 2577 bp, Zea Mays
atcaaaccaaacagacctataatctatgcctcggccaggcaatttcggctccaaaccaaacaaaaaagcaggagtgcctgaccactggctaaaagttcgtatgcaaggggcccacttgtcgcaccgtgccgcgtgcgtgcaagcctagaagactcggcagcttttgcggccccgttctcttccccatcccctcttccctctctagccttccacccttcatccaccagccgctcctcgagcacccccgtcccgcgccgcctccggctccggcgagatgtcacgcttcggtcgatccggcccgccgccgccgatccgcgacacgtactcactcctcgtcctcaacatcaccttccgcacaactgctgatgacctcttccctctcttcgacaagtacggcgagattgtcgacatctacatcccaagggaccgccggactggtgactcgcgcggattcgcgttcgtgaggtacaagtacgaggacgaggcacagaaggcagttgaaaggctcgatgggagattggtagacgggagggagatcatggtgcagtttgccaagtacggcccaaatgctgaacggattaataaagggagaatagtggagccagttccaagaccaggggggcgttccaggagtcacagtccaagacggaggtaccgtgatgattatcgagatgaccatgatagagattatagaaggcgaagtcgtagccggagtagagatagatacacccgtgacaggtacagggatagggattaccgccatcgtagcccgagtcgcagctacagtcctgatgattacaagaagcgtgggagagacagtttgtcacctgagcgaagaagccctcgtcgtagccgcagtcctgatgattacaagaggcgtggcagagacagtgcatcaccagcaagtaagagccctagtcgctccccacctcgcaagatgtcaccttctcctgagagatctcccgtcaggcgcaacaatgaccgatctccacgctctcggagcccatcgacataagcgcaattcacttgcaaagcatcttgagtagctcaggatgaatggacttgctctgatcctatgtgtacgcatttgctcgatggtggcctcttctcagctaaagttgtgtagtgccgtctttcagttgctgcttcaaccttggaatactacttctgtttggcacctgaactgcttatcaaaaactttatttacatgatgcagtgaagatgtgctggctgatatgcggtcaacatgcacgtagcttactgttgaagttgatattatctgtgctgtttgcgttgttgatgatggctgatgagatgattgatgatgatggcactgcagctgcctgcaccatttgctgtctgcacctattatgctgacaacaatagaaggcgtgggagaggttctagcaacagaatcgctgactggtcgattgacctggatctgaatgctgatgatttgccgcaaagacttcgtaccgtgtcatttgtggagtccgtcgaccgatcaagctgtgtaactaccgatggttttgtaagactagcttttgatctgtttgtgtgaattacttcagcatttggtagtgctgtgttcttctctttaaagtactgttacgcccgtatcatctgacctcccggaggaccagcgcagaggaccagcgcgccacggtccagtcattcttggtgattgatgataaccgatgctgacacgcagatgtcgaaagcttgtgggcacgtgcacggtgcagtacctgtaccattgtattgtgacagtggtgctggtgcgataaatttctcagtatggacactggagaggctactggtagatgggctcgtggctcgcaatctgcaaattggtatccacatccgtgtacgacgaagacgaggtgtttgttgaacagaattgctggcctatgaacttgtcttggtcatgtgtctgacatttgtgctaatgttttatgccatcttggctaaaaaacccattcgtagcacgaaagggttaattaggggtcctgattagcactcagatacaacaaagcagggcagttcgcttggcaacaagcacatgcaccattttatataagctaaattattcatactgcttcaggagctctagacatcgcttgggtggcacatactacacgttgttgtcttggcaaatcccctgcagtgatgaacaacgacgtgtctcgagtagtgcattaaatcgtagagtgtgtttctaaaggcagtgacaaatatgcaagccgtgcaagtagccctctttgtccgttctaagatccaaccgtatgtgcaatcgtggtttattaggagctttggtttattaggagcttttttataaagttaaggcggtagtgagaggatttaaatgctaaatatgacatatggttagatctatatctaacggaaagagatctacttgcacgcttgcacataactgcttgtatattagtcatcgccgtttctaaaatggaggtatgtagttttcacctgatactcttcttgaagttcctccgaaacagcaagtgtgtagcaacccggaatgaacctacctgcagatttgcatgatcccggttaata

SEQ ID NO: 67222 - DNA, 2571 bp, Zea Mays
atcaaaccaaacagacctataatctatgcctcggccaggcaatttcggctccaaaccaaacaaaaaagcaggagtgcctgaccactggctaaaagttcgtatgcaaggggcccacttgtcgcaccgtgccgcgtgcgtgcaagcctagaagactcggcagcttttgcggccccgttctcttccccatcccctcttccctctctagccttccacccttcatccaccagccgctcctcgagcacccccgtcccgcgccgcctccggctccggcgagatgtcacgcttcggtcgatccggcccgccgccgccgatccgcgacacgtactcactcctcgtcctcaacatcaccttccgcacaactgctgatgacctcttccctctcttcgacaagtacggcgagattgtcgacatctacatcccaagggaccgccggactggtgactcgcgcggattcgcgttcgtgaggtacaagtacgaggacgaggcacagaaggcagttgaaaggctcgatgggagattggtagacgggagggagatcatggtgcagtttgccaagtacggcccaaatgctgaacggattaataaagggagaatagtggagccagttccaagaccaggggggcgttccaggagtcacagtccaagacggaggtaccgtgatgattatcgagatgaccatgatagagattatagaaggcgaagtcgtagccggagtagagatagatacacccgtgacaggtacagggatagggattaccgccatcgtagcccgagtcgcagctacagtcctgatgattacaagaagcgtgggagagacagtttgtcacctgagcgaagaagccctcgtcgtagccgcagtcctgatgattacaagaggcgtggcagagacagtgcatcaccagcaagtaagagccctagtcgctccccacctcgcaagatgtcaccttctcctgagagatctcccgtcaggcgcaacaatgaccgatctccacgctctcggagcccatcgacataagcgcaattcacttgcaaagcatcttgagtagctcaggatgaatggacttgctctgatcctatgtgtacgcatttgctcgatggtggcctcttctcagctaaagttgtgtagtgccgtctttcagttgctgcttcaaccttggaatactacttctgtttggcacctgaactgcttatcaaaaactttatttacatgatgcagtgaagatgtgctggctgatatgcggtcaacatgcacgtagcttactgttgaagttgatattatctgtgctgtttgcgttgttgatgatggctgatgagatgattgatgatgatggcactgcagctgcctgcaccatttgctgtctgcacctattatgctgacaaaaggcgtgggagaggttctagcaacagaatcgctgactggtcgattgacctggatctgaatgctgatgatttgccgcaaagacttcgtaccgtgtcatttgtggagtccgtcgaccgatcaagctgtgtaactaccgatggttttgtaagactagcttttgatctgtttgtgtgaattacttcagcatttggtagtgctgtgttcttctctttaaagtactgttacgcccgtatcatctgacctcccggaggaccagcgcagaggaccagcgcgccacggtccagtcattcttggtgattgatgataaccgatgctgacacgcagatgtcgaaagcttgtgggcacgtgcacggtgcagtacctgtaccattgtattgtgacagtggtgctggtgcgataaatttctcagtatggacactggagaggctactggtagatgggctcgtggctcgcaatctgcaaattggtatccacatccgtgtacgacgaagacgaggtgtttgttgaacagaattgctggcctatgaacttgtcttggtcatgtgtctgacatttgtgctaatgttttatgccatcttggctaaaaaacccattcgtagcacgaaagggttaattaggggtcctgattagcactcagatacaacaaagcagggcagttcgcttggcaacaagcacatgcaccattttatataagctaaattattcatactgcttcaggagctctagacatcgcttgggtggcacatactacacgttgttgtcttggcaaatcccctgcagtgatgaacaacgacgtgtctcgagtagtgcattaaatcgtagagtgtgtttctaaaggcagtgacaaatatgcaagccgtgcaagtagccctctttgtccgttctaagatccaaccgtatgtgcaatcgtggtttattaggagctttggtttattaggagcttttttataaagttaaggcggtagtgagaggatttaaatgctaaatatgacatatggttagatctatatctaacggaaagagatctacttgcacgcttgcacataactgcttgtatattagtcatcgccgtttctaaaatggaggtatgtagttttcacctgatactcttcttgaagttcctccgaaacagcaagtgtgtagcaacccggaatgaacctacctgcagatttgcatgatcccggttaata

SEQ ID NO: 67223 - DNA, 463 bp, Zea Mays
caagcctagaagactcggcagcttttgcggccccgttctcttccccatcccctcttccctctctagccttccacccttcatccaccagccgctcctcgagcacccccgtcccgcgccgcctccggctccggcgagatgtcacgcttcggtcgatccggcccgccgccgccgatccgcgacacgtactcactcctcgtcctcaacatcaccttccgcacaactgctgatgacctcttccctctcttcgacaagtacggcgagattgtcgacatctacatcccaagggaccgccggactggtgactcgcgcggattcgcgttcgtgaggtacaagtacgaggacgaggcacagaaggcagttgaaaggctcgatgggagattggtagacgggagggagatcatggtgcagtttgccaagtacggcccaaatgctgaacggattgtcgcttaagcgttaaggtgcg

SEQ ID NO: 67224 - DNA, 1582 bp, Zea Mays
catcgggccattggggtcgggggctcggggcacatatcacccgcttccctctgttgaatcctccttccgcgccgccgccatctcctcctcctctgactccggcggcctcacgccctcctcacgctccgcaacgccgtacctggatgttggtttctacttcgactctccgagggatagagaagagacccagtgccacaaggttcccgtagtctgtaatcggggagctgagaatctaggccataggcttcttgaagccgttgggagacaaaggaggccggacgagcgagcgaacaaccagatggaggcggtggtgcggaaggtgcagcagcgggtgaggaaggcgcgggaggagatggatcagtgggatgacctcaacactcggctcctctcccaattctccaatgctgccgcggtcatctctcgccttcaggcccttggagaggacaagaattatggccccttgcgtgctgtacccaacatcagagtggacctcattgggaaccagatggaggttctggagctcattttcgttaaaattagggagacactggagaagttcaatgacgtcgtgaaagctttaaataaggctctgcgtgataccaagcagatggtgagaggcgggtcggcactcacggcgaaacagatgcagttacaagttggaattttgccatcgattgcagaatgcttggatggatttcaaacattatgtgaaatgcaccatgatgagtttacgctaaaatcatcagctatctccttgctgacttggaagacatgttccagtgacattgctgtactacgccaactcttagtagaccagccaaacattccaaaagatgaaggtgagaccgagtcagtgtggaaactttatgttaacccaattgttgaggcattgtggacgaggcaagtcttcatctctgtcagcaatcggtgattgaagacccagaggccggacctgaccattgtgtgccggtcaccggagtgtgagtggtctgaacttgggatggtaatggctttgcctgtccatcctgcggggtgtggacagtgatagaacttgaacaggcttgacccctcctagcaagggattgtgaattgtgatcaccaatccatggttcagacttgcaccaatcatgtggcttgcgttttttagaaataggtgcaccattgcctcttccaggtggtgcccagaaggtttcgaccaaggtctgtgaaagaagcactttgcaatcagcggtgggttcagatatatcacatgaacgagcagacaaggaaacattctaacttggaaaaagtttctattgggttctattcggcaatggaaaaacggtgtatcatgtaaattaaactatactagttcactttggttttgtaagttaaacttctttaacgctgatcaagacaataccctaaaaaagtggtacatgtatgcactgcacttgtccaatacattatgcaactcaacgcaccaatcacacagaggcctaggactaggaggcctgtgggcaccagagactccagaagctgagaaacgttgacatcactgcatcagcatcacgaggaccaacagcggacggaaaaaaaacaa

SEQ ID NO: 67225 - DNA, 777 bp, Zea Mays
cggggcacatatcacccgcttccctctgttgaatcctccttccgcgccgccgccatctcctcctcctctgactccggcggcctcacgccctcctcacgctccgcaacgccgtacctggatgttggtttctacttcgactctccgagggatagagaagagacccagtgccacaaggttcccgtagtctgtaatcggggagctgagaatctaggccataggcttcttgaagccgttgggagacaaaggaggccggacgagcgagcgaacaaccagatggaggcggtggtgcggaaggtgcagcagcgggtgaggaaggcgcgggaggagatggatcagtgggatgacctcaacactcggctcctctcccaattctccaatgctgccgcggtcatctctcgccttcaggcccttggagaggacaagaattatggccccttgcgtgctgtacccaacatcagagtggacctcattgggaaccagatggaggttctggagctcattttcgttaaaattagggagacactggagaagttcaatgacgtcgtgaaagctttaaataaggctctgcgtgataccaagcagatggtgagaggcgggtcggcactcacggcgaaacagatgcagttacaagttggaattttgccatcgattgcagaatgcttggatggatttcaaacattatgtgaaatgcaccatgatgagtttacgctaaaatcatcagctatctccttgctgacttggaagacatgatgatagtgatgttttccccccttaatt

SEQ ID NO: 67226 - DNA, 2820 bp, Zea Mays
ccatttccaggcttccgagttccgactactgggcgccacacgcggcgcaagcgcaggagacacaatgttgacatatcctatattgaacgaccgatcaattgatcagtggacggttactgagttgaaggatgagcttgagcgaaggtatctgcctgtcagtggttcgaaggatgagcttttgaagagactctttgaggccatgcaggatgagatacttgatggtgagggaaaaacaactgttgtaacttcccctcctgaggaattgaaaggtggtgaaactcctggttccattgatgtatctgttaaccaggcttcaattgagcaacatgttcataaaggtgcttccgaggttgcgaaacagggggtaggtcttgttatctctgttacagaagcttatgatgaaagtacatttgctacttcagaagttactcaggaggctgtggttggtactgcagaagttagtcagagaagtttggatgctgttgcagaagttgagtcttgtctagttgatgcagctgcaactgatgaacccgatggtaatggtcaaggttcagcttcaagtggtgatactatagtgaaggaaggaagtccgcgctctgaaggtcatggcaatactattgagaagaccccagaagatggcaccaataagaaaatagctgtcgatgatgaaccttctgaccttactggtggtgacatcaagttgggcctcgatgtgcacagcaagattctaaagctggaagatgaacccgcacctcctcatgatatgttgcataatcatgaggattctgatgttgttgcagttgctgagccagaagatgacacaagcaaaaaaatgataagtgatgatgtaccgactggtcttatgcataccaatgttgagttaggtgccaaggtagactgcaaaattgaacaggaagaagtatcaacattgtctgatgctgctgcattgcattcttatcctaaggaacatattgtggctgtggcaaaaggccttgcgctcccaaggaggatgctgatgtcaggctacacaagtaatatagacttggacagaaaagaggagagtcctgacataaattcttgtgagaaactgaacttaaataggagttcaggtgatgaatcaatggatgaggatgtgatggaaaggaagcatgccgattcctatatcaaacctgaagatcttagaggaaagacaaaggttacttcggagcatgtgtttaaagatgtttctctgcttgatactcgtgctgagggttcccctgcacactcaaaggaagttgtcactgaagagaagctatcaactccaactgaaaagaggaaacttgaagatcaagaagtcattgaaaataatgagccaatcaaacgccagtacctatggaacgaggatgctgtcaatatttctgatcaacaagcatccaaaataactagtactggtactcagaaggaagttatttgtcctgctccagaacgttcttttggcaggcctaatacagtagcaagaagaaattctccaaaggagcggattggtgaggttcttctacatgttcaaaacatactcttcagtggaggaagctgtggccacgaggaatgctgtctacgacctccagtggccctcaaacaacaacaattatctgatcgctgaatttgtcgatccagaagaggtaaagctcaaacttgaaactccaccatctcaaattcctcctatcagtctgagcacagctacagcacagcagacagcaaccttccaacaggcaatggctaaccaaactctagtacctccccatgttcctgctacttcgagaggtttattgcccactccagcacggtttgccaaggtgcctcccacctctgaccctggaccagcaagggagagccttcctccccctccactgagcctggaacctgcccggacactggatgagctcttcaagaagacacagacgtacccaaggatttactacatgccactgtcagaagaggaggtatctgctaaacgtgcagctcacgacaaaggtagaaggggatagtgggctttagtttgtcgctcaagctggtattttgctgactccaccagaccagcagctgcagctctatgaagaactactgcaccgtacttgtccctacatttagctggtattgtgttgaaaggctttagtagtttgttgtgagggaagacctgattgggtacgtggtattttggagttaaggataccgtggcttctccaaatcacgatggcgtgtaattttggcattccatagagtaccacggtttctcaaaactaagatgatgacaaaacatcagggatttgggtccaagtgatggtgtaaatgcagaaaattgacagcattttggcttctccaaatcacgatggctcgttgagtacttttcatgctctatcacactttgttaatagcatcgcacttattgtaggacaaacactgcaaagcaaagtgtattttgtgtccatgttttgagtggcttagtgtccaactcactagtgatcgatagtcttcatgttgtatagcgagtaagcgttcctattgcagtgaattgagtaatttgtttgagtggcactagatggagtgttgcaagattgtgatgcttgttactcttagggctgatttggtgaccagagatcacgggagaattgggaggaaattagtttatttcttccctcaatccccttccatccttccgggattcccttgtcaccaaatcacccctgattgtcacctcctaacaacttggtggcttgcattctccattgtgaagcccacgtgaaggttgtgcgtgacttcataaattcgacatctacaacattg

SEQ ID NO: 67227 - DNA, 3101 bp, Zea Mays
ccgagttccgactactgggcgccacacgcggcgcaagcgcaggaggcacgccatctgttcttgctgtcgctctccccaaccccaagcataaacccctgtgtcctcgtacaaaccgaaaccgaaaccaaactccgccacgagtggggcgagcggatacacgagctcgtgaaagcttgatctgctctccttgttttcgatctttcgcagtcgccgatcccccctcccgctcgaggttgctgtttttctttttgagatttcccccggatcttttcggtgctgttttgttgttgtttcgtttcaggatcgcgtagtctcggcgatttccccgagagtggttcttggaacttcagggttggaggaatacggtgtgcgctagacagcagtctccgcggttgttgtacacttacacaatgttgacatatcctatattgaacgaccgatcaattgatcagtggacggttactgagttgaaggatgagcttgagcgaaggtatctgcctgtcagtggttcgaaggatgagcttttgaagagactctttgaggccatgcaggatgagatacttgatggtgagggaaaaacaactgttgtaacttcccctcctgaggaattgaaaggtggtgaaactcctggttccattgatgtatctgttaaccaggcttcaattgagcaacatgttcataaaggtgcttccgaggttgcgaaacagggggtaggtcttgttatctctgttacagaagcttatgatgaaagtacatttgctacttcagaagttactcaggaggctgtggttggtactgcagaagttagtcagagaagtttggatgctgttgcagaagttgagtcttgtctagttgatgcagctgcaactgatgaacccgatggtaatggtcaaggttcagcttcaagtggtgatactatagtgaaggaaggaagtccgcgctctgaaggtcatggcaatactattgagaagaccccagaagatggcaccaataagaaaatagctgtcgatgatgaaccttctgaccttactggtggtgacatcaagttgggcctcgatgtgcacagcaagattctaaagctggaagatgaacccgcacctcctcatgatatgttgcataatcatgaggattctgatgttgttgcagttgctgagccagaagatgacacaagcaaaaaaatgataagtgatgatgtaccgactggtcttatgcataccaatgttgagttaggtgccaaggtagactgcaaaattgaacaggaagaagtatcaacattgtctgatgctgctgcattgcattcttatcctaaggaacatattgtggctgtggcaaaaggccttgcgctcccaaggaggatgctgatgtcaggctacacaagtaatatagacttggacagaaaagaggagagtcctgacataaattcttgtgagaaactgaacttaaataggagttcaggtgatgaatcaatggatgaggatgtgatggaaaggaagcatgccgattcctatatcaaacctgaagatcttagaggaaagacaaaggttacttcggagcatgtgtttaaagatgtttctctgcttgatactcgtgctgagggttcccctgcacactcaaaggaagttgtcactgaagagaagctatcaactccaactgaaaagaggaaacttgaagatcaagaagtcattgaaaataatgagccaatcaaacgccagtacctatggaacgaggatgctgtcaatatttctgatcaacaagcatccaaaataactagtactggtactcagaaggaagttatttgtcctgctccagaacgttcttttggcaggcctaatacagtagcaagaagaaattctccaaaggagcggattgtaccacctgccaaaacatccgcaacaacttctttaagaattgatcggtttgtgcgcccatttactctgaaagctgtgaaagaacttcttggtaaaactggatccatctgcagtttttggatggatgaaatcaagactcactgctatgtcacatactcttcagtggaggaagctgtggccacgaggaatgctgtctacgacctccagtggccctcaaacaacaacaattatctgatcgctgaatttgtcgatccagaagaggtttattgcccactccagcacggtttgccaaggtgcctcccacctctgaccctggaccagcaagggagagccttcctccccctccactgagcctggaacctgcccggacactggatgagctcttcaagaagacacagacgtacccaaggatttactacatgccactgtcagaagaggaggtatctgctaaacgtgcagctcacgacaaagctgactccaccagaccagcagctgcagctctatgaagaactactgcaccgtacttgtccctacatttagctggtattgtgttgaaaggctttagtagtttgttgtgagggaagacctgattgggtacgtggtattttggagttaaggataccgtggcttctccaaatcacgatggcgtgtaattttggcattccatagagtaccacggtttctcaaaactaagatgatgacaaaacatcagggatttgggtccaagtgatggtgtaaatgcagaaaattgacagcattttggcttctccaaatcacgatggctcgttgagtacttttcatgctctatcacactttgttaatagcatcgcacttattgtaggacaaacactgcaaagcaaagtgtattttgtgtccatgttttgagtggcttagtgtccaactcactagtgatcgatagtcttcatgttgtatagcgagtaagcgttcctattgcagtgaattgagtaatttgtttgagtggcactagatggagtgttgcaagattgtgatgcttgttactcttagggctgatttggtgaccagagatcacgggagaattgggaggaaattagtttatttcttccctcaatccccttccatccttccgggattcccttgtcaccaaatcacccctgattgtcacctcctaacaacttggtggcttgcattctccattgtgaagcccacgtgaaggttgtgcgtgacttcataaattcgacatctacaacattg

SEQ ID NO: 67228 - DNA, 3131 bp, Zea Mays
ccgagttccgactactgggcgccacacgcggcgcaagcgcaggaggcacgccatctgttcttgctgtcgctctccccaaccccaagcataaacccctgtgtcctcgtacaaaccgaaaccgaaaccaaactccgccacgagtggggcgagcggatacacgagctcgtgaaagcttgatctgctctccttgttttcgatctttcgcagtcgccgatcccccctcccgctcgaggttgctgtttttctttttgagatttcccccggatcttttcggtgctgttttgttgttgtttcgtttcaggatcgcgtagtctcggcgatttccccgagagtggttcttggaacttcagggttggaggaatacggtgtgcgctagacagcagtctccgcggttgttgtacacttacacaatgttgacatatcctatattgaacgaccgatcaattgatcagtggacggttactgagttgaaggatgagcttgagcgaaggtatctgcctgtcagtggttcgaaggatgagcttttgaagagactctttgaggccatgcaggatgagatacttgatggtgagggaaaaacaactgttgtaacttcccctcctgaggaattgaaaggtggtgaaactcctggttccattgatgtatctgttaaccaggcttcaattgagcaacatgttcataaaggtgcttccgaggttgcgaaacagggggtaggtcttgttatctctgttacagaagcttatgatgaaagtacatttgctacttcagaagttactcaggaggctgtggttggtactgcagaagttagtcagagaagtttggatgctgttgcagaagttgagtcttgtctagttgatgcagctgcaactgatgaacccgatggtaatggtcaaggttcagcttcaagtggtgatactatagtgaaggaaggaagtccgcgctctgaaggtcatggcaatactattgagaagaccccagaagatggcaccaataagaaaatagctgtcgatgatgaaccttctgaccttactggtggtgacatcaagttgggcctcgatgtgcacagcaagattctaaagctggaagatgaacccgcacctcctcatgatatgttgcataatcatgaggattctgatgttgttgcagttgctgagccagaagatgacacaagcaaaaaaatgataagtgatgatgtaccgactggtcttatgcataccaatgttgagttaggtgccaaggtagactgcaaaattgaacaggaagaagtatcaacattgtctgatgctgctgcattgcattcttatcctaaggaacatattgtggctgtggcaaaaggccttgcgctcccaaggaggatgctgatgtcaggctacacaagtaatatagacttggacagaaaagaggagagtcctgacataaattcttgtgagaaactgaacttaaataggagttcaggtgatgaatcaatggatgaggatgtgatggaaaggaagcatgccgattcctatatcaaacctgaagatcttagaggaaagacaaaggttacttcggagcatgtgtttaaagatgtttctctgcttgatactcgtgctgagggttcccctgcacactcaaaggaagttgtcactgaagagaagctatcaactccaactgaaaagaggaaacttgaagatcaagaagtcattgaaaataatgagccaatcaaacgccagtacctatggaacgaggatgctgtcaatatttctgatcaacaagcatccaaaataactagtactggtactcagaaggaagttatttgtcctgctccagaacgttcttttggcaggcctaatacagtagcaagaagaaattctccaaaggagcggattgtaccacctgccaaaacatccgcaacaacttctttaagaattgatcggtttgtgcgcccatttactctgaaagctgtgaaagaacttcttggtaaaactggatccatctgcagtttttggatggatgaaatcaagactcactgctatgtcacatactcttcagtggaggaagctgtggccacgaggaatgctgtctacgacctccagtggccctcaaacaacaacaattatctgatcgctgaatttgtcgatccagaagagtacctccccatgttcctgctacttcgagaggtttattgcccactccagcacggtttgccaaggtgcctcccacctctgaccctggaccagcaagggagagccttcctccccctccactgagcctggaacctgcccggacactggatgagctcttcaagaagacacagacgtacccaaggatttactacatgccactgtcagaagaggaggtatctgctaaacgtgcagctcacgacaaagctgactccaccagaccagcagctgcagctctatgaagaactactgcaccgtacttgtccctacatttagctggtattgtgttgaaaggctttagtagtttgttgtgagggaagacctgattgggtacgtggtattttggagttaaggataccgtggcttctccaaatcacgatggcgtgtaattttggcattccatagagtaccacggtttctcaaaactaagatgatgacaaaacatcagggatttgggtccaagtgatggtgtaaatgcagaaaattgacagcattttggcttctccaaatcacgatggctcgttgagtacttttcatgctctatcacactttgttaatagcatcgcacttattgtaggacaaacactgcaaagcaaagtgtattttgtgtccatgttttgagtggcttagtgtccaactcactagtgatcgatagtcttcatgttgtatagcgagtaagcgttcctattgcagtgaattgagtaatttgtttgagtggcactagatggagtgttgcaagattgtgatgcttgttactcttagggctgatttggtgaccagagatcacgggagaattgggaggaaattagtttatttcttccctcaatccccttccatccttccgggattcccttgtcaccaaatcacccctgattgtcacctcctaacaacttggtggcttgcattctccattgtgaagcccacgtgaaggttgtgcgtgacttcataaattcgacatctacaacattg

SEQ ID NO: 67229 - DNA, 3149 bp, Zea Mays
ccgagttccgactactgggcgccacacgcggcgcaagcgcaggaggcacgccatctgttcttgctgtcgctctccccaaccccaagcataaacccctgtgtcctcgtacaaaccgaaaccgaaaccaaactccgccacgagtggggcgagcggatacacgagctcgtgaaagcttgatctgctctccttgttttcgatctttcgcagtcgccgatcccccctcccgctcgaggttgctgtttttctttttgagatttcccccggatcttttcggtgctgttttgttgttgtttcgtttcaggatcgcgtagtctcggcgatttccccgagagtggttcttggaacttcagggttggaggaatacggtgtgcgctagacagcagtctccgcggttgttgtacacttacacaatgttgacatatcctatattgaacgaccgatcaattgatcagtggacggttactgagttgaaggatgagcttgagcgaaggtatctgcctgtcagtggttcgaaggatgagcttttgaagagactctttgaggccatgcaggatgagatacttgatggtgagggaaaaacaactgttgtaacttcccctcctgaggaattgaaaggtggtgaaactcctggttccattgatgtatctgttaaccaggcttcaattgagcaacatgttcataaaggtgcttccgaggttgcgaaacagggggtaggtcttgttatctctgttacagaagcttatgatgaaagtacatttgctacttcagaagttactcaggaggctgtggttggtactgcagaagttagtcagagaagtttggatgctgttgcagaagttgagtcttgtctagttgatgcagctgcaactgatgaacccgatggtaatggtcaaggttcagcttcaagtggtgatactatagtgaaggaaggaagtccgcgctctgaaggtcatggcaatactattgagaagaccccagaagatggcaccaataagaaaatagctgtcgatgatgaaccttctgaccttactggtggtgacatcaagttgggcctcgatgtgcacagcaagattctaaagctggaagatgaacccgcacctcctcatgatatgttgcataatcatgaggattctgatgttgttgcagttgctgagccagaagatgacacaagcaaaaaaatgataagtgatgatgtaccgactggtcttatgcataccaatgttgagttaggtgccaaggtagactgcaaaattgaacaggaagaagtatcaacattgtctgatgctgctgcattgcattcttatcctaaggaacatattgtggctgtggcaaaaggccttgcgctcccaaggaggatgctgatgtcaggctacacaagtaatatagacttggacagaaaagaggagagtcctgacataaattcttgtgagaaactgaacttaaataggagttcaggtgatgaatcaatggatgaggatgtgatggaaaggaagcatgccgattcctatatcaaacctgaagatcttagaggaaagacaaaggttacttcggagcatgtgtttaaagatgtttctctgcttgatactcgtgctgagggttcccctgcacactcaaaggaagttgtcactgaagagaagctatcaactccaactgaaaagaggaaacttgaagatcaagaagtcattgaaaataatgagccaatcaaacgccagtacctatggaacgaggatgctgtcaatatttctgatcaacaagcatccaaaataactagtactggtactcagaaggaagttatttgtcctgctccagaacgttcttttggcaggcctaatacagtagcaagaagaaattctccaaaggagcggattgtaccacctgccaaaacatccgcaacaacttctttaagaattgatcggtttgtgcgcccatttactctgaaagctgtgaaagaacttcttggtaaaactggatccatctgcagtttttggatggatgaaatcaagactcactgctatgtcacatactcttcagtggaggaagctgtggccacgaggaatgctgtctacgacctccagtggccctcaaacaacaacaattatctgatcgctgaatttgtcgatccagaagaggtttattgcccactccagcacggtttgccaaggtgcctcccacctctgaccctggaccagcaagggagagccttcctccccctccactgagcctggaacctgcccggacactggatgagctcttcaagaagacacagacgtacccaaggatttactacatgccactgtcagaagaggaggtatctgctaaacgtgcagctcacgacaaaggtagaaggggatagtgggctttagtttgtcgctcaagctggtattttgctgactccaccagaccagcagctgcagctctatgaagaactactgcaccgtacttgtccctacatttagctggtattgtgttgaaaggctttagtagtttgttgtgagggaagacctgattgggtacgtggtattttggagttaaggataccgtggcttctccaaatcacgatggcgtgtaattttggcattccatagagtaccacggtttctcaaaactaagatgatgacaaaacatcagggatttgggtccaagtgatggtgtaaatgcagaaaattgacagcattttggcttctccaaatcacgatggctcgttgagtacttttcatgctctatcacactttgttaatagcatcgcacttattgtaggacaaacactgcaaagcaaagtgtattttgtgtccatgttttgagtggcttagtgtccaactcactagtgatcgatagtcttcatgttgtatagcgagtaagcgttcctattgcagtgaattgagtaatttgtttgagtggcactagatggagtgttgcaagattgtgatgcttgttactcttagggctgatttggtgaccagagatcacgggagaattgggaggaaattagtttatttcttccctcaatccccttccatccttccgggattcccttgtcaccaaatcacccctgattgtcacctcctaacaacttggtggcttgcattctccattgtgaagcccacgtgaaggttgtgcgtgacttcataaattcgacatctacaacattg

SEQ ID NO: 67230 - DNA, 3214 bp, Zea Mays
cgagttccgactactgggcgccacacgcggcgcaagcgcaggaggcacgccatctgttcttgctgtcgctctccccaaccccaagcataaacccctgtgtcctcgtacaaaccgaaaccgaaaccaaactccgccacgagtggggcgagcggatacacgagctcgtgaaagcttgatctgctctccttgttttcgatctttcgcagtcgccgatcccccctcccgctcgaggttgctgtttttctttttgagatttcccccggatcttttcggtgctgttttgttgttgtttcgtttcaggatcgcgtagtctcggcgatttccccgagagtggttcttggaacttcagggttggaggaatacggtgtgcgctagacagcagtctccgcggttgttgtacacttacacaatgttgacatatcctatattgaacgaccgatcaattgatcagtggacggttactgagttgaaggatgagcttgagcgaaggtatctgcctgtcagtggttcgaaggatgagcttttgaagagactctttgaggccatgcaggatgagatacttgatggtgagggaaaaacaactgttgtaacttcccctcctgaggaattgaaaggtggtgaaactcctggttccattgatgtatctgttaaccaggcttcaattgagcaacatgttcataaaggtgcttccgaggttgcgaaacagggggtaggtcttgttatctctgttacagaagcttatgatgaaagtacatttgctacttcagaagttactcaggaggctgtggttggtactgcagaagttagtcagagaagtttggatgctgttgcagaagttgagtcttgtctagttgatgcagctgcaactgatgaacccgatggtaatggtcaaggttcagcttcaagtggtgatactatagtgaaggaaggaagtccgcgctctgaaggtcatggcaatactattgagaagaccccagaagatggcaccaataagaaaatagctgtcgatgatgaaccttctgaccttactggtggtgacatcaagttgggcctcgatgtgcacagcaagattctaaagctggaagatgaacccgcacctcctcatgatatgttgcataatcatgaggattctgatgttgttgcagttgctgagccagaagatgacacaagcaaaaaaatgataagtgatgatgtaccgactggtcttatgcataccaatgttgagttaggtgccaaggtagactgcaaaattgaacaggaagaagtatcaacattgtctgatgctgctgcattgcattcttatcctaaggaacatattgtggctgtggcaaaaggccttgcgctcccaaggaggatgctgatgtcaggctacacaagtaatatagacttggacagaaaagaggagagtcctgacataaattcttgtgagaaactgaacttaaataggagttcaggtgatgaatcaatggatgaggatgtgatggaaaggaagcatgccgattcctatatcaaacctgaagatcttagaggaaagacaaaggttacttcggagcatgtgtttaaagatgtttctctgcttgatactcgtgctgagggttcccctgcacactcaaaggaagttgtcactgaagagaagctatcaactccaactgaaaagaggaaacttgaagatcaagaagtcattgaaaataatgagccaatcaaacgccagtacctatggaacgaggatgctgtcaatatttctgatcaacaagcatccaaaataactagtactggtactcagaaggaagttatttgtcctgctccagaacgttcttttggcaggcctaatacagtagcaagaagaaattctccaaaggagcggattgtaccacctgccaaaacatccgcaacaacttctttaagaattgatcggtttgtgcgcccatttactctgaaagctgtgaaagaacttcttggtaaaactggatccatctgcagtttttggatggatgaaatcaagactcactgctatgtcacatactcttcagtggaggaagctgtggccacgaggaatgctgtctacgacctccagtggccctcaaacaacaacaattatctgatcgctgaatttgtcgatccagaagagcaaccttccaacaggcaatggctaaccaaactctagtacctccccatgttcctgctacttcgagaggtttattgcccactccagcacggtttgccaaggtgcctcccacctctgaccctggaccagcaagggagagccttcctccccctccactgagcctggaacctgcccggacactggatgagctcttcaagaagacacagacgtacccaaggatttactacatgccactgtcagaagaggaggtatctgctaaacgtgcagctcacgacaaaggtagaaggggatagtgggctttagtttgtcgctcaagctggtattttgctgactccaccagaccagcagctgcagctctatgaagaactactgcaccgtacttgtccctacatttagctggtattgtgttgaaaggctttagtagtttgttgtgagggaagacctgattgggtacgtggtattttggagttaaggataccgtggcttctccaaatcacgatggcgtgtaattttggcattccatagagtaccacggtttctcaaaactaagatgatgacaaaacatcagggatttgggtccaagtgatggtgtaaatgcagaaaattgacagcattttggcttctccaaatcacgatggctcgttgagtacttttcatgctctatcacactttgttaatagcatcgcacttattgtaggacaaacactgcaaagcaaagtgtattttgtgtccatgttttgagtggcttagtgtccaactcactagtgatcgatagtcttcatgttgtatagcgagtaagcgttcctattgcagtgaattgagtaatttgtttgagtggcactagatggagtgttgcaagattgtgatgcttgttactcttagggctgatttggtgaccagagatcacgggagaattgggaggaaattagtttatttcttccctcaatccccttccatccttccgggattcccttgtcaccaaatcacccctgattgtcacctcctaacaacttggtggcttgcattctccattgtgaagcccacgtgaaggttgtgcgtgacttcataaattcgacatctacaacattg

SEQ ID NO: 67231 - DNA, 3181 bp, Zea Mays
cgactactgggcgccacacgcggcgcaagcgcaggaggcacgccatctgttcttgctgtcgctctccccaaccccaagcataaacccctgtgtcctcgtacaaaccgaaaccgaaaccaaactccgccacgagtggggcgagcggatacacgagctcgtgaaagcttgatctgctctccttgttttcgatctttcgcagtcgccgatcccccctcccgctcgaggttcttggaacttcagggttggaggaatacggtgtgcgctagacagcagtctccgcggttgttgtacacttacacaatgttgacatatcctatattgaacgaccgatcaattgatcagtggacggttactgagttgaaggatgagcttgagcgaaggtatctgcctgtcagtggttcgaaggatgagcttttgaagagactctttgaggccatgcaggatgagatacttgatggtgagggaaaaacaactgttgtaacttcccctcctgaggaattgaaaggtggtgaaactcctggttccattgatgtatctgttaaccaggcttcaattgagcaacatgttcataaaggtgcttccgaggttgcgaaacagggggtaggtcttgttatctctgttacagaagcttatgatgaaagtacatttgctacttcagaagttactcaggaggctgtggttggtactgcagaagttagtcagagaagtttggatgctgttgcagaagttgagtcttgtctagttgatgcagctgcaactgatgaacccgatggtaatggtcaaggttcagcttcaagtggtgatactatagtgaaggaaggaagtccgcgctctgaaggtcatggcaatactattgagaagaccccagaagatggcaccaataagaaaatagctgtcgatgatgaaccttctgaccttactggtggtgacatcaagttgggcctcgatgtgcacagcaagattctaaagctggaagatgaacccgcacctcctcatgatatgttgcataatcatgaggattctgatgttgttgcagttgctgagccagaagatgacacaagcaaaaaaatgataagtgatgatgtaccgactggtcttatgcataccaatgttgagttaggtgccaaggtagactgcaaaattgaacaggaagaagtatcaacattgtctgatgctgctgcattgcattcttatcctaaggaacatattgtggctgtggcaaaaggccttgcgctcccaaggaggatgctgatgtcaggctacacaagtaatatagacttggacagaaaagaggagagtcctgacataaattcttgtgagaaactgaacttaaataggagttcaggtgatgaatcaatggatgaggatgtgatggaaaggaagcatgccgattcctatatcaaacctgaagatcttagaggaaagacaaaggttacttcggagcatgtgtttaaagatgtttctctgcttgatactcgtgctgagggttcccctgcacactcaaaggaagttgtcactgaagagaagctatcaactccaactgaaaagaggaaacttgaagatcaagaagtcattgaaaataatgagccaatcaaacgccagtacctatggaacgaggatgctgtcaatatttctgatcaacaagcatccaaaataactagtactggtactcagaaggaagttatttgtcctgctccagaacgttcttttggcaggcctaatacagtagcaagaagaaattctccaaaggagcggattgtaccacctgccaaaacatccgcaacaacttctttaagaattgatcggtttgtgcgcccatttactctgaaagctgtgaaagaacttcttggtaaaactggatccatctgcagtttttggatggatgaaatcaagactcactgctatgtcacatactcttcagtggaggaagctgtggccacgaggaatgctgtctacgacctccagtggccctcaaacaacaacaattatctgatcgctgaatttgtcgatccagaagaggtaaagctcaaacttgaaactccaccatctcaaattcctcctatcagtctgagcacagctacagcacagcagacagcaaccttccaacaggcaatggctaaccaaactctagtacctccccatgttcctgctacttcgagaggtttattgcccactccagcacggtttgccaaggtgcctcccacctctgaccctggaccagcaagggagagccttcctccccctccactgagcctggaacctgcccggacactggatgagctcttcaagaagacacagacgtacccaaggatttactacatgccactgtcagaagaggaggtatctgctaaacgtgcagctcacgacaaaggtagaaggggatagtgggctttagtttgtcgctcaagctggtattttgctgactccaccagaccagcagctgcagctctatgaagaactactgcaccgtacttgtccctacatttagctggtattgtgttgaaaggctttagtagtttgttgtgagggaagacctgattgggtacgtggtattttggagttaaggataccgtggcttctccaaatcacgatggcgtgtaattttggcattccatagagtaccacggtttctcaaaactaagatgatgacaaaacatcagggatttgggtccaagtgatggtgtaaatgcagaaaattgacagcattttggcttctccaaatcacgatggctcgttgagtacttttcatgctctatcacactttgttaatagcatcgcacttattgtaggacaaacactgcaaagcaaagtgtattttgtgtccatgttttgagtggcttagtgtccaactcactagtgatcgatagtcttcatgttgtatagcgagtaagcgttcctattgcagtgaattgagtaatttgtttgagtggcactagatggagtgttgcaagattgtgatgcttgttactcttagggctgatttggtgaccagagatcacgggagaattgggaggaaattagtttatttcttccctcaatccccttccatccttccgggattcccttgtcaccaaatcacccctgattgtcacctcctaacaacttggtggcttgcattctccattgtgaagcccacgtgaaggttgtgcgtgacttcataaattcgacatctacaacattg

SEQ ID NO: 67232 - DNA, 2920 bp, Zea Mays
gactactgggcgccacacgcggcgcaagcgcaggaggcacgccatctgttcttgctgtcgctctccccaaccccaagcataaacccctgtgtcctcgtacaaaccgaaaccgaaaccaaactccgccacgagtggggcgagcggatacacgagctcgtgaaagcttgatctgctctccttgttttcgatctttcgcagtcgccgatcccccctcccgctcgagacacaatgttgacatatcctatattgaacgaccgatcaattgatcagtggacggttactgagttgaaggatgagcttgagcgaaggtatctgcctgtcagtggttcgaaggatgagcttttgaagagactctttgaggccatgcaggatgagatacttgatggtgagggaaaaacaactgttgtaacttcccctcctgaggaattgaaaggtggtgaaactcctggttccattgatgtatctgttaaccaggcttcaattgagcaacatgttcataaaggtgcttccgaggttgcgaaacaggggaagttagtcagagaagtttggatgctgttgcagaagttgagtcttgtctagttgatgcagctgcaactgatgaacccgatggtaatggtcaaggttcagcttcaagtggtgatactatagtgaaggaaggaagtccgcgctctgaaggtcatggcaatactattgagaagaccccagaagatggcaccaataagaaaatagctgtcgatgatgaaccttctgaccttactggtggtgacatcaagttgggcctcgatgtgcacagcaagattctaaagctggaagatgaacccgcacctcctcatgatatgttgcataatcatgaggattctgatgttgttgcagttgctgagccagaagatgacacaagcaaaaaaatgataagtgatgatgtaccgactggtcttatgcataccaatgttgagttaggtgccaaggtagactgcaaaattgaacaggaagaagtatcaacattgtctgatgctgctgcattgcattcttatcctaaggaacatattgtggctgtggcaaaaggccttgcgctcccaaggaggatgctgatgtcaggctacacaagtaatatagacttggacagaaaagaggagagtcctgacataaattcttgtgagaaactgaacttaaataggagttcaggtgatgaatcaatggatgaggatgtgatggaaaggaagcatgccgattcctatatcaaacctgaagatcttagaggaaagacaaaggttacttcggagcatgtgtttaaagatgtttctctgcttgatactcgtgctgagggttcccctgcacactcaaaggaagttgtcactgaagagaagctatcaactccaactgaaaagaggaaacttgaagatcaagaagtcattgaaaataatgagccaatcaaacgccagtacctatggaacgaggatgctgtcaatatttctgatcaacaagcatccaaaataactagtactggtactcagaaggaagttatttgtcctgctccagaacgttcttttggcaggcctaatacagtagcaagaagaaattctccaaaggagcggattgtaccacctgccaaaacatccgcaacaacttctttaagaattgatcggtttgtgcgcccatttactctgaaagctgtgaaagaacttcttggtaaaactggatccatctgcagtttttggatggatgaaatcaagactcactgctatgtcacatactcttcagtggaggaagctgtggccacgaggaatgctgtctacgacctccagtggccctcaaacaacaacaattatctgatcgctgaatttgtcgatccagaagagtacctccccatgttcctgctacttcgagaggtttattgcccactccagcacggtttgccaaggtgcctcccacctctgaccctggaccagcaagggagagccttcctccccctccactgagcctggaacctgcccggacactggatgagctcttcaagaagacacagacgtacccaaggatttactacatgccactgtcagaagaggaggtatctgctaaacgtgcagctcacgacaaagctgttttcagatgcaaccatacttgtcacggcacagcgatcgacaggctctcttctccgcagctgactccaccagaccagcagctgcagctctatgaagaactactgcaccgtacttgtccctacatttagctggtattgtgttgaaaggctttagtagtttgttgtgagggaagacctgattgggtacgtggtattttggagttaaggataccgtggcttctccaaatcacgatggcgtgtaattttggcattccatagagtaccacggtttctcaaaactaagatgatgacaaaacatcagggatttgggtccaagtgatggtgtaaatgcagaaaattgacagcattttggcttctccaaatcacgatggctcgttgagtacttttcatgctctatcacactttgttaatagcatcgcacttattgtaggacaaacactgcaaagcaaagtgtattttgtgtccatgttttgagtggcttagtgtccaactcactagtgatcgatagtcttcatgttgtatagcgagtaagcgttcctattgcagtgaattgagtaatttgtttgagtggcactagatggagtgttgcaagattgtgatgcttgttactcttagggctgatttggtgaccagagatcacgggagaattgggaggaaattagtttatttcttccctcaatccccttccatccttccgggattcccttgtcaccaaatcacccctgattgtcacctcctaacaacttggtggcttgcattctccattgtgaagcccacgtgaaggttgtgcgtgacttcataaattcgacatctacaacattg

SEQ ID NO: 67233 - DNA, 3072 bp, Zea Mays
gcggcgcaagcgcaggaggcacgccatctgttcttgctgtcgctctccccaaccccaagcataaacccctgtgtcctcgtacaaaccgaaaccgaaaccaaactccgccacgagtggggcgagcggatacacgagctcgtgaaagcttgatctgctctccttgttttcgatctttcgcagtcgccgatcccccctcccgctcgagggttcttggaacttcagggttggaggaatacggtgtgcgctagacagcagtctccgcggttgttgtacacttacacaatgttgacatatcctatattgaacgaccgatcaattgatcagtggacggttactgagttgaaggatgagcttgagcgaaggtatctgcctgtcagtggttcgaaggatgagcttttgaagagactctttgaggccatgcaggatgagatacttgatggtgagggaaaaacaactgttgtaacttcccctcctgaggaattgaaaggtggtgaaactcctggttccattgatgtatctgttaaccaggcttcaattgagcaacatgttcataaaggtgcttccgaggttgcgaaacaggggaagttagtcagagaagtttggatgctgttgcagaagttgagtcttgtctagttgatgcagctgcaactgatgaacccgatggtaatggtcaaggttcagcttcaagtggtgatactatagtgaaggaaggaagtccgcgctctgaaggtcatggcaatactattgagaagaccccagaagatggcaccaataagaaaatagctgtcgatgatgaaccttctgaccttactggtggtgacatcaagttgggcctcgatgtgcacagcaagattctaaagctggaagatgaacccgcacctcctcatgatatgttgcataatcatgaggattctgatgttgttgcagttgctgagccagaagatgacacaagcaaaaaaatgataagtgatgatgtaccgactggtcttatgcataccaatgttgagttaggtgccaaggtagactgcaaaattgaacaggaagaagtatcaacattgtctgatgctgctgcattgcattcttatcctaaggaacatattgtggctgtggcaaaaggccttgcgctcccaaggaggatgctgatgtcaggctacacaagtaatatagacttggacagaaaagaggagagtcctgacataaattcttgtgagaaactgaacttaaataggagttcaggtgatgaatcaatggatgaggatgtgatggaaaggaagcatgccgattcctatatcaaacctgaagatcttagaggaaagacaaaggttacttcggagcatgtgtttaaagatgtttctctgcttgatactcgtgctgagggttcccctgcacactcaaaggaagttgtcactgaagagaagctatcaactccaactgaaaagaggaaacttgaagatcaagaagtcattgaaaataatgagccaatcaaacgccagtacctatggaacgaggatgctgtcaatatttctgatcaacaagcatccaaaataactagtactggtactcagaaggaagttatttgtcctgctccagaacgttcttttggcaggcctaatacagtagcaagaagaaattctccaaaggagcggattgtaccacctgccaaaacatccgcaacaacttctttaagaattgatcggtttgtgcgcccatttactctgaaagctgtgaaagaacttcttggtaaaactggatccatctgcagtttttggatggatgaaatcaagactcactgctatgtcacatactcttcagtggaggaagctgtggccacgaggaatgctgtctacgacctccagtggccctcaaacaacaacaattatctgatcgctgaatttgtcgatccagaagaggtaaagctcaaacttgaaactccaccatctcaaattcctcctatcagtctgagcacagctacagcacagcagacagcaaccttccaacaggcaatggctaaccaaactctagtacctccccatgttcctgctacttcgagaggtttattgcccactccagcacggtttgccaaggtgcctcccacctctgaccctggaccagcaagggagagccttcctccccctccactgagcctggaacctgcccggacactggatgagctcttcaagaagacacagacgtacccaaggatttactacatgccactgtcagaagaggaggtatctgctaaacgtgcagctcacgacaaaggtagaaggggatagtgggctttagtttgtcgctcaagctggtattttgctgactccaccagaccagcagctgcagctctatgaagaactactgcaccgtacttgtccctacatttagctggtattgtgttgaaaggctttagtagtttgttgtgagggaagacctgattgggtacgtggtattttggagttaaggataccgtggcttctccaaatcacgatggcgtgtaattttggcattccatagagtaccacggtttctcaaaactaagatgatgacaaaacatcagggatttgggtccaagtgatggtgtaaatgcagaaaattgacagcattttggcttctccaaatcacgatggctcgttgagtacttttcatgctctatcacactttgttaatagcatcgcacttattgtaggacaaacactgcaaagcaaagtgtattttgtgtccatgttttgagtggcttagtgtccaactcactagtgatcgatagtcttcatgttgtatagcgagtaagcgttcctattgcagtgaattgagtaatttgtttgagtggcactagatggagtgttgcaagattgtgatgcttgttactcttagggctgatttggtgaccagagatcacgggagaattgggaggaaattagtttatttcttccctcaatccccttccatccttccgggattcccttgtcaccaaatcacccctgattgtcacctcctaacaacttggtggcttgcattctccattgtgaagcccacgtgaaggttgtgcgtgacttcataaattcgacatctacaacattg

SEQ ID NO: 67234 - DNA, 3669 bp, Zea Mays
ctcacgccacgacccgcttcctcgtgtgtcagggaattcccacgaccatcgtcctaggccagaggatcaaccgtgggtgagctccgggggcggcggtctgtgacaaggatgaaccagcctcacaccaacacaagttctcagcccgctgagtgcctctgcgttttcttctccacgctgttatctctcgcacgcaaacgaccagcacagcaaaaaccacccccacacttcgctcgcggcgcggcgacggcaatccaccgcggcgcgctgccttcgccggtgatctgacctctccgagcccgggcaatctcctcccgctgaatcggcccggagaggatggcgtcccggcggggaagcagcagttgcgcgctctgcgagggatccaacctgccttcctgttgtgccttgtgcgtcaacgcgcggtaggagcagcatccacccctcgcgttccgaaattccgggttgctcgagtaccacacgaaacttcgcatgatgaggagcctccgcgactccctccacgcccgaatcgccgcacgcctcgaagccaagagcaaaacagatgagcagaggatctggagagcgagcaaagcacacgatattatggagttgagggatcggctcactgaattgaagagcaaaactgccgtagataagaccaaggtcgagcaggcatcgagtggtctcaaggcaaaaaccgcgtcattgaatttggctcttgtcacgctgaaaaagaggcaagctgatgcagtggccatgcacaccagtgccatggaaattgcgcagatgaatctcatgacaatcacctcagattgtatgaaaatgcaatcaaaatctgtaaagcaactttgcagattgtttccaatgcgacgagttattaaagagggagaaaagaaagacaactacagtggtccgtatgattcgatatgtggggctcgtcttcctcgtggtctcgatccacattctattccagcagaagaactgtcagcatctttggggtacatgctacacttcgtcaatattgcggtccgtatcctatctgcgcccgttcttcatgtatcaggctttaagggttcatgctcaaatatatggcagcggagttcctactggagtacacgacagtcccagagcaaggtttaccctctttttatacctaggaaaaatgcttgcacaggcggtgaagaaacctcattgtcagaaagtggttcgagtaacttcggagttgactctgtggattctgtcaagaaacagtcttttggttccacgagaagtaatagctttaacctctctggtgcatcttcccactccatggagaggcatcaatatttgcagagaggaatatcactattgaagacaagtgttacagcaattactacttactattataactcactgggcttggatgtgccatccaatctttctacttttgaggcgttttctaagttgctccatacgttatcgtcatcaaaggcctttcgaactgcttttgaattgaacattgcttcaaggtcagaaaagcaagcacagcagctaaacagatcgatttggaagtcaagttcagccgtatcgtcggacagcagttttatggacagcatgcacacaaccatcatggtaaaattcctgttttgctcttaaattgcatgtagacttcatttttcgattctgatggaatctctgttcttgtcagcccagcactctagacaacctcctcctgaactcaaaccagagcttcttgtacaccgctaagttggtgaagcatggtggcgtgccagatagcatattcaacggttgggacctggtagagcgtgaggtcctaccgccaccgccctcgcggttcgaagatgtcgcgcagtgggaaagagccatgtatgctggcacaaaaaagaaatgacttctattgacaagtcttccttgaagtccaaactgttagaacactgcaagagcttcagtttagatatgcctctgatcatcagtttctggttcatgtacagtagcagtacaggactaacctaaccctgtggttgtgacctgtcagtcatctacctgcaagaatgcagagaagagaattgtagtgtagggtttattttctaccacatgtacgtgggtgcagtcctgtaaatttgtaaatgtaaatactgtagcgtttagaaaggaaattagattgtctggaataaatagacattccttcctatgagtacaactgaaaagaaattcttttacattcagcaagaaagcaacatgcacttaccgtaaaagaggaggacaccctgtgacggccagaaaaggaggccttatttgagaagcgaagcggtccacgtgtacaaccggaggcgttcctccgttccaccacaaaccagcggaccttcagcttctccaccgcggctccgcctcttctttcacggctccaccacgcactaaccctaaagcttccccgcgttgccggcgatgagcagccttcgagccatctcctccctcctccatatctactccacgtccgccgccgccagacgaggagccgggcggctgggcttcgcgccgtcgcccggcgggagattccgggtaccgtcgaattccggtccgcccgcgttcgtgttggacgaggtcgcgagggcggccggcggggttcggaggagggcgtccacgcgcgcggcgagttgggactcggagaaatcgccgtacgagacgcttgagctgggtagggatgcagacgaggagaccataaagactgcctacagaagattggccaagttctatcaccctgatgtttatgatggtaagggaacccttgaggaaggggaaaccgctgaagcgcgtttcattaagatccaagcagcgtatgagctgttgattgatggtgaaaggagaagagcatatgatagagagcatcatgtgaatccgatgaaggcttctcaagcatggatggagtgggtaatgaagaagcggaaagcttttgaccaacgtggtgacatggctgtggctgcttgggctgagcaacagcaacgcgaaatgacgctacgggcacggcgtctctcacgctcaaaggttgaccctgaggaagaaaggaagctatttgccaaggaaaagaaggcatctatggaattctacagcacaactctgaagagacatacccttgtgttacggaagagggatattatgcgcaagaaggcagaggaggagaaggataaggagatcagtagactcctagcggcggaagggcttgagttggatacagatgaagatgaaaacaagacttttctggggtaacgcttttgatacttaccctaatttattctcttcctccattccagcaatcgttcaagatgcagcgacaacgagtgcacaaggcgaaacagttgggctcgtcggaaacgctgtaatctggagatgtgcgccaacaaatattggatcgaaataataatctcccggggcgaagtttagcattttaccggagagcagaaaggaaaggcaaatgaaggatgtgtgatggctgtagtagggttgcaatatgattcaatcaaaaaattagtaaatttcgctgtagtagggttgtaatatgattcaacaaaaaatgagtagatttcggtggcgggcctcgattttatcctgagtctcattaagctatggcacttgaaaattgcacgtttaggtttttaatctcgagttcgtattcaggtt

SEQ ID NO: 67235 - DNA, 3491 bp, Zea Mays
cccctcgcgttccgaaattccgggttgctcgagtaccacacgaaacttcgcatgatgaggagcctccgcgactccctccacgcccgaatcgccgcacgcctcgaagccaagagcaaaacagatgagcagaggatctggagagcgagcaaagcacacgatattatggagttgagggatcggctcactgaattgaagagcaaaactgccgtagataagaccaaggtcgagcaggcatcgagtggtctcaaggcaaaaaccgcgtcattgaatttggctcttgtcacgctgaaaaagaggcaagctgatgcagtggccatgcacaccagtgccatggaaattgcgcagatgaatctcatgacaatcacctcagattgtatgaaaatgcaatcaaaatctgtaaagcaactttgcagattgtttccaatgcgacgagttattaaagagggagaaaagaaagacaactacagtggtccgtatgattcgatatgtggggctcgtcttcctcgtggtctcgatccacattctattccagcagaagaactgtcagcatctttggggtacatgctacacttcgtcaatattgcggtccgtatcctatctgcgcccgttcttcatgtatcaggctttaagggttcatgctcaaatatatggcagcggagttcctactggagtacacgacagtcccagagcaaggtttaccctctttttatacctaggaaaaatgcttgcacaggcggtgaagaaacctcattgtcagaaagtggttcgagtaacttcggagttgactctgtggattctgtcaagaaacagtcttttggttccacgagaagtaatagctttaacctctctggtgcatcttcccactccatggagaggcatcaatatttgcagagaggaatatcactattgaagacaagtgttacagcaattactacttactattataactcactgggcttggatgtgccatccaatctttctacttttgaggcgttttctaagttgctccatacgttatcgtcatcaaaggcctttcgaactgcttttgaattgaacattgcttcaaggtcagaaaagcaagcacagcagctaaacagatcgatttggaagtcaagttcagccgtatcgtcggacagcagttttatggacagcatgcacacaaccatcatgcccagcactctagacaacctcctcctgaactcaaaccagagcttcttgtacaccgctaagttggtgaagcatggtggcgtgccagatagcatattcaacggttgggacctggtagagcgtgaggtcctaccgccaccgccctcgcggttcgaagatgtcgcgcagtgggaaagagccatgtatgctggcacaaaaaagaaatgacttctattgacaagtcttccttgaagtccaaactgttagaacactgcaagagcttcagtttagatatgcctctgatcatcagtttctggttcatgtacagtagcagtacaggactaacctaaccctgtggttgtgacctgtcagtcatctacctgcaagaatgcagagaagagaattgtagtgtagggtttattttctaccacatgtacgtgggtgcagtcctgtaaatttgtaaatgtaaatactgtagcgtttagaaaggaaattagattgtctggaataaatagacattccttcctatgagtacaactgaaaagaaattcttttacattcagcaagaaagcaacatgcacttaccgtaaaagaggaggacaccctgtgacggccagaaaaggaggccttatttgagaagcgaagcggtccacgtgtacaaccggaggcgttcctccgttccaccacaaaccagcggaccttcagcttctccaccgcggctccgcctcttctttcacggctccaccacgcactaaccctaaagcttccccgcgttgccggcgatgagcagccttcgagccatctcctccctcctccatatctactccacgtccgccgccgccagacgaggagccgggcggctgggcttcgcgccgtcgcccggcgggagattccgggtaccgtcgaattccggtccgcccgcgttcgtgttggacgaggtcgcgagggcggccggcggggttcggaggagggcgtccacgcgcgcggcgagttgggactcggagaaatcgccgtacgagacgcttggtacgatcctatgcgctctgtagtttgtgcgagaactatactatgcatctgttttttcgtgtgtcaatcctggtgatcaacttgtatgatgctgatcagcttactatcgaattatttgatccgttacacaagtttgatcatttgctgttgccatgcttctatatgtttcagttccatcaccgaaaaaaaatgattcagttctaagttgagcttaatagtaccaagctgctgcaccagcaccactactttgtagtttcagatgcactgtgtgttacggacttggaattgaagatgaagctaatgtgtgttctttgtgtctcatgcgcttcaaagagctgggtagggatgcagacgaggagaccataaagactgcctacagaagattggccaagttctatcaccctgatgtttatgatggtaagggaacccttgaggaaggggaaaccgctgaagcgcgtttcattaagatccaagcagcgtatgagctgttgattgatggtgaaaggagaagagcatatgatagagagcatcatgtgaatccgatgaaggcttctcaagcatggatggagtgggtaatgaagaagcggaaagcttttgaccaacgtggtgacatggctgtggctgcttgggctgagcaacagcaacgcgaaatgacgctacgggcacggcgtctctcacgctcaaaggttgaccctgaggaagaaaggaagctatttgccaaggaaaagaaggcatctatggaattctacagcacaactctgaagagacatacccttgtgttacggaagagggatattatgcgcaagaaggcagaggaggagaaggataaggagatcagtagactcctagcggcggaagggcttgagttggatacagatgaagatgaaaacaagacttttctggggtaacgcttttgatacttaccctaatttattctcttcctccattccagcaatcgttcaagatgcagcgacaacgagtgcacaaggcgaaacagttgggctcgtcggaaacgctgtaatctggagatgtgcgccaacaaatattggatcgaaataataatctcccggggcgaagtttagcattttaccggagagcagaaaggaaaggcaaatgaaggatgtgtgatggctgtagtagggttgcaatatgattcaatcaaaaaattagtaaatttcgctgtagtagggttgtaatatgattcaacaaaaaatgagtagatttcggtggcgggcctcgattttatcctgagtctcattaagctatggcacttgaaaattgcacgtttaggtttttaatctcgagttcgtattcaggtt

SEQ ID NO: 67236 - DNA, 2757 bp, Zea Mays
gcgctgccccttgagatgggcacgcctgcgtcccggatttggttattaaagagggagaaaagaaagacaactacagtggtccgtatgattcgatatgtggggctcgtcttcctcgtggtctcgatccacattctattccagcagaagaactgtcagcatctttggggtacatgctacacttcgtcaatattgcggtccgtatcctatctgcgcccgttcttcatgtatcaggctttaagggttcatgctcaaatatatggcagcggagttcctactggagtacacgacagtcccagagcaaggtttaccctctttttatacctaggaaaaatgcttgcacaggcggtgaagaaacctcattgtcagaaagtggttcgagtaacttcggagttgactctgtggattctgtcaagaaacagtcttttggttccacgagaagtaatagctttaacctctctggtgcatcttcccactccatggagaggcatcaatatttgcagagaggaatatcactattgaagacaagtgttacagcaattactacttactattataactcactgggcttggatgtgccatccaatctttctacttttgaggcgttttctaagttgctccatacgttatcgtcatcaaaggcctttcgaactgcttttgaattgaacattgcttcaagaaaagcaagcacagcagctaaacagatcgatttggaagtcaagttcagccgtatcgtcggacagcagttttatggacagcatgcacacaaccatcatgcactctagacaacctcctcctgaactcaaaccagagcttcttgtacaccgctaagttggtgaagcatggtggcgtgccagatagcatattcaacggttgggacctggtagagcgtgaggtcctaccgccaccgccctcgcggttcgaagatgtcgcgcagtgggaaagagccatgtatgctggcacaaaaaagaaatgacttctattgacaagtcttccttgaagtccaaactgttagaacactgcaagagcttcagtttagatatgcctctgatcatcagtttctggttcatgtacagtagcagtacaggactaacctaaccctgtggttgtgacctgtcagtcatctacctgcaagaatgcagagaagagaattgtagtgtagggtttattttctaccacatgtacgtgggtgcagtcctgtaaatttgtaaatgtaaatactgtagcgtttagaaaggaaattagattgtctggaataaatagacattccttcctatgagtacaactgaaaagaaattcttttacattcagcaagaaagcaacatgcacttaccgtaaaagaggaggacaccctgtgacggccagaaaaggaggccttatttgagaagcgaagcggtccacgtgtacaaccggaggcgttcctccgttccaccacaaaccagcggaccttcagcttctccaccgcggctccgcctcttctttcacggctccaccacgcactaaccctaaagcttccccgcgttgccggcgatgagcagccttcgagccatctcctccctcctccatatctactccacgtccgccgccgccagacgaggagccgggcggctgggcttcgcgccgtcgcccggcgggagattccgggtaccgtcgaattccggtccgcccgcgttcgtgttggacgaggtcgcgagggcggccggcggggttcggaggagggcgtccacgcgcgcggcgagttgggactcggagaaatcgccgtacgagacgcttgagctgggtagggatgcagacgaggagaccataaagactgcctacagaagattggccaagttctatcaccctgatgtttatgatggtaagggaacccttgaggaaggggaaaccgctgaagcgcgtttcattaagatccaagcagcgtatgagctgttgattgatggtgaaaggagaagagcatatgatagagagcatcatgtgaatccgatgaaggcttctcaagcatggatggagtgggtaatgaagaagcggaaagcttttgaccaacgtggtgacatggctgtggctgcttgggctgagcaacagcaacgcgaaatgacgctacgggcacggcgtctctcacgctcaaaggttgaccctgaggaagaaaggaagctatttgccaaggaaaagaaggcatctatggaattctacagcacaactctgaagagacatacccttgtgttacggaagagggatattatgcgcaagaaggcagaggaggagaaggataaggagatcagtagactcctagcggcggaagggcttgagttggatacagatgaagatgaaaacaagacttttctggggtaacgcttttgatacttaccctaatttattctcttcctccattccagcaatcgttcaagatgcagcgacaacgagtgcacaaggcgaaacagttgggctcgtcggaaacgctgtaatctggagatgtgcgccaacaaatattggatcgaaataataatctcccggggcgaagtttagcattttaccggagagcagaaaggaaaggcaaatgaaggatgtgtgatggctgtagtagggttgcaatatgattcaatcaaaaaattagtaaatttcgctgtagtagggttgtaatatgattcaacaaaaaatgagtagatttcggtggcgggcctcgattttatcctgagtctcattaagctatggcacttgaaaattgcacgtttaggtttttaatctcgagttcgtattcaggtt

SEQ ID NO: 67237 - DNA, 2985 bp, Zea Mays
cacgcctgcgtcccggatttggttattaaagagggagaaaagaaagacaactacagtggtccgtatgattcgatatgtggggctcgtcttcctcgtggtctcgatccacattctattccagcagaagaactgtcagcatctttggggtacatgctacacttcgtcaatattgcggtccgtatcctatctgcgcccgttcttcatgtatcaggctttaagggttcatgctcaaatatatggcagcggagttcctactggagtacacgacagtcccagagcaaggtttaccctctttttatacctaggaaaaatgcttgcacaggcggtgaagaaacctcattgtcagaaagtggttcgagtaacttcggagttgactctgtggattctgtcaagaaacagtcttttggttccacgagaagtaatagctttaacctctctggtgcatcttcccactccatggagaggcatcaatatttgcagagaggaatatcactattgaagacaagtgttacagcaattactacttactattataactcactgggcttggatgtgccatccaatctttctacttttgaggcgttttctaagttgctccatacgttatcgtcatcaaaggcctttcgaactgcttttgaattgaacattgcttcaaggtcagaaaagcaagcacagcagctaaacagatcgatttggaagtcaagttcagccgtatcgtcggacagcagttttatggacagcatgcacacaaccatcatggtaaaattcctgttttgctcttaaattgcatgtagacttcatttttcgattctgatggaatctctgttcttgtcagcccagcactctagacaacctcctcctgaactcaaaccagagcttcttgtacaccgctaagttggtgaagcatggtggcgtgccagatagcatattcaacggttgggacctggtagagcgtgaggtcctaccgccaccgccctcgcggttcgaagatgtcgcgcagtgggaaagagccatgtatgctggcacaaaaaagaaatgacttctattgacaagtcttccttgaagtccaaactgttagaacactgcaagagcttcagtttagatatgcctctgatcatcagtttctggttcatgtacagtagcagtacaggactaacctaaccctgtggttgtgacctgtcagtcatctacctgcaagaatgcagagaagagaattgtagtgtagggtttattttctaccacatgtacgtgggtgcagtcctgtaaatttgtaaatgtaaatactgtagcgtttagaaaggaaattagattgtctggaataaatagacattccttcctatgagtacaactgaaaagaaattcttttacattcagcaagaaagcaacatgcacttaccgtaaaagaggaggacaccctgtgacggccagaaaaggaggccttatttgagaagcgaagcggtccacgtgtacaaccggaggcgttcctccgttccaccacaaaccagcggaccttcagcttctccaccgcggctccgcctcttctttcacggctccaccacgcactaaccctaaagcttccccgcgttgccggcgatgagcagccttcgagccatctcctccctcctccatatctactccacgtccgccgccgccagacgaggagccgggcggctgggcttcgcgccgtcgcccggcgggagattccgggtaccgtcgaattccggtccgcccgcgttcgtgttggacgaggtcgcgagggcggccggcggggttcggaggagggcgtccacgcgcgcggcgagttgggactcggagaaatcgccgtacgagacgcttgttccatcaccgaaaaaaaatgattcagttctaagttgagcttaatagtaccaagctgctgcaccagcaccactactttgtagtttcagatgcactgtgtgttacggacttggaattgaagatgaagctaatgtgtgttctttgtgtctcatgcgcttcaaagagctgggtagggatgcagacgaggagaccataaagactgcctacagaagattggccaagttctatcaccctgatgtttatgatggtaagggaacccttgaggaaggggaaaccgctgaagcgcgtttcattaagatccaagcagcgtatgagctgttgattgatggtgaaaggagaagagcatatgatagagagcatcatgtgaatccgatgaaggcttctcaagcatggatggagtgggtaatgaagaagcggaaagcttttgaccaacgtggtgacatggctgtggctgcttgggctgagcaacagcaacgcgaaatgacgctacgggcacggcgtctctcacgctcaaaggttgaccctgaggaagaaaggaagctatttgccaaggaaaagaaggcatctatggaattctacagcacaactctgaagagacatacccttgtgttacggaagagggatattatgcgcaagaaggcagaggaggagaaggataaggagatcagtagactcctagcggcggaagggcttgagttggatacagatgaagatgaaaacaagacttttctggggtaacgcttttgatacttaccctaatttattctcttcctccattccagcaatcgttcaagatgcagcgacaacgagtgcacaaggcgaaacagttgggctcgtcggaaacgctgtaatctggagatgtgcgccaacaaatattggatcgaaataataatctcccggggcgaagtttagcattttaccggagagcagaaaggaaaggcaaatgaaggatgtgtgatggctgtagtagggttgcaatatgattcaatcaaaaaattagtaaatttcgctgtagtagggttgtaatatgattcaacaaaaaatgagtagatttcggtggcgggcctcgattttatcctgagtctcattaagctatggcacttgaaaattgcacgtttaggtttttaatctcgagttcgtattcaggtt

SEQ ID NO: 67238 - DNA, 943 bp, Zea Mays
cacactttgaagacaatgcatcagtctcaatgtttatgatggtaagggaacccttgaggaaggggaaaccgctgaagcgcgtttcattaagatccaagcagcgtatgagctgttgattgatggtgaaaggagaagagcatatgatagagagcatcatgtgaatccgatgaaggcttctcaagcatggatggagtgggtaatgaagaagcggaaagcttttgaccaacgtggtgacatggctgtggctgcttgggctgagcaacagcaacgcgaaatgacgctacgggcacggcgtctctcacgctcaaaggttgaccctgaggaagaaaggaagctatttgccaaggaaaagaaggcatctatggaattctacagcacaactctgaagagacatacccttgtgttacggaagagggatattatgcgcaagaaggcagaggaggagaaggataaggagatcagtagactcctagcggcggaagggcttgagttggatacagatgaagatgaaaacaagacttttctggggtaacgcttttgatacttaccctaatttattctcttcctccattccagcaatcgttcaagatgcagcgacaacgagtgcacaaggcgaaacagttgggctcgtcggaaacgctgtaatctggagatgtgcgccaacaaatattggatcgaaataataatctcccggggcgaagtttagcattttaccggagagcagaaaggaaaggcaaatgaaggatgtgtgatggctgtagtagggttgcaatatgattcaatcaaaaaattagtaaatttcgctgtagtagggttgtaatatgattcaacaaaaaatgagtagatttcggtggcgggcctcgattttatcctgagtctcattaagctatggcacttgaaaattgcacgtttaggtttttaatctcgagttcgtattcaggtt

SEQ ID NO: 67239 - DNA, 827 bp, Zea Mays
cagcaactaacaactgctaattacacgtgggtccaacattcatatgccttgaaatagcttctcaagcatggatggagtgggtaatgaagaagcggaaagcttttgaccaacgtggtgacatggctgtggctgcttgggctgagcaacagcaacgcgaaatgacgctacgggcacggcgtctctcacgctcaaaggttgaccctgaggaagaaaggaagctatttgccaaggaaaagaaggcatctatggaattctacagcacaactctgaagagacatacccttgtgttacggaagagggatattatgcgcaagaaggcagaggaggagaaggataaggagatcagtagactcctagcggcggaagggcttgagttggatacagatgaagatgaaaacaagacttttctggggtaacgcttttgatacttaccctaatttattctcttcctccattccagcaatcgttcaagatgcagcgacaacgagtgcacaaggcgaaacagttgggctcgtcggaaacgctgtaatctggagatgtgcgccaacaaatattggatcgaaataataatctcccggggcgaagtttagcattttaccggagagcagaaaggaaaggcaaatgaaggatgtgtgatggctgtagtagggttgcaatatgattcaatcaaaaaattagtaaatttcgctgtagtagggttgtaatatgattcaacaaaaaatgagtagatttcggtggcgggcctcgattttatcctgagtctcattaagctatggcacttgaaaattgcacgtttaggtttttaatctcgagttcgtattcaggtt

SEQ ID NO: 67240 - DNA, 1553 bp, Zea Mays
gatatggtggattcttgcatggacttggtgtttgtgtgcagaccgtatcggagatactgcctgtggggtgagatgtgacggggtgtgtgtaggctaggtccaggtagagaggatggtggcacccgcgttatcctcttacataaataaagtaatgatatataagtactgcacatcagcacaagggaaagaaacacctgtcaaagactgaaacgagagaagtgcttgtgatgacgaccaaactacgagcagagatcatgacttcagcggtagcatgggcacgaagatttagcaagtttcttcctgctgacattctccaaccaaaggcaaggaggtgaagacgcgaccggaccccgaggtggagatccaggagaagggcgagatcttcttcttctaccgacccaaggtgggcaaggacgaggcgcacggtcccgacgacgtgcagcgcatgtacatcgtcctgcgccctgagtccgccggcggcggcggccgcaccgtcgaggagaagcaggcgccggactccggcaaggaaggccgcaagcgccgccggcagggagacggcgcccaggaagaaagcgaggagaaaggcgcggatggcggccacggcaaggaggaggtgaacatcgaggaccagccgttgctccggctggtcgtgatggggaggaagagcctgccggacccagcgaagcacagccgcccgtactggggttacgtcgagctcgtcaccaccaaggtcgacgacatcaaggacgcgctcaaggaagaggagtacagcacggcgacgcggggtaagcggcacagggcggcggcgcgggcgctgggcgagggcgtgtaccgcatcgtgaagcacgagtccgagtccggctccggcgggcggcggcggagcccgcgcccgcacacccacctcgtgtacaagctggagctcccatccacccgcggcgccatggagccgcaggaggcgatgaacgtggagccggaggcgtcgttcctcgtgcaggtcaagaaccccgacccgccctccggcggccgcgacggcgggttccgcgggctgcagagcaagcgccgggccgcgttccccgcgcacctgcaggacgcgttcgggggtcggcggtacgcgccggccgacccgccggacctgctcaactacgaggggtgcgagctgctgctgatcgcggcgtcggacgatgtggaggacgagctcgggctgcagctggagggggaagtggaggacggcgaaggtgagggtgtggagactccgcagggcgcgctggggtgctccgacctggtgaagatgttcggcgaggtggccgacgtgaagccgctgctgagcgggagctgggactagaacgactgatccgcgcaccagatgccattgtacagcgttcaggtcgtagttgggtgtttcagttcgctgctaggaggcttgtaaaacgtccggtaccctatatatagacttttttatcgtccgcatccgcaatggttcgacaaactgtatgacatccggtaaaatagcgtttcactccaggagccggtaaacctggagggtccttgttcat

SEQ ID NO: 67241 - DNA, 1323 bp, Zea Mays
tttttaccggcgccgattcacacacagcgccgccaccgcccactcgcctctcgccattctcagtctcaccttcgcttccgtcgccatcgctcggcaaggaggtgaagacgcgaccggaccccgaggtggagatccaggagaagggcgagatcttcttcttctaccgacccaaggtgggcaaggacgaggcgcacggtcccgacgacgtgcagcgcatgtacatcgtcctgcgccctgagtccgccggcggcggcggccgcaccgtcgaggagaagcaggcgccggactccggcaaggaaggccgcaagcgccgccggcagggagacggcgcccaggaagaaagcgaggagaaaggcgcggatggcggccacggcaaggaggaggtgaacatcgaggaccagccgttgctccggctggtcgtgatggggaggaagagcctgccggacccagcgaagcacagccgcccgtactggggttacgtcgagctcgtcaccaccaaggtcgacgacatcaaggacgcgctcaaggaagaggagtacagcacggcgacgcggggtaagcggcacagggcggcggcgcgggcgctgggcgagggcgtgtaccgcatcgtgaagcacgagtccgagtccggctccggcgggcggcggcggagcccgcgcccgcacacccacctcgtgtacaagctggagctcccatccacccgcggcgccatggagccgcaggaggcgatgaacgtggagccggaggcgtcgttcctcgtgcaggtcaagaaccccgacccgccctccggcggccgcgacggcgggttccgcgggctgcagagcaagcgccgggccgcgttccccgcgcacctgcaggacgcgttcgggggtcggcggtacgcgccggccgacccgccggacctgctcaactacgaggggtgcgagctgctgctgatcgcggcgtcggacgatgtggaggacgagctcgggctgcagctggagggggaagtggaggacggcgaaggtgagggtgtggagactccgcagggcgcgctggggtgctccgacctggtgaagatgttcggcgaggtggccgacgtgaagccgctgctgagcgggagctgggactagaacgactgatccgcgcaccagatgccattgtacagcgttcaggtcgtagttgggtgtttcagttcgctgctaggaggcttgtaaaacgtccggtaccctatatatagacttttttatcgtccgcatccgcaatggttcgacaaactgtatgacatccggtaaaatagcgtttcactccaggagccggtaaacctggagggtccttgttcat

SEQ ID NO: 67242 - DNA, 1354 bp, Zea Mays
tttttaccggcgccgattcacacacagcgccgccaccgcccactcgcctctcgccattctcagtctcaccttcgcttccgtcgccatcgctcgtccgaatacgtcctcgcttgcacgagcaaaggcaaggaggtgaagacgcgaccggaccccgaggtggagatccaggagaagggcgagatcttcttcttctaccgacccaaggtgggcaaggacgaggcgcacggtcccgacgacgtgcagcgcatgtacatcgtcctgcgccctgagtccgccggcggcggcggccgcaccgtcgaggagaagcaggcgccggactccggcaaggaaggccgcaagcgccgccggcagggagacggcgcccaggaagaaagcgaggagaaaggcgcggatggcggccacggcaaggaggaggtgaacatcgaggaccagccgttgctccggctggtcgtgatggggaggaagagcctgccggacccagcgaagcacagccgcccgtactggggttacgtcgagctcgtcaccaccaaggtcgacgacatcaaggacgcgctcaaggaagaggagtacagcacggcgacgcggggtaagcggcacagggcggcggcgcgggcgctgggcgagggcgtgtaccgcatcgtgaagcacgagtccgagtccggctccggcgggcggcggcggagcccgcgcccgcacacccacctcgtgtacaagctggagctcccatccacccgcggcgccatggagccgcaggaggcgatgaacgtggagccggaggcgtcgttcctcgtgcaggtcaagaaccccgacccgccctccggcggccgcgacggcgggttccgcgggctgcagagcaagcgccgggccgcgttccccgcgcacctgcaggacgcgttcgggggtcggcggtacgcgccggccgacccgccggacctgctcaactacgaggggtgcgagctgctgctgatcgcggcgtcggacgatgtggaggacgagctcgggctgcagctggagggggaagtggaggacggcgaaggtgagggtgtggagactccgcagggcgcgctggggtgctccgacctggtgaagatgttcggcgaggtggccgacgtgaagccgctgctgagcgggagctgggactagaacgactgatccgcgcaccagatgccattgtacagcgttcaggtcgtagttgggtgtttcagttcgctgctaggaggcttgtaaaacgtccggtaccctatatatagacttttttatcgtccgcatccgcaatggttcgacaaactgtatgacatccggtaaaatagcgtttcactccaggagccggtaaacctggagggtccttgttcat

SEQ ID NO: 67243 - DNA, 4776 bp, Zea Mays
attttttccacgacaattcaatgacgatgaagagttgaatcgcatacagacactcggacagtacagtacagtatgcccacaataggccgtattttccgtgaaaggaaaggtccaatctgaaaaatactctcatttttctttttgttctcttcttcttctatcctcctcgtcttcctcgtgacttctccaaggtgaaaccctagctgctgcttccgccactcacgccgctcgccgccgacgccgactatcgccggaaacaggtcaacaggagagcccgttcaagtccgggacccctcaattgtccttttctctctctccccgcccaacttcccctgctctgccgccgcctccccagtccggcgtgcatcagcagcgacatcagagtcggcgatgggaggcgtcaccgacgttctcgtccccttatgttgatgaagtggcgtgccgtggagattcctttttgaccgatttcttgccggttttttccttttctccgtcgtgcaagatcagtcctttctttttttctccgtccacggttcgatcaggttttaccttctcttcgtcgtgcaagatcaatccttcattttctccgtcgtgcaagggggtcagttgaatcagatgctccacgttacgtccacccttgagctcgatggcagaaggaagcagtagccataggaggagtgcattctcccctgggctggctgtgttattatctggcgatgaagctaagattagctcccagaagtcgcacctggtgtcctatcatgacgaaattgggcaccaggctgttgagaggacgatagagcacatctttgatctccctcacaagtcagtggtccggcctcctggaccagttgacacaggcttcgtgcactcagtggtgaggaatcaagctagaaaatttgatcttgactgggaaaactgcattcggggataccatcgcagcgtcttcattgtggacaaaggtgctgggcagaggaaggtggttcttgatgattcgagcatttgtggtagcttcaggaatgtccggggaccttcacttgttgagagttccgcccctttcagcagtgccagggctaatgcttgtgtgtggaaaggcaaatggatgtatgaggtgacccttgagacgtctggagttcagcagcttggatgggctactctctcttgtcctttcactgatcagaaaggtgttggtgatgctgatgattcatattcctttgatggccggagggtgactaagtggaacaatgacccaaagccatatggccagccatgggcagtaggtgatgtcatcggttgctgcatcaacttggatgcaggagaaatttccttttacaggaacgggacttctcttggtgttgcatttgatggaattcgcagcgtggaacctaagaagggatattatgctgcagtatccctctcggaaggagagcgttgtcatcttaatttcggctcacatccattcaggtatcctgttgatgggtttgatccattagaggcgccaccacgctcttggtcgtttgtcacataccttcttagatgcctgttccggttgctagaagttcacaacctggagaaatctgaatcagcatacttcgagaaactgaggagggtgaaaaaatttgcaccactacaagaactctttggacccatttcagaagggatctgtgcagaaattttcagtgctattgaagcaagccaggggtgccttgagtatattgcctggggctcgttgatcactctactcttagatgttttcagaactcgtgagccgcatgatttctcatgccttgatcaggttcttgaccttttcctccggttcccaggttgcacttcattatttcaggagctcattgtggccctttcttgcatgtgcaaagttgcaccacttgtgttgacagaatgcccatattctgggtcatatccatttttagcgctggtttgccaccttcttaggcataaggatgtaatgtgtttatggtggaaagcagaagatttcgttttctcgtttgaaggcttccttacaaggaagattccaaataagcaggatctacagtgccttgtgccatctgtttggtggcctggttcttctgaggatgaagttagcatgacactgacgatgacaacactctcagatgcaataaaaaagattgaggagatgcatcgtgaactttgcagcttggtaatatgctttattccaccaatgtctacgcctcagcctccaggctctgtatttaggtcctttgtacaaagtttggtgctcaaagctagaggtggagatcataggatggttgtcaatgggactttcaacaacactgtgcttgtttcattgtacacagtaatcctgcatttgttgtctgaaggattttctatggattctgctggatctgcatcatcctctaaagcgaactttgggaatggtgttggatttcttcacaaagtgggatgaaggctgcatgaatgatgaagagacacgtgttacacacactacagcacagaagccttgttgctgctcagtgacagatgttgctgttggcctaagatacaaagaaactgctaagtatgtgccatcaacttcaaaaggctcatgtaagcctatgcctgaaagatctcctcatgttgctgctgagtgcaatggtagaggtctgagtgatgagatcgaagacaaacctagcacaagtgctcaatcagaaattgaatatggataccaatcactgcatagtcttgaaaacatgccaatggcaactcaatcttcgtcggaaacacttaaagaagaagagctgcttgatgttatgttgttgttatatcatctcggcatctcaccaaattttaggcaggcattttatttcatgtctcagcagtcgcagtccatttctttactagaagaaactgacaggcagatacgagaaaaatcatgctcagagcaagtaaggcgtttgaaagaagcccggaatagctatcacgaggatttggtagattgtgtacggcattgtgtttggtaccgggccacccttttctcccagtggaagcaaaggggaatgtacgcaacttgcatgtgggtcgtggagcttcttttggtccttagtaactcaaatagcatgttccactatgttcctgagttctatgtggaatcactggtggattgtttccatgcactgcgaaggagcgatcctccttttgtttcccctgcattatttctcatgcaagggttggcctcgtttgtcactttggttgtcaagcacttcgatgatacaaggatatataaagaattcatgcttgttttcgagaacaatcgggaggctataaataaaatgcctagatcactgttatcagcttttgacaacagatcatggattcctgttacaaacatactttcccggttctgcaaaggctcaggatttgcttcctataagaatggtgaatccgcatcatctgcaacttttcaggttctactgagggagacatgtattcatgaacaagagctgttcttttcctttcttaatcgacttttcaatacactcagctggacaatgaccgagttctctatgtccatccgggagatgcaagataaaaaccaggttgctgatttgcagcagaggaagtgcagtgtaatttttgatatctcatgtagccttgcgagaatcttggaattctgtacccgagagattccttgtgcttttctcatgggaccagatatgaatttgcggaggttgactgaattggttgtctttattctcaaccacatcatatcagtagctgatgcagagttctttgacatgacactaagacggccagggcagcatcaagagaaaacaaatcgtactatgatcttggctcctcttgtgggcattatcctcagtcttatggaatgtagcagcacatcagaacgaagggagctaaatgatgtgattgcagtgttcgccagcatggattgccctgccacaatccattttgggctgcagtacctactgagctacaactggagcaatgttcttcgaggggattcatcccttgcaaagctagcgcagcttaaagagttctcccattacttccgacgcattacagcgtccgtggatggtgaagaagaagaccatagcctaaacgcgggcgatgaagacgacgaccacacttgttgcatttgctacaactgtgattccgatgcaacattccagccatgccatcaccggtcctgctttggctgcataagcaggcatctcctgaacaaccagaggtgtttcttctgcaatgcagtggtaacatcggttactagatagccgattcgcgagcgatgcgctgctctactcattgcctctttcggtatcgtgatccgaaggaagatggtgccactgatttgtcttatctattttgcttgacctgagggctggggcgctggcgtcccagagatctttccattgcttttccaggaagaacgcgttacctttgtgcacgagggtcagaagcggttcttcgttttccttgctgtatatgtaaaggccagggggagattccacgactgtaaatatgatgagatatgaaacagaaaagggggtggcagatcaacatcgaccttctgtaattagccagaataaaagaactagatgctttatattgagcagagctctcgtctttttgatcctccccacggtgtagtatcaagaatgaataaatcttctgtttcttgtctggttgtagcatgccagcatctgtaagttgtaacaattcagtgaatttatttaccttcagcaaaaagggtaaaaaggttgcctcttcaagttgttt

SEQ ID NO: 67244 - DNA, 4712 bp, Zea Mays
ctcatttttctttttgttctcttcttcttctatcctcctcgtcttcctcgtgacttctccaaggtgaaaccctagctgctgcttccgccactcacgccgctcgccgccgacgccgactatcgccggaaacaggtcaacaggagagcccgttcaagtccgggacccctcaattgtccttttctctctctccccgcccaacttcccctgctctgccgccgcctccccagtccggcgtgcatcagcagcgacatcagagtcggcgatgggaggcgtcaccgacgttctcgtccccttatgttgatgaagtggcgtgccgtggagattcctttttgaccgatttcttgccggttttaccttctcttcgtcgtgcaagatcaatccttcattttctccgtcgtgcaagggggtcagttgaatcagatgctccacgttacgtccacccttgagctcgatggcagaaggaagcagtagccataggaggagtgcattctcccctgggctggctgtgttattatctggcgatgaagctaagattagctcccagaagtcgcacctggtgtcctatcatgacgaaattgggcaccaggctgttgagaggacgatagagcacatctttgatctccctcacaagtcagtggtccggcctcctggaccagttgacacaggcttcgtgcactcagtggtgaggaatcaagctagaaaatttgatcttgactgggaaaactgcattcggggataccatcgcagcgtcttcattgtggacaaaggtgctgggcagaggaaggtggttcttgatgattcgagcatttgtggtagcttcaggaatgtccggggaccttcacttgttgagagttccgcccctttcagcagtgccagggctaatgcttgtgtgtggaaaggcaaatggatgtatgaggtgacccttgagacgtctggagttcagcagcttggatgggctactctctcttgtcctttcactgatcagaaaggtgttggtgatgctgatgattcatattcctttgatggccggagggtgactaagtggaacaatgacccaaagccatatggccagccatgggcagtaggtgatgtcatcggttgctgcatcaacttggatgcaggagaaatttccttttacaggaacgggacttctcttggtgttgcatttgatggaattcgcagcgtggaacctaagaagggatattatgctgcagtatccctctcggaaggagagcgttgtcatcttaatttcggctcacatccattcaggtatcctgttgatgggtttgatccattagaggcgccaccacgctcttggtcgtttgtcacataccttcttagatgcctgttccggttgctagaagttcacaacctggagaaatctgaatcagcatacttcgagaaactgaggagggtgaaaaaatttgcaccactacaagaactctttggacccatttcagaagggatctgtgcagaaattttcagtgctattgaagcaagccaggggtgccttgagtatattgcctggggctcgttgatcactctactcttagatgttttcagaactcgtgagccgcatgatttctcatgccttgatcaggttcttgaccttttcctccggttcccaggttgcacttcattatttcaggagctcattgtggccctttcttgcatgtgcaaagttgcaccacttgtgttgacagaatgcccatattctgggtcatatccatttttagcgctggtttgccaccttcttaggcataaggatgtaatgtgtttatggtggaaagcagaagatttcgttttctcgtttgaaggcttccttacaaggaagattccaaataagcaggatctacagtgccttgtgccatctgtttggtggcctggttcttctgaggatgaagttagcatgacactgacgatgacaacactctcagatgcaataaaaaagattgaggagatgcatcgtgaactttgcagcttggtaatatgctttattccaccaatgtctacgcctcagcctccaggctctgtatttaggtcctttgtacaaagtttggtgctcaaagctagaggtggagatcataggatggttgtcaatgggactttcaacaacactgtgcttgtttcattgtacacagtaatcctgcatttgttgtctgaaggattttctatggattctgctggatctgcatcatcctctaaagcgaactttgggaatggtgttggatttcttcacaaaggtggaaaacgcaagtttccgacacaattatttttcaggaatgatgcctatcacagtgtaattcctagaatcggtggaccaccaagtattttgatgcatcaccaatttgatgctgtggaaaatgaagtgcagtgggatgaaggctgcatgaatgatgaagagacacgtgttacacacactacagcacagaagccttgttgctgctcagtgacagatgttgctgttggcctaagatacaaagaaactgctaagtatgtgccatcaacttcaaaaggctcatgtaagcctatgcctgaaagatctcctcatgttgctgctgagtgcaatggtagaggtctgagtgatgagatcgaagacaaacctagcacaagtgctcaatcagaaattgaatatggataccaatcactgcatagtcttgaaaacatgccaatggcaactcaatcttcgtcggaaacacttaaagaagaagagctgcttgatgttatgttgttgttatatcatctcggcatctcaccaaattttaggcaggcattttatttcatgtctcagcagtcgcagtccatttctttactagaagaaactgacaggcagatacgagaaaaatcatgctcagagcaagtaaggcgtttgaaagaagcccggaatagctatcacgaggatttggtagattgtgtacggcattgtgtttggtaccgggccacccttttctcccagtggaagcaaaggggaatgtacgcaacttgcatgtgggtcgtggagcttcttttggtccttagtaactcaaatagcatgttccactatgttcctgagttctatgtggaatcactggtggattgtttccatgcactgcgaaggagcgatcctccttttgtttcccctgcattatttctcatgcaagggttggcctcgtttgtcactttggttgtcaagcacttcgatgatacaaggatatataaagaattcatgcttgttttcgagaacaatcgggaggctataaataaaatgcctagatcactgttatcagcttttgacaacagatcatggattcctgttacaaacatactttcccggttctgcaaaggctcaggatttgcttcctataagaatggtgaatccgcatcatctgcaacttttcaggttctactgagggagacatgtattcatgaacaagagctgttcttttcctttcttaatcgacttttcaatacactcagctggacaatgaccgagttctctatgtccatccgggagatgcaagataaaaaccaggttgctgatttgcagcagaggaagtgcagtgtaatttttgatatctcatgtagccttgcgagaatcttggaattctgtacccgagagattccttgtgcttttctcatgggaccagatatgaatttgcggaggttgactgaattggttgtctttattctcaaccacatcatatcagtagctgatgcagagttctttgacatgacactaagacggccagggcagcatcaagagaaaacaaatcgtactatgatcttggctcctcttgtgggcattatcctcagtcttatggaatgtagcagcacatcagaacgaagggagctaaatgatgtgattgcagtgttcgccagcatggattgccctgccacaatccattttgggctgcagtacctactgagctacaactggagcaatgttcttcgaggggattcatcccttgcaaagctagcgcagcttaaagagttctcccattacttccgacgcattacagcgtccgtggatggtgaagaagaagaccatagcctaaacgcgggcgatgaagacgacgaccacacttgttgcatttgctacaactgtgattccgatgcaacattccagccatgccatcaccggtcctgctttggctgcataagcaggcatctcctgaacaaccagaggtgtttcttctgcaatgcagtggtaacatcggttactagatagccgattcgcgagcgatgcgctgctctactcattgcctctttcggtatcgtgatccgaaggaagatggtgccactgatttgtcttatctattttgcttgacctgagggctggggcgctggcgtcccagagatctttccattgcttttccaggaagaacgcgttacctttgtgcacgagggtcagaagcggttcttcgttttccttgctgtatatgtaaaggccagggggagattccacgactgtaaatatgatgagatatgaaacagaaaagggggtggcagatcaacatcgaccttctgtaattagccagaataaaagaactagatgctttatattgagcagagctctcgtctttttgatcctccccacggtgtagtatcaagaatgaataaatcttctgtttcttgtctggttgtagcatgccagcatctgtaagttgtaacaattcagtgaatttatttaccttcagcaaaaagggtaaaaaggttgcctcttcaagttgttt

SEQ ID NO: 67245 - DNA, 4721 bp, Zea Mays
cttctatcctcctcgtcttcctcgtgacttctccaaggtgaaaccctagctgctgcttccgccactcacgccgctcgccgccgacgccgactatcgccggaaacaggtcaacaggagagcccgttcaagtccgggacccctcaattgtccttttctctctctccccgcccaacttcccctgctctgccgccgcctccccagtccggcgtgcatcagcagcgacatcagagtcggcgatgggaggcgtcaccgacgttctcgtccccttatgttgatgaagtggcgtgccgtggagattcctttttgaccgatttcttgccggttttaccttctcttcgtcgtgcaagatcaatccttcattttctccgtcgtgcaagggggtcagttgaatcagatgctccacgttacgtccacccttgagctcgatggcagaaggaagcagtagccataggaggagtgcattctcccctgggctggctgtgttattatctggcgatgaagctaagattagctcccagaagtcgcacctggtgtcctatcatgacgaaattgggcaccaggctgttgagaggacgatagagcacatctttgatctccctcacaagtcagtggtccggcctcctggaccagttgacacaggcttcgtgcactcagtggtgaggaatcaagctagaaaatttgatcttgactgggaaaactgcattcggggataccatcgcagcgtcttcattgtggacaaaggtgctgggcagaggaaggtggttcttgatgattcgagcatttgtggtagcttcaggaatgtccggggaccttcacttgttgagagttccgcccctttcagcagtgccagggctaatgcttgtgtgtggaaaggcaaatggatgtatgaggtgacccttgagacgtctggagttcagcagcttggatgggctactctctcttgtcctttcactgatcagaaaggtgttggtgatgctgatgattcatattcctttgatggccggagggtgactaagtggaacaatgacccaaagccatatggccagccatgggcagtaggtgatgtcatcggttgctgcatcaacttggatgcaggagaaatttccttttacaggaacgggacttctcttggtgttgcatttgatggaattcgcagcgtggaacctaagaagggatattatgctgcagtatccctctcggaaggagagcgttgtcatcttaatttcggctcacatccattcaggtatcctgttgatgggtttgatccattagaggcgccaccacgctcttggtcgtttgtcacataccttcttagatgcctgttccggttgctagaagttcacaacctggagaaatctgaatcagcatacttcgagaaactgaggagggtgaaaaaatttgcaccactacaagaactctttggacccatttcagaagggatctgtgcagaaattttcagtgctattgaagcaagccaggggtgccttgagtatattgcctggggctcgttgatcactctactcttagatgttttcagaactcgtgagccgcatgatttctcatgccttgatcaggttcttgaccttttcctccggttcccaggttgcacttcattatttcaggagctcattgtggccctttcttgcatgtgcaaagttgcaccacttgtgttgacagaatgcccatattctgggtcatatccatttttagcgctggtttgccaccttcttaggcataaggatgtaatgtgtttatggtggaaagcagaagatttcgttttctcgtttgaaggcttccttacaaggaagattccaaataagcaggatctacagtgccttgtgccatctgtttggtggcctggttcttctgaggatgaagttagcatgacactgacgatgacaacactctcagatgcaataaaaaagattgaggagatgcatcgtgaactttgcagcttggtaatatgctttattccaccaatgtctacgcctcagcctccaggctctgtatttaggtcctttgtacaaagtttggtgctcaaagctagaggtggagatcataggatggttgtcaatgggactttcaacaacactgtgcttgtttcattgtacacagtaatcctgcatttgttgtctgaaggattttctatggattctgctggatctgcatcatcctctaaagcgaactttgggaatggtgttggatttcttcacaaaggtggaaaacgcaagtttccgacacaattatttttcaggaatgatgcctatcacagtgtaattcctagaatcggtggaccaccaagtattttgatgcatcaccaatttgatgctgtggaaaatgaagtgcagtgggatgaaggctgcatgaatgatgaagagacacgtgttacacacactacagcacagaagccttgttgctgctcagtgacagatgttgctgttggcctaagatacaaagaaactgctaagtatgtgccatcaacttcaaaaggctcatgtaagcctatgcctgaaagatctcctcatgttgctgctgagtgcaatggtagaggtctgagtgatgagatcgaagacaaacctagcacaagtgctcaatcagaaattgaatatggataccaatcactgcatagtcttgaaaacatgccaatggcaactcaatcttcgtcggaaacacttaaagaagaagagctgcttgatgttatgttgttgttatatcatctcggcatctcaccaaattttaggcaggcattttatttcatgtctcagcagtcgcagtccatttctttactagaagaaactgacaggcagatacgagaaaaatcatgctcagagcaagtaaggcgtttgaaagaagcccggaatagctatcacgaggatttggtagattgtgtacggcattgtgtttggtaccgggccacccttttctcccagtggaagcaaaggggaatgtacgcaacttgcatgtgggtcgtggagcttcttttggtccttagtaactcaaatagcatgttccactatgttcctgagttctatgtggaatcactggtggattgtttccatgcactgcgaaggagcgatcctccttttgtttcccctgcattatttctcatgcaagggttggcctcgtttgtcactttggttgtcaagcacttcgatgatacaaggatagtgaaccctgacttgaaagatcttcttcttcaatcaatatcagttctcgtacagtataaagaattcatgcttgttttcgagaacaatcgggaggctataaataaaatgcctagatcactgttatcagcttttgacaacagatcatggattcctgttacaaacatactttcccggttctgcaaaggctcaggatttgcttcctataagaatggtgaatccgcatcatctgcaacttttcaggttgctgatttgcagcagaggaagtgcagtgtaatttttgatatctcatgtagccttgcgagaatcttggaattctgtacccgagagattccttgtgcttttctcatgggaccagatatgaatttgcggaggttgactgaattggttgtctttattctcaaccacatcatatcagtagctgatgcagagttctttgacatgacactaagacggccagggcagcatcaagagaaaacaaatcgtactatgatcttggctcctcttgtgggcattatcctcagtcttatggaatgtagcagcacatcagaacgaagggagctaaatgatgtgattgcagtgttcgccagcatggattgccctgccacaatccattttgggctgcagtacctactgagctacaactggagcaatgttcttcgaggggattcatcccttgcaaagctagcgcagcttaaagagttctcccattacttccgacgcattacagcgtccgtggatggtgaagaagaagaccatagcctaaacgcgggcgatgaagacgacgaccacacttgttgcatttgctacaactgtgattccgatgcaacattccagccatgccatcaccggtcctgctttggctgcataagcaggcatctcctgaacaaccagaggtgtttcttctgcaatgcagtggtaacatcggttactagatagccgattcgcgagcgatgcgctgctctactcattgcctctttcggtatcgtgatccgaaggaagatggtgccactgatttgtcttatctattttgcttgacctgagggctggggcgctggcgtcccagagatctttccattgcttttccaggaagaacgcgttacctttgtgcacgagggtcagaagcggttcttcgttttccttgctgtatatgtaaaggccaggtaatagtagaaaggattcaataacattgccgcagaaggaggtttctgtacacggtgggaagccagtaccaccgaaaggaatttcatggaatcgcaatttttgtagggtgtagggggagattccacgactgtaaatatgatgagatatgaaacagaaaagggggtggcagatcaacatcgaccttctgtaattagccagaataaaagaactagatgctttatattgagcagagctctcgtctttttgatcctccccacggtgtagtatcaagaatgaataaatcttctgtttcttgtctggttgtagcatgccagcatctgtaagttgtaacaattcagtgaatttatttaccttcagcaaaaagggtaaaaaggttgcctcttcaagttgttt

SEQ ID NO: 67246 - DNA, 4718 bp, Zea Mays
ctcgtcttcctcgtgacttctccaaggtgaaaccctagctgctgcttccgccactcacgccgctcgccgccgacgccgactatcgccggaaacaggtcaacaggagagcccgttcaagtccgggacccctcaattgtccttttctctctctccccgcccaacttcccctgctctgccgccgcctccccagtccggcgtgcatcagcagcgacatcagagtcggcgatgggaggcgtcaccgacgttctcgtccccttatgttgatgaagtggcgtgccgtggagattcctttttgaccgatttcttgccggttttttccttttctccgtcgtgcaagatcagtcctttctttttttctccgtccacggttcgatcaggttttaccttctcttcgtcgtgcaagatcaatccttcattttctccgtcgtgcaagggggtcagttgaatcagatgctccacgttacgtccacccttgagctcgatggcagaaggaagcagtagccataggaggagtgcattctcccctgggctggctgtgttattatctggcgatgaagctaagattagctcccagaagtcgcacctggtgtcctatcatgacgaaattgggcaccaggctgttgagaggacgatagagcacatctttgatctccctcacaagtcagtggtccggcctcctggaccagttgacacaggcttcgtgcactcagtggtgaggaatcaagctagaaaatttgatcttgactgggaaaactgcattcggggataccatcgcagcgtcttcattgtggacaaaggtgctgggcagaggaaggtggttcttgatgattcgagcatttgtggtagcttcaggaatgtccggggaccttcacttgttgagagttccgcccctttcagcagtgccagggctaatgcttgtgtgtggaaaggcaaatggatgtatgaggtgacccttgagacgtctggagttcagcagcttggatgggctactctctcttgtcctttcactgatcagaaaggtgttggtgatgctgatgattcatattcctttgatggccggagggtgactaagtggaacaatgacccaaagccatatggccagccatgggcagtaggtgatgtcatcggttgctgcatcaacttggatgcaggagaaatttccttttacaggaacgggacttctcttggtgttgcatttgatggaattcgcagcgtggaacctaagaagggatattatgctgcagtatccctctcggaaggagagcgttgtcatcttaatttcggctcacatccattcaggtatcctgttgatgggtttgatccattagaggcgccaccacgctcttggtcgtttgtcacataccttcttagatgcctgttccggttgctagaagttcacaacctggagaaatctgaatcagcatacttcgagaaactgaggagggtgaaaaaatttgcaccactacaagaactctttggacccatttcagaagggatctgtgcagaaattttcagtgctattgaagcaagccaggggtgccttgagtatattgcctggggctcgttgatcactctactcttagatgttttcagaactcgtgagccgcatgatttctcatgccttgatcaggttcttgaccttttcctccggttcccaggttgcacttcattatttcaggagctcattgtggccctttcttgcatgtgcaaagttgcaccacttgtgttgacagaatgcccatattctgggtcatatccatttttagcgctggtttgccaccttcttaggcataaggatgtaatgtgtttatggtggaaagcagaagatttcgttttctcgtttgaaggcttccttacaaggaagattccaaataagcaggatctacagtgccttgtgccatctgtttggtggcctggttcttctgaggatgaagttagcatgacactgacgatgacaacactctcagatgcaataaaaaagattgaggagatgcatcgtgaactttgcagcttggtaatatgctttattccaccaatgtctacgcctcagcctccaggctctgtatttaggtcctttgtacaaagtttggtgctcaaagctagaggtggagatcataggatggttgtcaatgggactttcaacaacactgtgcttgtttcattgtacacagtaatcctgcatttgttgtctgaaggattttctatggattctgctggatctgcatcatcctctaaagcgaactttgggaatggtgttggatttcttcacaaaggtggaaaacgcaagtttccgacacaattatttttcaggaatgatgcctatcacagtgtaattcctagaatcggtggaccaccaagtattttgatgcatcaccaatttgatgctgtggaaaatgaagtgcagtgggatgaaggctgcatgaatgatgaagagacacgtgttacacacactacagcacagaagccttgttgctgctcagtgacagatgttgctgttggcctaagatacaaagaaactgctaagtatgtgccatcaacttcaaaaggctcatgtaagcctatgcctgaaagatctcctcatgttgctgctgagtgcaatggtagaggtctgagtgatgagatcgaagacaaacctagcacaagtgctcaatcagaaattgaatatggataccaatcactgcatagtcttgaaaacatgccaatggcaactcaatcttcgtcggaaacacttaaagaagaagagctgcttgatgttatgttgttgttatatcatctcggcatctcaccaaattttaggcagtcgcagtccatttctttactagaagaaactgacaggcagatacgagaaaaatcatgctcagagcaagtaaggcgtttgaaagaagcccggaatagctatcacgaggatttggtagattgtgtacggcattgtgtttggtaccgggccacccttttctcccagtggaagcaaaggggaatgtacgcaacttgcatgtgggtcgtggagcttcttttggtccttagtaactcaaatagcatgttccactatgttcctgagttctatgtggaatcactggtggattgtttccatgcactgcgaaggagcgatcctccttttgtttcccctgcattatttctcatgcaagggttggcctcgtttgtcactttggttgtcaagcacttcgatgatacaaggatatataaagaattcatgcttgttttcgagaacaatcgggaggctataaataaaatgcctagatcactgttatcagcttttgacaacagatcatggattcctgttacaaacatactttcccggttctgcaaaggctcaggatttgcttcctataagaatggtgaatccgcatcatctgcaacttttcaggttctactgagggagacatgtattcatgaacaagagctgttcttttcctttcttaatcgacttttcaatacactcagctggacaatgaccgagttctctatgtccatccgggagatgcaagataaaaaccaggttgctgatttgcagcagaggaagtgcagtgtaatttttgatatctcatgtagccttgcgagaatcttggaattctgtacccgagagattccttgtgcttttctcatgggaccagatatgaatttgcggaggttgactgaattggttgtctttattctcaaccacatcatatcagtagctgatgcagagttctttgacatgacactaagacggccagggcagcatcaagagaaaacaaatcgtactatgatcttggctcctcttgtgggcattatcctcagtcttatggaatgtagcagcacatcagaacgaagggagctaaatgatgtgattgcagtgttcgccagcatggattgccctgccacaatccattttgggctgcagtacctactgagctacaactggagcaatgttcttcgaggggattcatcccttgcaaagctagcgcagcttaaagagttctcccattacttccgacgcattacagcgtccgtggatggtgaagaagaagaccatagcctaaacgcgggcgatgaagacgacgaccacacttgttgcatttgctacaactgtgattccgatgcaacattccagccatgccatcaccggtcctgctttggctgcataagcaggcatctcctgaacaaccagaggtgtttcttctgcaatgcagtggtaacatcggttactagatagccgattcgcgagcgatgcgctgctctactcattgcctctttcggtatcgtgatccgaaggaagatggtgccactgatttgtcttatctattttgcttgacctgagggctggggcgctggcgtcccagagatctttccattgcttttccaggaagaacgcgttacctttgtgcacgagggtcagaagcggttcttcgttttccttgctgtatatgtaaaggccagggggagattccacgactgtaaatatgatgagatatgaaacagaaaagggggtggcagatcaacatcgaccttctgtaattagccagaataaaagaactagatgctttatattgagcagagctctcgtctttttgatcctccccacggtgtagtatcaagaatgaataaatcttctgtttcttgtctggttgtagcatgccagcatctgtaagttgtaacaattcagtgaatttatttaccttcagcaaaaagggtaaaaaggttgcctcttcaagttgttt

SEQ ID NO: 67247 - DNA, 4973 bp, Zea Mays
cttctccaaggtgaaaccctagctgctgcttccgccactcacgccgctcgccgccgacgccgactatcgccggaaacaggtcaacaggagagcccgttcaagtccgggacccctcaattgtccttttctctctctccccgcccaacttcccctgctctgccgccgcctccccagtccggcgtgcatcagcagcgacatcagagtcggcgatgggaggcgtcaccgacgttctcgtccccttatgttgatgaagtggcgtgccgtggagattcctttttgaccgatttcttgccggtaagtaaccctgtttcgcttgcacggattggcctaccaatccaaatctctccgtctagtttgctgcttagttgcttgatactacaatttaatatagcccatgcccatccactttagttactctagcctctgatccatccgtccatggttccatcaggttttttccttttctccgtcgtgcaagatcagtcctttctttttttctccgtccacggttcgatcaggttttaccttctcttcgtcgtgcaagatcaatccttcattttctccgtcgtgcaagggggtcagttgaatcagatgctccacgttacgtccacccttgagctcgatggcagaaggaagcagtagccataggaggagtgcattctcccctgggctggctgtgttattatctggcgatgaagctaagattagctcccagaagtcgcacctggtgtcctatcatgacgaaattgggcaccaggctgttgagaggacgatagagcacatctttgatctccctcacaagtcagtggtccggcctcctggaccagttgacacaggcttcgtgcactcagtggtgaggaatcaagctagaaaatttgatcttgactgggaaaactgcattcggggataccatcgcagcgtcttcattgtggacaaaggtgctgggcagaggaaggtggttcttgatgattcgagcatttgtggtagcttcaggaatgtccggggaccttcacttgttgagagttccgcccctttcagcagtgccagggctaatgcttgtgtgtggaaaggcaaatggatgtatgaggtgacccttgagacgtctggagttcagcagcttggatgggctactctctcttgtcctttcactgatcagaaaggtgttggtgatgctgatgattcatattcctttgatggccggagggtgactaagtggaacaatgacccaaagccatatggccagccatgggcagtaggtgatgtcatcggttgctgcatcaacttggatgcaggagaaatttccttttacaggaacgggacttctcttggtgttgcatttgatggaattcgcagcgtggaacctaagaagggatattatgctgcagtatccctctcggaaggagagcgttgtcatcttaatttcggctcacatccattcaggtatcctgttgatgggtttgatccattagaggcgccaccacgctcttggtcgtttgtcacataccttcttagatgcctgttccggttgctagaagttcacaacctggagaaatctgaatcagcatacttcgagaaactgaggagggtgaaaaaatttgcaccactacaagaactctttggacccatttcagaagggatctgtgcagaaattttcagtgctattgaagcaagccaggggtgccttgagtatattgcctggggctcgttgatcactctactcttagatgttttcagaactcgtgagccgcatgatttctcatgccttgatcaggttcttgaccttttcctccggttcccaggttgcacttcattatttcaggagctcattgtggccctttcttgcatgtgcaaagttgcaccacttgtgttgacagaatgcccatattctgggtcatatccatttttagcgctggtttgccaccttcttaggcataaggatgtaatgtgtttatggtggaaagcagaagatttcgttttctcgtttgaaggcttccttacaaggaagattccaaataagcaggatctacagtgccttgtgccatctgtttggtggcctggttcttctgaggatgaagttagcatgacactgacgatgacaacactctcagatgcaataaaaaagattgaggagatgcatcgtgaactttgcagcttggtaatatgctttattccaccaatgtctacgcctcagcctccaggctctgtatttaggtcctttgtacaaagtttggtgctcaaagctagaggtggagatcataggatggttgtcaatgggactttcaacaacactgtgcttgtttcattgtacacagtaatcctgcatttgttgtctgaaggattttctatggattctgctggatctgcatcatcctctaaagcgaactttgggaatggtgttggatttcttcacaaaggtggaaaacgcaagtttccgacacaattatttttcaggaatgatgcctatcacagtgtaattcctagaatcggtggaccaccaagtattttgatgcatcaccaatttgatgctgtggaaaatgaagtgcagtgggatgaaggctgcatgaatgatgaagagacacgtgttacacacactacagcacagaagccttgttgctgctcagtgacagatgttgctgttggcctaagatacaaagaaactgctaagtatgtgccatcaacttcaaaaggctcatgtaagcctatgcctgaaagatctcctcatgttgctgctgagtgcaatggtagaggtctgagtgatgagatcgaagacaaacctagcacaagtgctcaatcagaaattgaatatggataccaatcactgcatagtcttgaaaacatgccaatggcaactcaatcttcgtcggaaacacttaaagaagaagagctgcttgatgttatgttgttgttatatcatctcggcatctcaccaaattttaggcaggcattttatttcatgtctcagcagtcgcagtccatttctttactagaagaaactgacaggcagatacgagaaaaatcatgctcagagcaagtaaggcgtttgaaagaagcccggaatagctatcacgaggatttggtagattgtgtacggcattgtgtttggtaccgggccacccttttctcccagtggaagcaaaggggaatgtacgcaacttgcatgtgggtcgtggagcttcttttggtccttagtaactcaaatagcatgttccactatgttcctgagttctatgtggaatcactggtggattgtttccatgcactgcgaaggagcgatcctccttttgtttcccctgcattatttctcatgcaagggttggcctcgtttgtcactttggttgtcaagcacttcgatgatacaaggatagtgaaccctgacttgaaagatcttcttcttcaatcaatatcagttctcgtacagtataaagaattcatgcttgttttcgagaacaatcgggaggctataaataaaatgcctagatcactgttatcagcttttgacaacagatcatggattcctgttacaaacatactttcccggttctgcaaaggctcaggatttgcttcctataagaatggtgaatccgcatcatctgcaacttttcagctggacaatgaccgagttctctatgtccatccgggagatgcaagataaaaaccaggttgctgatttgcagcagaggaagtgcagtgtaatttttgatatctcatgtagccttgcgagaatcttggaattctgtacccgagagattccttgtgcttttctcatgggaccagatatgaatttgcggaggttgactgaattggttgtctttattctcaaccacatcatatcagtagctgatgcagagttctttgacatgacactaagacggccagggcagcatcaagagaaaacaaatcgtactatgatcttggctcctcttgtgggcattatcctcagtcttatggaatgtagcagcacatcagaacgaagggagctaaatgatgtgattgcagtgttcgccagcatggattgccctgccacaatccattttgggctgcagtacctactgagctacaactggagcaatgttcttcgaggggattcatcccttgcaaagctagcgcagcttaaagagttctcccattacttccgacgcattacagcgtccgtggatggtgaagaagaagaccatagcctaaacgcgggcgatgaagacgacgaccacacttgttgcatttgctacaactgtgattccgatgcaacattccagccatgccatcaccggtcctgctttggctgcataagcaggcatctcctgaacaaccagaggtgtttcttctgcaatgcagtggtaacatcggttactagatagccgattcgcgagcgatgcgctgctctactcattgcctctttcggtatcgtgatccgaaggaagatggtgccactgatttgtcttatctattttgcttgacctgagggctggggcgctggcgtcccagagatctttccattgcttttccaggaagaacgcgttacctttgtgcacgagggtcagaagcggttcttcgttttccttgctgtatatgtaaaggccaggtaatagtagaaaggattcaataacattgccgcagaaggaggtttctgtacacggtgggaagccagtaccaccgaaaggaatttcatggaatcgcaatttttgtagggtgtagggggagattccacgactgtaaatatgatgagatatgaaacagaaaagggggtggcagatcaacatcgaccttctgtaattagccagaataaaagaactagatgctttatattgagcagagctctcgtctttttgatcctccccacggtgtagtatcaagaatgaataaatcttctgtttcttgtctggttgtagcatgccagcatctgtaagttgtaacaattcagtgaatttatttaccttcagcaaaaagggtaaaaaggttgcctcttcaagttgttt

SEQ ID NO: 67248 - DNA, 2540 bp, Zea Mays
ctaaattctaaaccatatagatttcttaatcattcttcccatgtaatcccacggtattctctttataatcagattgtctgaactctgaaaaacttgtcagaaaaaatgaaacaaacaaaccttatgtatcatgggcgctcaagccagccgggaccctacaagcgcacggtaccgtccacgtgctagcgggtaccacttttcgtgatccaacaccagggctcacgggacccgtccacagttccgctcagcgcggtcgcttgacatgcaggcctcacgtgtcattccccaccgctcatatctccctctccgcctcggccgcttcccctccccgctccactcttccccgcgcgcctgtcccgttggccgcgaatggttctcgcgcgagtcctcccgctgcccgccccgtcgtccgcgccccaccgccgcttactcctgccgactcaggcggcgccggccccggcgcgtgtgctcaccgtgcgggccgtcgcctgccgcgcagcgaacgccatggcggccgttgctctggacccgcccgcggtcgctccgagccccgcagaggtcgcagccgtgggcgtcggggaggagctgccggaagggtacgatcagatgatgccgaccgtggagccgtcgcggaggcggcgcgccgggctgctgctgcatcctacttcgttgcggggcccgcacggcatcggcgacctcggggacgaggcgcttgctttcctgcattggctccgcgacgccggctgcacgctctggcaggttctaccacttgttcctccaggtaggacggctggggaggatgggtctccttattctggacaggatgccaactgtggcaatacccttttgctatcccttgaggagcttgtaaaagatggtctactgatgtcagatgaacttcctgatcctgtggatacagagtatgttgaatttgacactgttgcaaatctgaaagaaccacttattgcaaaggcagcagagaggctcctactaagccatggagagctcagaacacaatatgactgcttcaaaaaaaatccaaatatatcaggttggcttgaagatgcagctctttttgctgctattgacaaaagcatcaatgcattctcttggtacgagtggcctgaacctctgaaaaatcgccatcttggagccttggaagatatatatgaaaaacagaaggattttatagagacatttatggctcagcagttcttatttcaaaggcaatggcagcggattcgtaaatatgcacaaaagctgggtatcagcatcatgggtgacatgcctatatatgttggctaccatagcgcagatgtttgggcgaacaggaaatcatttttgctggacaaaaacggtttccccactttcgttagtggcgttccacctgatgcatttagtgaaacgggtcaactatggaacagtccattgtacgactggaaagctatggaagcagattgtttttcatggtggataaagaggattaaacgtgcccttgatttgtatgatgaattccgtattgaccatttccgggggcttgcgggtttttgggcagtcccttctgtgtagatgcaaaagtagcactggttggaagctggagggctggaccaaggaatagcttttttgacacgctcttcaaagctgttggtagaatagatataatagcagaagatctgggggtaattactgaagatgtcgttcagctaaggaaatccattggggcccctgggatggcagttctccagtttgctttcggaggtggttctgacaaccctcatttgccacacaaccatgaaatggatcaagttgtgtacactggaacacatgataacgatacagttcttggctggtggcaaaatttaccagaggaagaaaagaaaattgtgatcaagtatctaccagaagccgagaatattgacataacatggacactgattacggctgccctctcttccgtcgcgaggacttccgtggtaaccatgcaggacattcttggccttgacagttctgctagaatgaatactccagctacccagaaaggaaactggaggtggaggataccgagctctgttggcttcgacagcctcagccctgaagcagcaaagctgaaggagctgcttgcgctgtacaatcgacagtgaagtccgctattgccatcgaagttccttcaataaaataggcaacaaaatgtgagcggtttggttgccaagttctatggtacgcggccccgcacagaggttgtgttctggttggctggaaacttgcgtgcactgcaagttaagacttgaacatgaagcactattgtatgtgtgtgtattctcatttttttattaaccatttttttggtcgggtctatacaagtgttttccccccattgctttgcagcaaagcattaccaatttggatccgtttctttcaggtgacttagatttactagtgtagtgtaatgtaactcgaattcctttaggccgcgttcgttttggccggtttggcctattccgggcttggttccagactgaaagaaatgacccggtttggaa

SEQ ID NO: 67249 - DNA, 2533 bp, Zea Mays
ctaaattctaaaccatatagatttcttaatcattcttcccatgtaatcccacggtattctctttataatcagattgtctgaactctgaaaaacttgtcagaaaaaatgaaacaaacaaaccttatgtatcatgggcgctcaagccagccgggaccctacaagcgcacggtaccgtccacgtgctagcgggtaccacttttcgtgatccaacaccagggctcacgggacccgtccacagttccgctcagcgcggtcgcttgacatgcaggcctcacgtgtcattccccaccgctcatatctccctctccgcctcggccgcttcccctccccgctccactcttccccgcgcgcctgtcccgttggccgcgaatggttctcgcgcgagtcctcccgctgcccgccccgtcgtccgcgccccaccgccgcttactcctgccgactcaggcggcgccggccccggcgcgtgtgctcaccgtgcgggccgtcgcctgccgcgcagcgaacgccatggcggccgttgctctggacccgcccgcggtcgctccgagccccgcagaggtcgcagccgtgggcgtcggggaggagctgccggaagggtacgatcagatgatgccgaccgtggagccgtcgcggaggcggcgcgccgggctgctgctgcatcctacttcgttgcggggcccgcacggcatcggcgacctcggggacgaggcgcttgctttcctgcattggctccgcgacgccggctgcacgctctggcaggttctaccacttgttcctccaggtaggacggctggggaggatgggtctccttattctggacaggatgccaactgtggcaatacccttttgctatcccttgaggagcttgtaaaagatggtctactgatgtcagatgaacttcctgatcctgtggatacagagtatgttgaatttgacactgttgcaaatctgaaagaaccacttattgcaaagagaggctcctactaagccatggagagctcagaacacaatatgactgcttcaaaaaaaatccaaatatatcaggttggcttgaagatgcagctctttttgctgctattgacaaaagcatcaatgcattctcttggtacgagtggcctgaacctctgaaaaatcgccatcttggagccttggaagatatatatgaaaaacagaaggattttatagagacatttatggctcagcagttcttatttcaaaggcaatggcagcggattcgtaaatatgcacaaaagctgggtatcagcatcatgggtgacatgcctatatatgttggctaccatagcgcagatgtttgggcgaacaggaaatcatttttgctggacaaaaacggtttccccactttcgttagtggcgttccacctgatgcatttagtgaaacgggtcaactatggaacagtccattgtacgactggaaagctatggaagcagattgtttttcatggtggataaagaggattaaacgtgcccttgatttgtatgatgaattccgtattgaccatttccgggggcttgcgggtttttgggcagtcccttctgtgtagatgcaaaagtagcactggttggaagctggagggctggaccaaggaatagcttttttgacacgctcttcaaagctgttggtagaatagatataatagcagaagatctgggggtaattactgaagatgtcgttcagctaaggaaatccattggggcccctgggatggcagttctccagtttgctttcggaggtggttctgacaaccctcatttgccacacaaccatgaaatggatcaagttgtgtacactggaacacatgataacgatacagttcttggctggtggcaaaatttaccagaggaagaaaagaaaattgtgatcaagtatctaccagaagccgagaatattgacataacatggacactgattacggctgccctctcttccgtcgcgaggacttccgtggtaaccatgcaggacattcttggccttgacagttctgctagaatgaatactccagctacccagaaaggaaactggaggtggaggataccgagctctgttggcttcgacagcctcagccctgaagcagcaaagctgaaggagctgcttgcgctgtacaatcgacagtgaagtccgctattgccatcgaagttccttcaataaaataggcaacaaaatgtgagcggtttggttgccaagttctatggtacgcggccccgcacagaggttgtgttctggttggctggaaacttgcgtgcactgcaagttaagacttgaacatgaagcactattgtatgtgtgtgtattctcatttttttattaaccatttttttggtcgggtctatacaagtgttttccccccattgctttgcagcaaagcattaccaatttggatccgtttctttcaggtgacttagatttactagtgtagtgtaatgtaactcgaattcctttaggccgcgttcgttttggccggtttggcctattccgggcttggttccagactgaaagaaatgacccggtttggaa

SEQ ID NO: 67250 - DNA, 2397 bp, Zea Mays
ctaaattctaaaccatatagatttcttaatcattcttcccatgtaatcccacggtattctctttataatcagattgtctgaactctgaaaaacttgtcagaaaaaatgaaacaaacaaaccttatgtatcatgggcgctcaagccagccgggaccctacaagcgcacggtaccgtccacgtgctagcgggtaccacttttcgtgatccaacaccagggctcacgggacccgtccacagttccgctcagcgcggtcgcttgacatgcaggcctcacgtgtcattccccaccgctcatatctccctctccgcctcggccgcttcccctccccgctccactcttccccgcgcgcctgtcccgttggccgcgaatggttctcgcgcgagtcctcccgctgcccgccccgtcgtccgcgccccaccgccgcttactcctgccgactcaggagctgccggaagggtacgatcagatgatgccgaccgtggagccgtcgcggaggcggcgcgccgggctgctgctgcatcctacttcgttgcggggcccgcacggcatcggcgacctcggggacgaggcgcttgctttcctgcattggctccgcgacgccggctgcacgctctggcaggttctaccacttgttcctccaggtaggacggctggggaggatgggtctccttattctggacaggatgccaactgtggcaatacccttttgctatcccttgaggagcttgtaaaagatggtctactgatgtcagatgaacttcctgatcctgtggatacagagtatgttgaatttgacactgttgcaaatctgaaagaaccacttattgcaaaggcagcagagaggctcctactaagccatggagagctcagaacacaatatgactgcttcaaaaaaaatccaaatatatcaggttggcttgaagatgcagctctttttgctgctattgacaaaagcatcaatgcattctcttggtacgagtggcctgaacctctgaaaaatcgccatcttggagccttggaagatatatatgaaaaacagaaggattttatagagacatttatggctcagcagttcttatttcaaaggcaatggcagcggattcgtaaatatgcacaaaagctgggtatcagcatcatgggtgacatgcctatatatgttggctaccatagcgcagatgtttgggcgaacaggaaatcatttttgctggacaaaaacggtttccccactttcgttagtggcgttccacctgatgcatttagtgaaacgggtcaactatggaacagtccattgtacgactggaaagctatggaagcagattgtttttcatggtggataaagaggattaaacgtgcccttgatttgtatgatgaattccgtattgaccatttccgggggcttgcgggtttttgggcagtcccttctgatgcaaaagtagcactggttggaagctggagggctggaccaaggaatagcttttttgacacgctcttcaaagctgttggtagaatagatataatagcagaagatctgggggtaattactgaagatgtcgttcagctaaggaaatccattggggcccctgggatggcagttctccagtttgctttcggaggtggttctgacaaccctcatttgccacacaaccatgaaatggatcaagttgtgtacactggaacacatgataacgatacagttcttggctggtggcaaaatttaccagaggaagaaaagaaaattgtgatcaagtatctaccagaagccgagaatattgacataacatggacactgattacggctgccctctcttccgtcgcgaggacttccgtggtaaccatgcaggacattcttggccttgacagttctgctagaatgaatactccagctacccagaaaggaaactggaggtggaggataccgagctctgttggcttcgacagcctcagccctgaagcagcaaagctgaaggagctgcttgcgctgtacaatcgacagtgaagtccgctattgccatcgaagttccttcaataaaataggcaacaaaatgtgagcggtttggttgccaagttctatggtacgcggccccgcacagaggttgtgttctggttggctggaaacttgcgtgcactgcaagttaagacttgaacatgaagcactattgtatgtgtgtgtattctcatttttttattaaccatttttttggtcgggtctatacaagtgttttccccccattgctttgcagcaaagcattaccaatttggatccgtttctttcaggtgacttagatttactagtgtagtgtaatgtaactcgaattcctttaggccgcgttcgttttggccggtttggcctattccgggcttggttccagactgaaagaaatgacccggtttggaa

SEQ ID NO: 67251 - DNA, 1632 bp, Zea Mays
caaaataaagctgatattcgagttatcagcacagctaggacatgcaatgttattttgattgttcttgatgccataaaaccaataactcacaagcgtcttattgagaaggagcttgaaggatttggcattaggttgaacaaaacaccacccaatttgactttcagaagaaaggacaagggtggaatcaacttcacatcaacagtgacgaacacacatttggaccttgatacagtaaaagcaatctgtagcgagtacaggatacataatgctgatgtctccctgagatatgatgctacagcagatgatctcatagatgttattgaaggaagccggatttacactccttgcgtatatgttgtcaacaagattgatcagataacactcgaggagctggaaatcttggacaaacttccccattactgcccggttagtgctcatcttgaatggaatcttgatggacttctggagaaggtatgggaatacttggatttggttaggatatacacaaaacctaaagggctgaacccagattatgaggatcctgttatcgtatcatctaagaagaaaaccgtggaagatttctgcgacagaatccacaaggacatggtcaaacaatttaaatacgctctggtatggggttccagtgtgaaacataagcctcagagagttggcaaggagcatgagcttgacgatgaggacgtcgttcagatcatcaagaaaatataggcgtatcatgtggtggaacgaaacctgtttttttctgcaaaactgggagcgttgaggattttgttgagtagtagcctcgcgagaagagcttgaactcggcctttgcttgttggtgaggctcatatgtaatgttccctgttctcagaaaatttgctttgatccaaagacaatgtgagtcggcatttacttatatacaacgagtcatgtagctgtgatgtaacttcctctaacttggtgccatgtggactggagtcaccgatgtgtgctgccaagtgtctggcccaaccgttgaacacgtggagagatgctctccatatctttagaggaggatataaggtgatttgatgatttatttattaagtgtttgtaccttatctggtgttcgtacgttttctagtgatgattatgataattcataatcatctttggtggtgtgctatgtgctgtttccccaacgactcgaatccggaatccccattctccccgagtggcctctggcttgacaaaacaagaacaggaccggttcctgttccctagatctgcgtagaggcgacgggacacctgaatccgcaaaaaagggttcgcggtttgattgagaggaacgcaggaacccagcgtcaaaacccaatcttgacgctcgtgcagccgtgcgccatcgtcttcttcgtgtgatatagtgggtacgtcagcgacgagacgatgggcaccttcgctcccatccttcaccggcggccgcttgagcggtacaggctccacacgcgggccgaagaggaggcgaagaaccgcgtcagcctctccaccgtcgtccgcggcgtacttcggcagcagctcgtgtaggccgtcatcgagatgatcttgttcatggtaaggggacaggtagctctggtcggcataccgtgaaacaca

SEQ ID NO: 67252 - DNA, 1779 bp, Zea Mays
ttaagaaaagcaccagtggcatcgagcgcatcgcgcactcgtgctcgggctcggctccgtccgcgactccgccccacccctttccgtcagcggccgcaaccaccacaccaccacccaatggaggccgtgtacaacagcgtcatcagcctcggcgtcaaggccattgggtggaggcctgagtggaggttcaagtggaagcccctcgacagcgccgacgaggagaaggggaccgcccacttccctatggtcctggttcagatacccatgtacaacgagctggaggtgtacaagctgtcaatagcggcagcatgtgagctgcagtggccaaaggacaggatagtaattcaagtgttggacgattctactgacccctttatcaagaatttggtggagcttgaatgtgagcactgggtgaacaaaggtgtcaatattaagtatgccacaagaaccagccgcaagggattcaaggcaggagctctgaagaaaggaatggaatgtgactatgcatggcaaagcgaatacattgctatatttgatgctgatttccaacctgaaccagattttctgctccaaactgtcccattccttctgcacaatccagaagttgcacttgttcaagctcggtggtccttcgtgaatgacacgacaagcctgctgacaagggtacaaaagatgttttacgactaccacttcaaagttgaacaagaagcaggatcagcgacctttgccttcttcagtttcaacggaactgctggagtgtggcgtacaggagccataagagatgcaggaggttggaaggaccgaactacagttgaagacatggacttggcggttcgagcaacactaaagggctggaaattcgtatatgttggagacgttagagtcaagagtgaactgccgtccacttacaaggcctactgtcggcagcaattccggtggtctagtggtggtgcaaacttattccgtaagatggcaaaggatgttttgtttgccaaggatatatcactcgtcaagaagttctatatgctctatagcttcttctttgtgaggagagttgtagcgccgacggctgcctgtattctctacaatgtcatcatccccatctcagtcacaatcccggagctttacctaccagtgtggggtgttgcctatattcccatggtgcttaccgtggtcacagctataagacatccaaaaaatctacacatactgccattttggattttgtttgagagtgtgatgacattgcatcggatgagggctgcgatgactggactgctggagctagaaggattcaaccagtggattgtgacaaagaaggtggggaatgatctcgaggacactgaagttcctttgcttcagaaaacccggaaaaggctgagagacagagtcaatctccccgagattggattttcggtgtttctcttcctctgtgcatcatacaacctggtgttccatgggaaaacaagctactacttatatatgtaccttcaggggttagcatttctgttactagggtttaacttcactggcaattgttcttgctaccaatgatagcatgtcaaagctgtacgaattgctgattgatattcattttctggtcatgcgttcgtaatgtttcaaatggtttagatcttagatgcatagaaagatggcattcattattctgcacgcttgcagcgattcagatcttgtaatacaatactgtcttaacaaagctcaaaggaagggaatatggaagtcgcaattttcagaaagtgcggggtattgaatgggagg

SEQ ID NO: 67253 - DNA, 1789 bp, Zea Mays
ttaagaaaagcaccagtggcatcgagcgcatcgcgcactcgtgctcgggctcggctccgtccgcgactccgccccacccctttccgtcagcggccgcaaccaccacaccaccacccaatggaggccgtgtacaacagcgtcatcagcctcggcgtcaaggccattgggtggaggcctgagtggaggttcaagtggaagcccctcgacagcgccgacgaggagaaggggaccgcccacttccctatggtcctggttcagatacccatgtacaacgagctggaggtgtacaagctgtcaatagcggcagcatgtgagctgcagtggccaaaggacaggatagtaattcaagtgttggacgattctactgacccctttatcaagaatttggtggagcttgaatgtgagcactgggtgaacaaaggtgtcaatattaagtatgccacaagaaccagccgcaagggattcaaggcaggagctctgaagaaaggaatggaatgtgactatgcatggcaaagcgaatacattgctatatttgatgctgatttccaacctgaaccagattttctgctccaaactgtcccattccttctgcacaatccagaagttgcacttgttcaagctcggtggtccttcgaattttgcagtgaatgacacgacaagcctgctgacaagggtacaaaagatgttttacgactaccacttcaaagttgaacaagaagcaggatcagcgacctttgccttcttcagtttcaacggaactgctggagtgtggcgtacaggagccataagagatgcaggaggttggaaggaccgaactacagttgaagacatggacttggcggttcgagcaacactaaagggctggaaattcgtatatgttggagacgttagagtcaagagtgaactgccgtccacttacaaggcctactgtcggcagcaattccggtggtctagtggtggtgcaaacttattccgtaagatggcaaaggatgttttgtttgccaaggatatatcactcgtcaagaagttctatatgctctatagcttcttctttgtgaggagagttgtagcgccgacggctgcctgtattctctacaatgtcatcatccccatctcagtcacaatcccggagctttacctaccagtgtggggtgttgcctatattcccatggtgcttaccgtggtcacagctataagacatccaaaaaatctacacatactgccattttggattttgtttgagagtgtgatgacattgcatcggatgagggctgcgatgactggactgctggagctagaaggattcaaccagtggattgtgacaaagaaggtggggaatgatctcgaggacactgaagttcctttgcttcagaaaacccggaaaaggctgagagacagagtcaatctccccgagattggattttcggtgtttctcttcctctgtgcatcatacaacctggtgttccatgggaaaacaagctactacttatatatgtaccttcaggggttagcatttctgttactagggtttaacttcactggcaattgttcttgctaccaatgatagcatgtcaaagctgtacgaattgctgattgatattcattttctggtcatgcgttcgtaatgtttcaaatggtttagatcttagatgcatagaaagatggcattcattattctgcacgcttgcagcgattcagatcttgtaatacaatactgtcttaacaaagctcaaaggaagggaatatggaagtcgcaattttcagaaagtgcggggtattgaatgggagg

SEQ ID NO: 67254 - DNA, 1212 bp, Zea Mays
atctatccaaccacaacccagcgcatcatcgcagcggcggcaactcgtcggagcaagcaaagcaaagcaaagctagcaccttccttctcacgacaagctaataccaagcccgatcgattgacatggccgagaggacgaacgcgatggcggcgccgcggccgctcctgcgccggatgctctcgttccgggagccgctcctggtcatcccgtacctgctcagcttcctgggcgccgcggcctcggcgctggcgcgcagccactcgtcgctgctgcactcgctcgccagggcgctgttcccggccggcggcggccgggacgcccggatgagcctgttccagttcgtcaggttcctcgagaacggcctgtgctgaagccacagagggggcagagaagctgtcccttcattttttttcttcttcttcgttcttcttcgtttgcctcggctgctcgtggcaggagatgagacagtgcaccattcggagaggtgttcactggctggcgcgcgtgtgtttttccctcctgccatgagctttgggggtggactcaactgtgcagcaattaacgcactaattcccaaactaagaactactatgatttaatggaactaatttgccggttgcaaacatctcgatttgatgatcttctactatctgtaccaatgctaaatcctggatgacttgtcttttttttttctctttttatttttttgccaactcgaacgcttttatctgaagagacgataaatgtaatttctagcatgatcagacgcatgatacatccgcttcattccacgtgaaggtcaatccatgtgggggcgaatttgaaactcactattcgtagtccaccacgcgcgcctggagtttctgcaaacttcggtcaaaaatccaagcgcaatggtttcaaccttcaaagcatcccaccgaattcgccgaatctggcccgatccgtttcgtcagggtcgcagctttcatgtgttcctgttgttagttggcgtcgatgccggcctgacccagatgctgctgtggcggcgcccttcccttccacgaagtttcgcaggggtctccttcatttcagacttcagaggcacagagaacttgggtggcgttggaaacttgccggcatgacaccgacgtgcccggaacggtccaagccggggtagcctttgctagcagtagcactagcactagcagtccccccgcacgggctcggaag

SEQ ID NO: 67255 - DNA, 1721 bp, Zea Mays
atctatcaaaaaccctagcaaagccacctcaactctcctgctggtccggcgcaggctccgctccgttcccccgctgtagttcgagtgttcgacccggcggccggcggcgacgcgctcgtggtttccagcgatgtcggcgcaggcgggtccagggacgtactccccggcggcggccgcaggagacaggcggcgggagaggaaggaggagctgcggcgccacctcgccgaagacgccgactggccgcgggccgacggccgctccttccacgactgccggccagcgtttatgcagacaggaccaactactgctgcatcagggtctgcttatgcagaatttgggaagacaaaggtcattgtatcggtttttggaccaagggaaagtaagaaagcaatgatgtacagtgacgttggtaggctcaattgcaatgtgagctatacaacctttgccactccagtgcgtggacagggagcagacaacaaagagtattcatcgatgcttcataaagctctggaaggcgcagtaatgctgcacacttttccaaagaccactgttgatgtttttgccttggttcttgagtctggtggcagtatgatactattctagccttgattttttgagaaaaatataatgcatagatttttttacatatgtgcaagttctgttcttgtttaagaagtaggaatgctgctcatctttgtgacatgctagagcctctaatagttagagctaagtcgtaaatgacaaatgcatagattgaacgtgttatccatactcccatagtatttgcttattctacaaaactgtacggggttaatgtgttttgagttgataattcttatgtcagtcagatattgctatattattggtagaaatgatggattgtgggtacattttttccttcaaaaaagggataatttttacagcccatcttccattatatatatctattgtttcaatggaaacctttcttctatgaccaattctttctgcataagtttccttgttgaaatgcaggaccttacctgcagttgtttcgtttcaggtgatcttcccatcattatatcatgcgctagtcttgcattggcagatgctggaatcatgatgtatgaccttgttacatctgtatccgtgtcctgtttcagaaagaacatcatcatcgatccaacctcagacgaggaagcatggcaagacggaagccttgtggtggctttcatgccagcccgcaaggagatcacgcagctcacgctcactggagagtggagcgatggcagaataaccaatgcagtagagctctgtatggatgcttgcagcaagctgggtgacatattgcgtgaccgcttgaaagataccgctaccttgacgtgtgaatgacgtgttagagagagcactggcaacaacagatgttcttagctgtacaaattctgtaggcaggggaggctgatcggcctgatgtttgagtgagcatgatgcatggttatgatgatggtctccttcacggcaaaagctgtcaaaccgggaagaaattgcagggcagtgtgtatttggcatgtaacgtacttctgactgacctttgccttcatgtagcatctgtatctttctttttccgcgtactgtaacacttcttactctaccaggagctggaatttttttggttcgggtgaaaaaacattttgctgctctcagcttttcaccccttgtttccacatgctttaggtcggac

SEQ ID NO: 67256 - DNA, 1623 bp, Zea Mays
atcctccacccgcacccgccccatctcgcgcggcgaactgcgcgccctggttctgggaagaaacatttcactgcgttttttccctggcgcggcccagatcaagatcttaacgaccctcacggcccagcgccaggccgccagcatccgacgcatctaaccccttccgatgcgtgtcccgatccaacggtctccgtcgtcccgtccgcgtgataaagcgccggcgcctcttctcgcgtggcctcccgaaggttctaggctcgattgaacaaattggagcggcactacactcctccacgcctccacctccagcctcccactgatctggcctctctcgaggaatctatggattcgatgtgaagtcccaaagggtagcttttagggagggggaatgatgagatgttggaagttcacaagttgtgtctttcttaaaggctggtaaccttaatcctagatcaatatgagaaggggctacagttacagtccttcaccaccaaggggctacaggagaagggcgcgcagtccaagtcctcatgatcattatggtggtcgtggtagggatctcccaaccagtcttctggtcaggaatctccgtcgggactgcaggccagaagacctccgtcgcccatttggacagtttggtcgagttaaagatatatatcttccaagagattattacactggggatccccgagggtttgggtttgtccagtattatgatcctgctgatgctgctgatgcgaagtactatatggatgggcaggtagttcttggtaggcaaataacagttgtttttgcagaagagaacagaaagaagcctcaagagatgagagctagggacagagtcaggggtcattcttatgatgacaggaggtattctcgctctaggtcgcctcgttattataggggccgctctccttcacgcagccaaagctactcgaggtctccacctcagaatccaagacacagacttagagagaggtcctactccggctcacctgtggacagcagatcaagaagtgggagcccttatgaggatggatatcgcaaatcatcacggagagagaggtctctttctgtcagcggatgaagcagttttacggtctagagctattgctgtgaatctgcgcatggtggcctacttgctatgtctttctgaaccatatatgttctgtctagattatcattcccagtaccagagaagtatcgtgagactgtttgctgtactttctagtcttgaggatacagaagggggtcaccgattctctcagtagatggactattgaccactagctacgccagttccactgctttgtgtatttacaggcagctttgcggtttgaataaaattgtttgcatcgtgaaagctaattggtaaaaagactgaatcatgaaacgaacgttttgcatccctgttccctgatggcatttggatacgattttttgttctttcgacgaacaatttggcaaatctgcatcttattgagctgatgagaagtgcaggttggctaaatctttgaaggtcttgttcggttctatggggttctatgcgataggagattgaggggattaaatatctttctattcaattttgaattgaaagtaatttaatcacaccaacatttt

SEQ ID NO: 67257 - DNA, 1407 bp, Zea Mays
atcctccacccgcacccgccccatctcgcgcggcgaactgcgcgccctggttctgggaagaaacatttcactgcgttttttccctggcgcggcccagatcaagatcttaacgaccctcacggcccagcgccaggccgccagcatccgacgcatctaaccccttccgatgcgtgtcccgatccaacggtctccgtcgtcccgtccgcgtgataaagcgccggcgcctcttctcgcgtggcctcccgaaggttctaggctcgattgaacaaattggagcggcactacactcctccacgcctccacctccagcctcccactgatctggcctctctcgagttaatcctagatcaatatgagaaggggctacagttacagtccttcaccaccaaggggctacaggagaagggcgcgcagtccaagtcctcatgatcattatggtggtcgtggtagggatctcccaaccagtcttctggtcaggaatctccgtcgggactgcaggccagaagacctccgtcgcccatttggacagtttggtcgagttaaagatatatatcttccaagagattattacactggggatccccgagggtttgggtttgtccagtattatgatcctgctgatgctgctgatgcgaagtactatatggatgggcaggtagttcttggtaggcaaataacagttgtttttgcagaagagaacagaaagaagcctcaagagatgagagctagggacagagtcaggggtcattcttatgatgacaggaggtattctcgctctaggtcgcctcgttattataggggccgctctccttcacgcagccaaagctactcgaggtctccacctcagaatccaagacacagacttagagagaggtcctactccggctcacctgtggacagcagatcaagaagtgggagcccttatgaggatggatatcgcaaatcatcacggagagagagattatcattcccagtaccagagaagtatcgtgagactgtttgctgtactttctagtcttgaggatacagaagggggtcaccgattctctcagtagatggactattgaccactagctacgccagttccactgctttgtgtatttacaggcagctttgcggtttgaataaaattgtttgcatcgtgaaagctaattggtaaaaagactgaatcatgaaacgaacgttttgcatccctgttccctgatggcatttggatacgattttttgttctttcgacgaacaatttggcaaatctgcatcttattgagctgatgagaagtgcaggttggctaaatctttgaaggtcttgttcggttctatggggttctatgcgataggagattgaggggattaaatatctttctattcaattttgaattgaaagtaatttaatcacaccaacatttt

SEQ ID NO: 67258 - DNA, 1482 bp, Zea Mays
cgcgcggcgaactgcgcgccctggttctgggaagaaacatttcactgcgttttttccctggcgcggcccagatcaagatcttaacgaccctcacggcccagcgccaggccgccagcatccgacgcatctaaccccttccgatgcgtgtcccgatccaacggtctccgtcgtcccgtccgcgtgataaagcgccggcgcctcttctcgcgtggcctcccgaaggttctaggctcgattgaacaaattggagcggcactacactcctccacgcctccacctccagcctcccactgatctggcctctctcgagatcaatatgagaaggggctacagttacagtccttcaccaccaaggggctacaggagaagggcgcgcagtccaagtcctcatgatcattatggtggtcgtggtagggatctcccaaccagtcttctggtcaggaatctccgtcgggactgcaggccagaagacctccgtcgcccatttggacagtttggtcgagttaaagatatatatcttccaagagattattacactggggatccccgagggtttgggtttgtccagtattatgatcctgctgatgctgctgatgcgaagtactatatggatgggcaggtagttcttggtaggcaaataacagttgtttttgcagaagagaacagaaagaagcctcaagagatgagagctagggacagagtcaggggtcattcttatgatgacaggaggtattctcgctctaggtcgcctcgttattataggggccgctctccttcacgcagccaaagctactcgaggtctccacctcagaatccaagacacagacttagagagaggtcctactccggctcacctgtggacagcagatcaagaagtgggagcccttatgaggatggatatcgcaaatcatcacggagagagaggtctctttctgtcagcggatgaagcagttttacggtctagagctattgctgtgaatctgcgcatggtggcctacttgctatgtctttctgaaccatatatgttctgtctagattatcattcccagtaccagagaagtatcgtgagactgtttgctgtactttctagtcttgaggatacagaagggggtcaccgattctctcagtagatggactattgaccactagctacgccagttccactgctttgtgtatttacaggcagctttgcggtttgaataaaattgtttgcatcgtgaaagctaattggtaaaaagactgaatcatgaaacgaacgttttgcatccctgttccctgatggcatttggatacgattttttgttctttcgacgaacaatttggcaaatctgcatcttattgagctgatgagaagtgcaggttggctaaatctttgaaggtcttgttcggttctatggggttctatgcgataggagattgaggggattaaatatctttctattcaattttgaattgaaagtaatttaatcacaccaacatttt

SEQ ID NO: 67259 - DNA, 1658 bp, Zea Mays
aaacatttcactgcgttttttccctggcgcggcccagatcaagatcttaacgaccctcacggcccagcgccaggccgccagcatccgacgcatctaaccccttccgatgcgtgtcccgatccaacggtctccgtcgtcccgtccgcgtgataaagcgccggcgcctcttctcgcgtggcctcccgaaggttctaggctcgattgaacaaattggagcggcactacactcctccacgcctccacctccagcctcccactgatctggcctctctcgaggtgagcgcgcctttaatcctagatcaatatgagaaggggctacagttacagtccttcaccaccaaggggctacaggagaagggcgcgcagtccaagtcctcatgatcattatggtggtcgtggtagggatctcccaaccagtcttctggtcaggaatctccgtcgggactgcaggccagaagacctccgtcgcccatttggacagtttggtcgagttaaagatatatatcttccaagagattattacactggacgcaacacaagcctaaaagattattgttgaagagaaggaagaaatagagaaattcaattaagtgatctgcaacttaaaagagtactcagtactgttcaagagatgggaagaaatagagttacaagtttaagagatactcacatcatgaagagtttcaagtctgaatttaaactctcatgagtgcaagggatccccgagggtttgggtttgtccagtattatgatcctgctgatgctgctgatgcgaagtactatatggatgggcaggtagttcttggtaggcaaataacagttgtttttgcagaagagaacagaaagaagcctcaagagatgagagctagggacagagtcaggggtcattcttatgatgacaggaggtattctcgctctaggtcgcctcgttattataggggccgctctccttcacgcagccaaagctactcgaggtctccacctcagaatccaagacacagacttagagagaggtcctactccggctcacctgtggacagcagatcaagaagtgggagcccttatgaggatggatatcgcaaatcatcacggagagagaggtctctttctgtcagcggatgaagcagttttacggtctagagctattgctgtgaatctgcgcatggtggcctacttgctatgtctttctgaaccatatatgttctgtctagattatcattcccagtaccagagaagtatcgtgagactgtttgctgtactttctagtcttgaggatacagaagggggtcaccgattctctcagtagatggactattgaccactagctacgccagttccactgctttgtgtatttacaggcagctttgcggtttgaataaaattgtttgcatcgtgaaagctaattggtaaaaagactgaatcatgaaacgaacgttttgcatccctgttccctgatggcatttggatacgattttttgttctttcgacgaacaatttggcaaatctgcatcttattgagctgatgagaagtgcaggttggctaaatctttgaaggtcttgttcggttctatggggttctatgcgataggagattgaggggattaaatatctttctattcaattttgaattgaaagtaatttaatcacaccaacatttt

SEQ ID NO: 67260 - DNA, 1466 bp, Zea Mays
atttcactgcgttttttccctggcgcggcccagatcaagatcttaacgaccctcacggcccagcgccaggccgccagcatccgacgcatctaaccccttccgatgcgtgtcccgatccaacggtctccgtcgtcccgtccgcgtgataaagcgccggcgcctcttctcgcgtggcctcccgaaggttctaggctcgattgaacaaattggagcggcactacactcctccacgcctccacctccagcctcccactgatctggcctctctcgaggtgagcgcgcctttaatcctagatcaatatgagaaggggctacagttacagtccttcaccaccaaggggctacaggagaagggcgcgcagtccaagtcctcatgatcattatggtggtcgtggtagggatctcccaaccagtcttctggtcaggaatctccgtcgggactgcaggccagaagacctccgtcgcccatttggacagtttggtcgagttaaagatatatatcttccaagagattattacactggggatccccgagggtttgggtttgtccagtattatgatcctgctgatgctgctgatgcgaagtactatatggatgggcaggtagttcttggtaggcaaataacagttgtttttgcagaagagaacagaaagaagcctcaagagatgagagctagggacagagtcaggggtcattcttatgatgacaggaggtattctcgctctaggtcgcctcgttattataggggccgctctccttcacgcagccaaagctactcgaggtctccacctcagaatccaagacacagacttagagagaggtcctactccggctcacctgtggacagcagatcaagaagtgggagcccttatgaggatggatatcgcaaatcatcacggagagagaggtctctttctgtcagcggatgaagcagttttacggtctagagctattgctgtgaatctgcgcatggtggcctacttgctatgtctttctgaaccatatatgttctgtctagattatcattcccagtaccagagaagtatcgtgagactgtttgctgtactttctagtcttgaggatacagaagggggtcaccgattctctcagtagatggactattgaccactagctacgccagttccactgctttgtgtatttacaggcagctttgcggtttgaataaaattgtttgcatcgtgaaagctaattggtaaaaagactgaatcatgaaacgaacgttttgcatccctgttccctgatggcatttggatacgattttttgttctttcgacgaacaatttggcaaatctgcatcttattgagctgatgagaagtgcaggttggctaaatctttgaaggtcttgttcggttctatggggttctatgcgataggagattgaggggattaaatatctttctattcaattttgaattgaaagtaatttaatcacaccaacatttt

SEQ ID NO: 67261 - DNA, 2055 bp, Zea Mays
cctggcgcggcccagatcaagatcttaacgaccctcacggcccagcgccaggccgccagcatccgacgcatctaaccccttccgatgcgtgtcccgatccaacggtctccgtcgtcccgtccgcgtgataaagcgccggcgcctcttctcgcgtggcctcccgaaggttctaggctcgattgaacaaattggagcggcactacactcctccacgcctccacctccagcctcccactgatctggcctctctcgaggtgagcgcgcctgtaagtgatcctttctcgcagattatttttgtagttttcgatggaggcggattagctttgaactggtggatcgtgttgggcatcgtatcgtgattggttctgttctgtgaatttcgctagtttttttttctcccacagattactctgaatatgcgtgcccttaattgtgttactgttacgatttggcttcgtcgcggtagtctgttgtgatgcgcccattatttcgcgattaattgtatgtgattctgcgttcgattggttgagaataggcagtgaacccttccgtttcttatttcactgctaactgtatctaggaatctatggattcgatgtgaagtcccaaagggtagcttttagggagggggaatgatgagatgttggaagttcacaagttgtgtctttcttaaaggctggtaaccttaatcctagatcaatatgagaaggggctacagttacagtccttcaccaccaaggggctacaggagaagggcgcgcagtccaagtcctcatgatcattatggtggtcgtggtagggatctcccaaccagtcttctggtcaggaatctccgtcgggactgcaggccagaagacctccgtcgcccatttggacagtttggtcgagttaaagatatatatcttccaagagattattacactggacgcaacacaagcctaaaagattattgttgaagagaaggaagaaatagagaaattcaattaagtgatctgcaacttaaaagagtactcagtactgttcaagagatgggaagaaatagagttacaagtttaagagatactcacatcatgaagagtttcaagtctgaatttaaactctcatgagtgcaagggatccccgagggtttgggtttgtccagtattatgatcctgctgatgctgctgatgcgaagtactatatggatgggcaggtagttcttggtaggcaaataacagttgtttttgcagaagagaacagaaagaagcctcaagagatgagagctagggacagagtcaggggtcattcttatgatgacaggaggtattctcgctctaggtcgcctcgttattataggggccgctctccttcacgcagccaaagctactcgaggtctccacctcagaatccaagacacagacttagagagaggtcctactccggctcacctgtggacagcagatcaagaagtgggagcccttatgaggatggatatcgcaaatcatcacggagagagaggtctctttctgtcagcggatgaagcagttttacggtctagagctattgctgtgaatctgcgcatggtggcctacttgctatgtctttctgaaccatatatgttctgtctagattatcattcccagtaccagagaagtatcgtgagactgtttgctgtactttctagtcttgaggatacagaagggggtcaccgattctctcagtagatggactattgaccactagctacgccagttccactgctttgtgtatttacaggcagctttgcggtttgaataaaattgtttgcatcgtgaaagctaattggtaaaaagactgaatcatgaaacgaacgttttgcatccctgttccctgatggcatttggatacgattttttgttctttcgacgaacaatttggcaaatctgcatcttattgagctgatgagaagtgcaggttggctaaatctttgaaggtcttgttcggttctatggggttctatgcgataggagattgaggggattaaatatctttctattcaattttgaattgaaagtaatttaatcacaccaacatttt

SEQ ID NO: 67262 - DNA, 1596 bp, Zea Mays
aagatcttaacgaccctcacggcccagcgccaggccgccagcatccgacgcatctaaccccttccgatgcgtgtcccgatccaacggtctccgtcgtcccgtccgcgtgataaagcgccggcgcctcttctcgcgtggcctcccgaaggttctaggctcgattgaacaaattggagcggcactacactcctccacgcctccacctccagcctcccactgatctggcctctctcgagatcaatatgagaaggggctacagttacagtccttcaccaccaaggggctacaggagaagggcgcgcagtccaagtcctcatgatcattatggtggtcgtggtagggatctcccaaccagtcttctggtcaggaatctccgtcgggactgcaggccagaagacctccgtcgcccatttggacagtttggtcgagttaaagatatatatcttccaagagattattacactggacgcaacacaagcctaaaagattattgttgaagagaaggaagaaatagagaaattcaattaagtgatctgcaacttaaaagagtactcagtactgttcaagagatgggaagaaatagagttacaagtttaagagatactcacatcatgaagagtttcaagtctgaatttaaactctcatgagtgcaagggatccccgagggtttgggtttgtccagtattatgatcctgctgatgctgctgatgcgaagtactatatggatgggcaggtagttcttggtaggcaaataacagttgtttttgcagaagagaacagaaagaagcctcaagagatgagagctagggacagagtcaggggtcattcttatgatgacaggaggtattctcgctctaggtcgcctcgttattataggggccgctctccttcacgcagccaaagctactcgaggtctccacctcagaatccaagacacagacttagagagaggtcctactccggctcacctgtggacagcagatcaagaagtgggagcccttatgaggatggatatcgcaaatcatcacggagagagaggtctctttctgtcagcggatgaagcagttttacggtctagagctattgctgtgaatctgcgcatggtggcctacttgctatgtctttctgaaccatatatgttctgtctagattatcattcccagtaccagagaagtatcgtgagactgtttgctgtactttctagtcttgaggatacagaagggggtcaccgattctctcagtagatggactattgaccactagctacgccagttccactgctttgtgtatttacaggcagctttgcggtttgaataaaattgtttgcatcgtgaaagctaattggtaaaaagactgaatcatgaaacgaacgttttgcatccctgttccctgatggcatttggatacgattttttgttctttcgacgaacaatttggcaaatctgcatcttattgagctgatgagaagtgcaggttggctaaatctttgaaggtcttgttcggttctatggggttctatgcgataggagattgaggggattaaatatctttctattcaattttgaattgaaagtaatttaatcacaccaacatttt

SEQ ID NO: 67263 - DNA, 1747 bp, Zea Mays
cgccaggccgccagcatccgacgcatctaaccccttccgatgcgtgtcccgatccaacggtctccgtcgtcccgtccgcgtgataaagcgccggcgcctcttctcgcgtggcctcccgaaggttctaggctcgattgaacaaattggagcggcactacactcctccacgcctccacctccagcctcccactgatctggcctctctcgaggtgagcgcgcctgtaagtgatcctttctcgcagattatttttgtagttttcgatggaggcggattagctttgaactggtggatcgtgttgggcatcgtatcgtgattggttctgttctgtgaatttcgctagtttttttttctcccacagattactctgaatatgcgtgcccttaattgtgttactgttacgatttggcttcgtcgcggtagtctgttgtgatgcgcccattatttcgcgattaattgtatgaatctatggattcgatgtgaagtcccaaagggtagcttttagggagggggaatgatgagatgttggaagttcacaagttgtgtctttcttaaaggctggtaaccttaatcctagatcaatatgagaaggggctacagttacagtccttcaccaccaaggggctacaggagaagggcgcgcagtccaagtcctcatgatcattatggtggtcgtggtagggatctcccaaccagtcttctggtcaggaatctccgtcgggactgcaggccagaagacctccgtcgcccatttggacagtttggtcgagttaaagatatatatcttccaagagattattacactggggatccccgagggtttgggtttgtccagtattatgatcctgctgatgctgctgatgcgaagtactatatggatgggcaggtagttcttggtaggcaaataacagttgtttttgcagaagagaacagaaagaagcctcaagagatgagagctagggacagagtcaggggtcattcttatgatgacaggaggtattctcgctctaggtcgcctcgttattataggggccgctctccttcacgcagccaaagctactcgaggtctccacctcagaatccaagacacagacttagagagaggtcctactccggctcacctgtggacagcagatcaagaagtgggagcccttatgaggatggatatcgcaaatcatcacggagagagaggtctctttctgtcagcggatgaagcagttttacggtctagagctattgctgtgaatctgcgcatggtggcctacttgctatgtctttctgaaccatatatgttctgtctagattatcattcccagtaccagagaagtatcgtgagactgtttgctgtactttctagtcttgaggatacagaagggggtcaccgattctctcagtagatggactattgaccactagctacgccagttccactgctttgtgtatttacaggcagctttgcggtttgaataaaattgtttgcatcgtgaaagctaattggtaaaaagactgaatcatgaaacgaacgttttgcatccctgttccctgatggcatttggatacgattttttgttctttcgacgaacaatttggcaaatctgcatcttattgagctgatgagaagtgcaggttggctaaatctttgaaggtcttgttcggttctatggggttctatgcgataggagattgaggggattaaatatctttctattcaattttgaattgaaagtaatttaatcacaccaacatttt

SEQ ID NO: 67264 - DNA, 1377 bp, Zea Mays
caggccgccagcatccgacgcatctaaccccttccgatgcgtgtcccgatccaacggtctccgtcgtcccgtccgcgtgataaagcgccggcgcctcttctcgcgtggcctcccgaaggttctaggctcgattgaacaaattggagcggcactacactcctccacgcctccacctccagcctcccactgatctggcctctctcgagtcaatatgagaaggggctacagttacagtccttcaccaccaaggggctacaggagaagggcgcgcagtccaagtcctcatgatcattatggtggtcgtggtagggatctcccaaccagtcttctggtcaggaatctccgtcgggactgcaggccagaagacctccgtcgcccatttggacagtttggtcgagttaaagatatatatcttccaagagattattacactggggatccccgagggtttgggtttgtccagtattatgatcctgctgatgctgctgatgcgaagtactatatggatgggcaggtagttcttggtaggcaaataacagttgtttttgcagaagagaacagaaagaagcctcaagagatgagagctagggacagagtcaggggtcattcttatgatgacaggaggtattctcgctctaggtcgcctcgttattataggggccgctctccttcacgcagccaaagctactcgaggtctccacctcagaatccaagacacagacttagagagaggtcctactccggctcacctgtggacagcagatcaagaagtgggagcccttatgaggatggatatcgcaaatcatcacggagagagaggtctctttctgtcagcggatgaagcagttttacggtctagagctattgctgtgaatctgcgcatggtggcctacttgctatgtctttctgaaccatatatgttctgtctagattatcattcccagtaccagagaagtatcgtgagactgtttgctgtactttctagtcttgaggatacagaagggggtcaccgattctctcagtagatggactattgaccactagctacgccagttccactgctttgtgtatttacaggcagctttgcggtttgaataaaattgtttgcatcgtgaaagctaattggtaaaaagactgaatcatgaaacgaacgttttgcatccctgttccctgatggcatttggatacgattttttgttctttcgacgaacaatttggcaaatctgcatcttattgagctgatgagaagtgcaggttggctaaatctttgaaggtcttgttcggttctatggggttctatgcgataggagattgaggggattaaatatctttctattcaattttgaattgaaagtaatttaatcacaccaacatttt

SEQ ID NO: 67265 - DNA, 1586 bp, Zea Mays
cgtgtcccgatccaacggtctccgtcgtcccgtccgcgtgataaagcgccggcgcctcttctcgcgtggcctcccgaaggttctaggctcgattgaacaaattggagcggcactacactcctccacgcctccacctccagcctcccactgatctggcctctctcgagttaatcctagatcaatatgagaaggggctacagttacagtccttcaccaccaaggggctacaggagaagggcgcgcagtccaagtcctcatgatcattatggtggtcgtggtagggatctcccaaccagtcttctggtcaggaatctccgtcgggactgcaggccagaagacctccgtcgcccatttggacagtttggtcgagttaaagatatatatcttccaagagattattacactgggtaagacacctagctagactggcattgcaaactgttgcgaccctaaatgacgcaacacaagcctaaaagattattgttgaagagaaggaagaaatagagaaattcaattaagtgatctgcaacttaaaagagtactcagtactgttcaagagatgggaagaaatagagttacaagtttaagagatactcacatcatgaagagtttcaagtctgaatttaaactctcatgagtgcaagggatccccgagggtttgggtttgtccagtattatgatcctgctgatgctgctgatgcgaagtactatatggatgggcaggtagttcttggtaggcaaataacagttgtttttgcagaagagaacagaaagaagcctcaagagatgagagctagggacagagtcaggggtcattcttatgatgacaggaggtattctcgctctaggtcgcctcgttattataggggccgctctccttcacgcagccaaagctactcgaggtctccacctcagaatccaagacacagacttagagagaggtcctactccggctcacctgtggacagcagatcaagaagtgggagcccttatgaggatggatatcgcaaatcatcacggagagagaggtctctttctgtcagcggatgaagcagttttacggtctagagctattgctgtgaatctgcgcatggtggcctacttgctatgtctttctgaaccatatatgttctgtctagattatcattcccagtaccagagaagtatcgtgagactgtttgctgtactttctagtcttgaggatacagaagggggtcaccgattctctcagtagatggactattgaccactagctacgccagttccactgctttgtgtatttacaggcagctttgcggtttgaataaaattgtttgcatcgtgaaagctaattggtaaaaagactgaatcatgaaacgaacgttttgcatccctgttccctgatggcatttggatacgattttttgttctttcgacgaacaatttggcaaatctgcatcttattgagctgatgagaagtgcaggttggctaaatctttgaaggtcttgttcggttctatggggttctatgcgataggagattgaggggattaaatatctttctattcaattttgaattgaaagtaatttaatcacaccaacatttt

SEQ ID NO: 67266 - DNA, 1360 bp, Zea Mays
tcccgatccaacggtctccgtcgtcccgtccgcgtgataaagcgccggcgcctcttctcgcgtggcctcccgaaggttctaggctcgattgaacaaattggagcggcactacactcctccacgcctccacctccagcctcccactgatctggcctctctcgaggtgagcgcgcctttaatcctagatcaatatgagaaggggctacagttacagtccttcaccaccaaggggctacaggagaagggcgcgcagtccaagtcctcatgatcattatggtggtcgtggtagggatctcccaaccagtcttctggtcaggaatctccgtcgggactgcagcaggccagaagacctccgtcgcccatttggacagtttggtcgagttaaagatatatatcttccaagagattattacactggggatccccgagggtttgggtttgtccagtattatgatcctgctgatgctgctgatgcgaagtactatatggatgggcaggtagttcttggtaggcaaataacagttgtttttgcagaagagaacagaaagaagcctcaagagatgagagctagggacagagtcaggggtcattcttatgatgacaggaggtattctcgctctaggtcgcctcgttattataggggccgctctccttcacgcagccaaagctactcgaggtctccacctcagaatccaagacacagacttagagagaggtcctactccggctcacctgtggacagcagatcaagaagtgggagcccttatgaggatggatatcgcaaatcatcacggagagagaggtctctttctgtcagcggatgaagcagttttacggtctagagctattgctgtgaatctgcgcatggtggcctacttgctatgtctttctgaaccatatatgttctgtctagattatcattcccagtaccagagaagtatcgtgagactgtttgctgtactttctagtcttgaggatacagaagggggtcaccgattctctcagtagatggactattgaccactagctacgccagttccactgctttgtgtatttacaggcagctttgcggtttgaataaaattgtttgcatcgtgaaagctaattggtaaaaagactgaatcatgaaacgaacgttttgcatccctgttccctgatggcatttggatacgattttttgttctttcgacgaacaatttggcaaatctgcatcttattgagctgatgagaagtgcaggttggctaaatctttgaaggtcttgttcggttctatggggttctatgcgataggagattgaggggattaaatatctttctattcaattttgaattgaaagtaatttaatcacaccaacatttt

SEQ ID NO: 67267 - DNA, 1533 bp, Zea Mays
tcccgatccaacggtctccgtcgtcccgtccgcgtgataaagcgccggcgcctcttctcgcgtggcctcccgaaggttctaggctcgattgaacaaattggagcggcactacactcctccacgcctccacctccagcctcccactgatctggcctctctcgagttaatcctagatcaatatgagaaggggctacagttacagtccttcaccaccaaggggctacaggagaagggcgcgcagtccaagtcctcatgatcattatggtggtcgtggtagggatctcccaaccagtcttctggtcaggaatctccgtcgggactgcaggccagaagacctccgtcgcccatttggacagtttggtcgagttaaagatatatatcttccaagagattattacactggacgcaacacaagcctaaaagattattgttgaagagaaggaagaaatagagaaattcaattaagtgatctgcaacttaaaagagtactcagtactgttcaagagatgggaagaaatagagttacaagtttaagagatactcacatcatgaagagtttcaagtctgaatttaaactctcatgagtgcaagggatccccgagggtttgggtttgtccagtattatgatcctgctgatgctgctgatgcgaagtactatatggatgggcaggtagttcttggtaggcaaataacagttgtttttgcagaagagaacagaaagaagcctcaagagatgagagctagggacagagtcaggggtcattcttatgatgacaggaggtattctcgctctaggtcgcctcgttattataggggccgctctccttcacgcagccaaagctactcgaggtctccacctcagaatccaagacacagacttagagagaggtcctactccggctcacctgtggacagcagatcaagaagtgggagcccttatgaggatggatatcgcaaatcatcacggagagagaggtctctttctgtcagcggatgaagcagttttacggtctagagctattgctgtgaatctgcgcatggtggcctacttgctatgtctttctgaaccatatatgttctgtctagattatcattcccagtaccagagaagtatcgtgagactgtttgctgtactttctagtcttgaggatacagaagggggtcaccgattctctcagtagatggactattgaccactagctacgccagttccactgctttgtgtatttacaggcagctttgcggtttgaataaaattgtttgcatcgtgaaagctaattggtaaaaagactgaatcatgaaacgaacgttttgcatccctgttccctgatggcatttggatacgattttttgttctttcgacgaacaatttggcaaatctgcatcttattgagctgatgagaagtgcaggttggctaaatctttgaaggtcttgttcggttctatggggttctatgcgataggagattgaggggattaaatatctttctattcaattttgaattgaaagtaatttaatcacaccaacatttt

SEQ ID NO: 67268 - DNA, 1461 bp, Zea Mays
cccgatccaacggtctccgtcgtcccgtccgcgtgataaagcgccggcgcctcttctcgcgtggcctcccgaaggttctaggctcgattgaacaaattggagcggcactacactcctccacgcctccacctccagcctcccactgatctggcctctctcgaggtgagcgcgcctgaatctatggattcgatgtgaagtcccaaagggtagcttttagggagggggaatgatgagatgttggaagttcacaagttgtgtctttcttaaaggctggtaaccttaatcctagatcaatatgagaaggggctacagttacagtccttcaccaccaaggggctacaggagaagggcgcgcagtccaagtcctcatgatcattatggtggtcgtggtagggatctcccaaccagtcttctggtcaggaatctccgtcgggactgcaggccagaagacctccgtcgcccatttggacagtttggtcgagttaaagatatatatcttccaagagattattacactggggatccccgagggtttgggtttgtccagtattatgatcctgctgatgctgctgatgcgaagtactatatggatgggcaggtagttcttggtaggcaaataacagttgtttttgcagaagagaacagaaagaagcctcaagagatgagagctagggacagagtcaggggtcattcttatgatgacaggaggtattctcgctctaggtcgcctcgttattataggggccgctctccttcacgcagccaaagctactcgaggtctccacctcagaatccaagacacagacttagagagaggtcctactccggctcacctgtggacagcagatcaagaagtgggagcccttatgaggatggatatcgcaaatcatcacggagagagaggtctctttctgtcagcggatgaagcagttttacggtctagagctattgctgtgaatctgcgcatggtggcctacttgctatgtctttctgaaccatatatgttctgtctagattatcattcccagtaccagagaagtatcgtgagactgtttgctgtactttctagtcttgaggatacagaagggggtcaccgattctctcagtagatggactattgaccactagctacgccagttccactgctttgtgtatttacaggcagctttgcggtttgaataaaattgtttgcatcgtgaaagctaattggtaaaaagactgaatcatgaaacgaacgttttgcatccctgttccctgatggcatttggatacgattttttgttctttcgacgaacaatttggcaaatctgcatcttattgagctgatgagaagtgcaggttggctaaatctttgaaggtcttgttcggttctatggggttctatgcgataggagattgaggggattaaatatctttctattcaattttgaattgaaagtaatttaatcacaccaacatttt

SEQ ID NO: 67269 - DNA, 1239 bp, Zea Mays
ggagcggcactacactcctccacgcctccacctccagcctcccactgatctggcctctctcgagatcaatatgagaaggggctacagttacagtccttcaccaccaaggggctacaggagaagggcgcgcagtccaagtcctcatgatcattatggtggtcgtggtagggatctcccaaccagtcttctggtcaggaatctccgtcgggactgcagcaggccagaagacctccgtcgcccatttggacagtttggtcgagttaaagatatatatcttccaagagattattacactggggatccccgagggtttgggtttgtccagtattatgatcctgctgatgctgctgatgcgaagtactatatggatgggcaggtagttcttggtaggcaaataacagttgtttttgcagaagagaacagaaagaagcctcaagagatgagagctagggacagagtcaggggtcattcttatgatgacaggaggtattctcgctctaggtcgcctcgttattataggggccgctctccttcacgcagccaaagctactcgaggtctccacctcagaatccaagacacagacttagagagaggtcctactccggctcacctgtggacagcagatcaagaagtgggagcccttatgaggatggatatcgcaaatcatcacggagagagaggtctctttctgtcagcggatgaagcagttttacggtctagagctattgctgtgaatctgcgcatggtggcctacttgctatgtctttctgaaccatatatgttctgtctagattatcattcccagtaccagagaagtatcgtgagactgtttgctgtactttctagtcttgaggatacagaagggggtcaccgattctctcagtagatggactattgaccactagctacgccagttccactgctttgtgtatttacaggcagctttgcggtttgaataaaattgtttgcatcgtgaaagctaattggtaaaaagactgaatcatgaaacgaacgttttgcatccctgttccctgatggcatttggatacgattttttgttctttcgacgaacaatttggcaaatctgcatcttattgagctgatgagaagtgcaggttggctaaatctttgaaggtcttgttcggttctatggggttctatgcgataggagattgaggggattaaatatctttctattcaattttgaattgaaagtaatttaatcacaccaacatttt

SEQ ID NO: 67270 - DNA, 1347 bp, Zea Mays
ctacactcctccacgcctccacctccagcctcccactgatctggcctctctcgaggaatctatggattcgatgtgaagtcccaaagggtagcttttagggagggggaatgatgagatgttggaagttcacaagttgtgtctttcttaaaggctggtaaccttaatcctagatcaatatgagaaggggctacagttacagtccttcaccaccaaggggctacaggagaagggcgcgcagtccaagtcctcatgatcattatggtggtcgtggtagggatctcccaaccagtcttctggtcaggaatctccgtcgggactgcagtgcaggccagaagacctccgtcgcccatttggacagtttggtcgagttaaagatatatatcttccaagagattattacactggggatccccgagggtttgggtttgtccagtattatgatcctgctgatgctgctgatgcgaagtactatatggatgggcaggtagttcttggtaggcaaataacagttgtttttgcagaagagaacagaaagaagcctcaagagatgagagctagggacagagtcaggggtcattcttatgatgacaggaggtattctcgctctaggtcgcctcgttattataggggccgctctccttcacgcagccaaagctactcgaggtctccacctcagaatccaagacacagacttagagagaggtcctactccggctcacctgtggacagcagatcaagaagtgggagcccttatgaggatggatatcgcaaatcatcacggagagagaggtctctttctgtcagcggatgaagcagttttacggtctagagctattgctgtgaatctgcgcatggtggcctacttgctatgtctttctgaaccatatatgttctgtctagattatcattcccagtaccagagaagtatcgtgagactgtttgctgtactttctagtcttgaggatacagaagggggtcaccgattctctcagtagatggactattgaccactagctacgccagttccactgctttgtgtatttacaggcagctttgcggtttgaataaaattgtttgcatcgtgaaagctaattggtaaaaagactgaatcatgaaacgaacgttttgcatccctgttccctgatggcatttggatacgattttttgttctttcgacgaacaatttggcaaatctgcatcttattgagctgatgagaagtgcaggttggctaaatctttgaaggtcttgttcggttctatggggttctatgcgataggagattgaggggattaaatatctttctattcaattttgaattgaaagtaatttaatcacaccaacatttt

SEQ ID NO: 67271 - DNA, 1874 bp, Zea Mays
cacgcctccacctccagcctcccactgatctggcctctctcgaggtgagcgcgcctgtaagtgatcctttctcgcagattatttttgtagttttcgatggaggcggattagctttgaactggtggatcgtgttgggcatcgtatcgtgattggttctgttctgtgaatttcgctagtttttttttctcccacagattactctgaatatgcgtgcccttaattgtgttactgttacgatttggcttcgtcgcggtagtctgttgtgatgcgcccattatttcgcgattaattgtatgtgattctgcgttcgattggttgagaataggcagtgaacccttccgtttcttatttcactgctaactgtatctaggaatctatggattcgatgtgaagtcccaaagggtagcttttagggagggggaatgatgagatgttggaagttcacaagttgtgtctttcttaaaggctggtaaccgtatgtgtagactgccccttgtcttttgtaatgtccttttcaggttcagatgttctctttgtgcatctactgtttcagcagggagttactgatgtttatatttaactataatgtctctgcttatattattagttaatcctagatcaatatgagaaggggctacagttacagtccttcaccaccaaggggctacaggagaagggcgcgcagtccaagtcctcatgatcattatggtggtcgtggtagggatctcccaaccagtcttctggtcaggaatctccgtcgggactgcagcaggccagaagacctccgtcgcccatttggacagtttggtcgagttaaagatatatatcttccaagagattattacactggggatccccgagggtttgggtttgtccagtattatgatcctgctgatgctgctgatgcgaagtactatatggatgggcaggtagttcttggtaggcaaataacagttgtttttgcagaagagaacagaaagaagcctcaagagatgagagctagggacagagtcaggtttgttggctcctcccagtgcgacttccttgtgcacgctgacttctctattcattcttttttttttggctgtatattgcaggggtcattcttatgatgacaggaggtattctcgctctaggtcgcctcgttattataggggccgctctccttcacgcagccaaagctactcgaggtctccacctcagaatccaagacacagacttagagagaggtcctactccggctcacctgtggacagcagatcaagaagtgggagcccttatgaggatggatatcgcaaatcatcacggagagagaggtctctttctgtcagcggatgaagcagttttacggtctagagctattgctgtgaatctgcgcatggtggcctacttgctatgtctttctgaaccatatatgttctgtctagattatcattcccagtaccagagaagtatcgtgagactgtttgctgtactttctagtcttgaggatacagaagggggtcaccgattctctcagtagatggactattgaccactagctacgccagttccactgctttgtgtatttacaggcagctttgcggtttgaataaaattgtttgcatcgtgaaagctaattggtaaaaagactgaatcatgaaacgaacgttttgcatccctgttccctgatggcatttggatacgattttttgttctttcgacgaacaatttggcaaatctgcatcttattgagctgatgagaagtgcaggttggctaaatctttgaaggtcttgttcggttctatggggttctatgcgataggagattgaggggattaaatatctttctattcaattttgaattgaaagtaatttaatcacaccaacatttt

SEQ ID NO: 67272 - DNA, 1297 bp, Zea Mays
ctgatctggcctctctcgaggaatctatggattcgatgtgaagtcccaaagggtagcttttagggagggggaatgatgagatgttggaagttcacaagttgtgtctttcttaaaggctggtaaccatcaatatgagaaggggctacagttacagtccttcaccaccaaggggctacaggagaagggcgcgcagtccaagtcctcatgatcattatggtggtcgtggtagggatctcccaaccagtcttctggtcaggaatctccgtcgggactgcaggccagaagacctccgtcgcccatttggacagtttggtcgagttaaagatatatatcttccaagagattattacactggggatccccgagggtttgggtttgtccagtattatgatcctgctgatgctgctgatgcgaagtactatatggatgggcaggtagttcttggtaggcaaataacagttgtttttgcagaagagaacagaaagaagcctcaagagatgagagctagggacagagtcaggggtcattcttatgatgacaggaggtattctcgctctaggtcgcctcgttattataggggccgctctccttcacgcagccaaagctactcgaggtctccacctcagaatccaagacacagacttagagagaggtcctactccggctcacctgtggacagcagatcaagaagtgggagcccttatgaggatggatatcgcaaatcatcacggagagagaggtctctttctgtcagcggatgaagcagttttacggtctagagctattgctgtgaatctgcgcatggtggcctacttgctatgtctttctgaaccatatatgttctgtctagattatcattcccagtaccagagaagtatcgtgagactgtttgctgtactttctagtcttgaggatacagaagggggtcaccgattctctcagtagatggactattgaccactagctacgccagttccactgctttgtgtatttacaggcagctttgcggtttgaataaaattgtttgcatcgtgaaagctaattggtaaaaagactgaatcatgaaacgaacgttttgcatccctgttccctgatggcatttggatacgattttttgttctttcgacgaacaatttggcaaatctgcatcttattgagctgatgagaagtgcaggttggctaaatctttgaaggtcttgttcggttctatggggttctatgcgataggagattgaggggattaaatatctttctattcaattttgaattgaaagtaatttaatcacaccaacatttt

SEQ ID NO: 67273 - DNA, 1199 bp, Zea Mays
ctggcctctctcgaggtgagcgcgcctatcaatatgagaaggggctacagttacagtccttcaccaccaaggggctacaggagaagggcgcgcagtccaagtcctcatgatcattatggtggtcgtggtagggatctcccaaccagtcttctggtcaggaatctccgtcgggactgcaggccagaagacctccgtcgcccatttggacagtttggtcgagttaaagatatatatcttccaagagattattacactggggatccccgagggtttgggtttgtccagtattatgatcctgctgatgctgctgatgcgaagtactatatggatgggcaggtagttcttggtaggcaaataacagttgtttttgcagaagagaacagaaagaagcctcaagagatgagagctagggacagagtcaggggtcattcttatgatgacaggaggtattctcgctctaggtcgcctcgttattataggggccgctctccttcacgcagccaaagctactcgaggtctccacctcagaatccaagacacagacttagagagaggtcctactccggctcacctgtggacagcagatcaagaagtgggagcccttatgaggatggatatcgcaaatcatcacggagagagaggtctctttctgtcagcggatgaagcagttttacggtctagagctattgctgtgaatctgcgcatggtggcctacttgctatgtctttctgaaccatatatgttctgtctagattatcattcccagtaccagagaagtatcgtgagactgtttgctgtactttctagtcttgaggatacagaagggggtcaccgattctctcagtagatggactattgaccactagctacgccagttccactgctttgtgtatttacaggcagctttgcggtttgaataaaattgtttgcatcgtgaaagctaattggtaaaaagactgaatcatgaaacgaacgttttgcatccctgttccctgatggcatttggatacgattttttgttctttcgacgaacaatttggcaaatctgcatcttattgagctgatgagaagtgcaggttggctaaatctttgaaggtcttgttcggttctatggggttctatgcgataggagattgaggggattaaatatctttctattcaattttgaattgaaagtaatttaatcacaccaacatttt

SEQ ID NO: 67274 - DNA, 1634 bp, Zea Mays
ctttctcgcagattatttttgtagttttcgatggaggcggattagctttgaactggtggatcgtgttgggcatcgtatcgtgattggttctgttctgtgaatttcgctagtttttttttctcccacagattactctgaatatgcgtgcccttaattgtgttactgttacgatttggcttcgtcgcggtagtctgttgtgatgcgcccattatttcgcgattaattgtatgtgattctgcgttcgattggttgagaataggcagtgaacccttccgtttcttatttcactgctaactgtatctaggaatctatggattcgatgtgaagtcccaaagggtagcttttagggagggggaatgatgagatgttggaagttcacaagttgtgtctttcttaaaggctggtaaccgtatgtgtagactgccccttgtcttttgtaatgtccttttcagttaatcctagatcaatatgagaaggggctacagttacagtccttcaccaccaaggggctacaggagaagggcgcgcagtccaagtcctcatgatcattatggtggtcgtggtagggatctcccaaccagtcttctggtcaggaatctccgtcgggactgcaggccagaagacctccgtcgcccatttggacagtttggtcgagttaaagatatatatcttccaagagattattacactggggatccccgagggtttgggtttgtccagtattatgatcctgctgatgctgctgatgcgaagtactatatggatgggcaggtagttcttggtaggcaaataacagttgtttttgcagaagagaacagaaagaagcctcaagagatgagagctagggacagagtcaggggtcattcttatgatgacaggaggtattctcgctctaggtcgcctcgttattataggggccgctctccttcacgcagccaaagctactcgaggtctccacctcagaatccaagacacagacttagagagaggtcctactccggctcacctgtggacagcagatcaagaagtgggagcccttatgaggatggatatcgcaaatcatcacggagagagaggtctctttctgtcagcggatgaagcagttttacggtctagagctattgctgtgaatctgcgcatggtggcctacttgctatgtctttctgaaccatatatgttctgtctagattatcattcccagtaccagagaagtatcgtgagactgtttgctgtactttctagtcttgaggatacagaagggggtcaccgattctctcagtagatggactattgaccactagctacgccagttccactgctttgtgtatttacaggcagctttgcggtttgaataaaattgtttgcatcgtgaaagctaattggtaaaaagactgaatcatgaaacgaacgttttgcatccctgttccctgatggcatttggatacgattttttgttctttcgacgaacaatttggcaaatctgcatcttattgagctgatgagaagtgcaggttggctaaatctttgaaggtcttgttcggttctatggggttctatgcgataggagattgaggggattaaatatctttctattcaattttgaattgaaagtaatttaatcacaccaacatttt

SEQ ID NO: 67275 - DNA, 2322 bp, Zea Mays
ggacggatagctaatcatcttcagccgtagcagcagcaggagcagccgagcagagtcaaccacgcaccaaccaaccaggttcacaagcacctgccgcgggatcggggagggtcatcgtcatcgcgatgggcgtgctcttctcatgccccgtggaggaggaggaggacgtgccggcaggagctgcagctgcccttccggcgccgtgcaatgccgccgtggagccgccggccctcaagccgtcgctgcagggctccgggaagctccggttcgagcgctcgctcggcagcctgatccggcgggagcagcagagccccagcgcgcgcctgcacgtggacgtcgacgtcgacgtcgacgccgccgccaagcaggtccccgccacgtccaccgtagcgcccgtgccgccggtcatgcccagggagctcgcgcggaccaggttcgccgacgccgcgcccgcgcccgcgccggagagccccaagcacgaggcggcggccgtcacggtgcagaaggtgtacaagagcttccgcacgcgccgccgcctcgccgactgcgccgtcgtcgtcgagcagagctggtgggagctgctggacttcgcgctgctcaggcggagctccgtctccttcttcgacatcgagaggcaggagtcggcggtgtccaagtgggcgagggcaagaaccagagctgccaaggttggcaaagggctgtccaaggatgacaaggcccagaagcttgcgctgcagcactggctcgaagctattgacccgcgccaccggtacggacataacctccactactactacgactgctggctgcggtgcgagagcaaggagcccttcttctactggctggacgttggagaaggcaaggaaatcaatctcgagcggtgtccgcggttgaagcttctaagccagtgcatcaagtaccttggtccgaaagaaagagaagagtatgaggttgtgatcgaggatggcaagttcatgttcaagaaaagcaggcaaatcctagacacgtccgatggaccaagagattccaagtggatctttgttctaagtacatccaagaatctgtacgttggacagaagaaaaagggcacatttcagcattcgagcttcctcgctggaggagctacatctgctgctggtcgactagttgtggaagatgggatcctcaaggctatttggccacacagcgggcactaccgcccaacggaagagaacttccaggaattccagagcttcctcaaagacaacaatgtcgacctcactgatgtcaagatgagcccagatgaagacgacgaggagttttggagcaggctcagaagcatctcttccgactgctgcgccgtcgctgacaaacccgaagaagatcaacaggccgcagctcaagaaaccagcaacagttgccaggcacctcaagtcactgaatcgaccacacctgacgaagtctctccctccccgtcccagcaggaagaaaccagcaagagtctcagtcccactgcaactgtcacgaggcaagattcatcagaggacgccgagacctcaacgacaagccaccgtgccctgttcgaagatggtcaggaggaggaccacgctgccgcggccaccgccgccgacgacaatacagccgtgccgagggagaagatcctgcagaggatcagctccaagaaggagaccaagtcgtaccagctggggaagcaggtgtcgttcaagtggaccacgggcgcggggccccggatcgtgtgcgtccgtgactacccgtcggagctccagctccgggcactggagcaggtgcacctgtctccgcggagcggcggcgccgccgcagccgcaggggccggtagggcggcctcgtcccggttcgcctcgccgcagcggtgcggcagcccggttgcggcgagagggcgccgcgagcctctggcgtcggcggggtgcggcagggcggcctcgtcacggttcgcgtcgccgcagcggtccagcagcccgatggcgagagcgcgctgcgagcagctgacgccgagggaggcgttccggacgcacctgatggccagaggttaaccggatcggatcagccattcagcaaagcagccgatggatggagtcatggagagacactttctcttcttcctttatcccctcttgtgcataggagaaagaaaaagaataaagatgggagtgaaaaattgcttcccgtgttagatcttgtagagcgccacacacacacacacgtgaatacgtaatcaaatacagaattctttcattctttggtaccatgatgaaataatgcaggctctaattctacgcgaatacataatcaatacaaaattct

SEQ ID NO: 67276 - DNA, 1290 bp, Zea Mays
atgggccttctcgaggtgctcacggcgagggaccgcctgctgccgcgctccgcgtgccggtaccagcggctgcgcggcggcgagctcggcggctcgtcgccgtcgacgggagcaagcgtcagggcgaggcggccgctgcggctgcggctgcggcggagggcgtgcaaggcgggagggagatggggggccaccaccacgactgccaacggcggcggcaagcggctgcggctgcgcctggttcggctgctgctcctgcttcccgcgcgccgggttgccgcgctggtcgcggaggtcgtgcggcgtctgctcgcggcggcggtggccgctgcggactgccccgccatcgtcttctcctcccagtgggggctccccgtgctgtcgccgcactgcggcagcagcagcaggagctccaggccgcggggcttctaccttgacaggagcctctccggcgccggctctggcgtactatgattgtaccgatcactactacaattccccccacgccgtgcccatgcatgatgcatgtatggctttggcttctgctagtacgccattgcacatggcatgcatgctacctatcttgcattgcaagactgtactgtactgtaccctccaagtactcctgcaaacgttttaaaacaacgccgaacatgccgcgacccggccttgaatggaaaagaaacaagaggccgcgctgtacaatttctttgaaacaggatccaggtctgcgcattacgcttctgttggagatgaggctgatcaagctcggtcggtgcctgccgacgactccagcaaaagcagggctgggtcatgtctaaggtgttcttggtcagaatggtgttcctctgccactcttcagatcctgcactgcactccatattcgcctaggctattacacaatgccacatctacacgctcattggttggccttcgctgcaattttgacttgtgttcatccttcaggggttacggagtgttggcgggaggcttgggcggaggagagcacgagggactatttcgttcgtggggtcttcgacgagctgacagccggagcgatcgcctccaactcgaaggcgcaacgacatcgtctttttttttaaactcgggaaagcttgtttggcggagaagactggcgacaattccgatccatcacgaagtcggtctcctggtggtaatctgcggccacggaaataggcagcggtctggctttttgagtccggaagaagctatttttgagtaccacggaaatagcaaataagatatgtgataggtgaaactgctcgagatagc

SEQ ID NO: 67277 - DNA, 1533 bp, Zea Mays
gttttcttgaatcaatgtcgtgaagagtcaaaacaatataccactcttactcataactttacatagataccctccgtgcggatacgggataccaactatactttgcttccaattgactgcgatgcttctgttcaagctttctttcgttggagacatgctataagttccaacttttgctcaagccgatgctggaatatcttcctgttaaattccttccttccaaagggggtgttgtaattttgtcaagccggaagggcagcagtacttgtagagttgttccaccatggccaatgatggagacgatggacaaagccaggattatctcttcaaaattgtcctgatcggggattcctctgttggtaaatcgaacttgctagcaagatttgcaaggaacgagttctacccaaactccaagtccactataggagtggagttccagacacaaaagttggtaatcgatgggaaggagattaaggctcagatatgggacactgctggacaagagcgctttcgagcagtgacatctgcttactaccgaggcgctgtgggagctcttctcgtctatgatattagcaggcgtcagactttcgacagtgttggtcgatggctcaatgaactacacaatcattctgatatgaatgtcgtcacgattctggtgggtaacaaaaccgatctgaagcatgcgcgtgaggtgagcaccgcggaaggacaagcactggccgaggctcagggcctcttcttcatggaaacctcagctttggattcgtcgaatgttgcagcagcttttcaaactgtggttaaggagatctacagcatactaagcaggaaggtgtttcagtcactagagcagaagaaaagcgagctgcagtcgctaagcagcgggaaagccgtggtgctgcagggtgaagccaaccaaacaagcagtggtgggaggtggtgctgttcctcgtgacctgacacgaggactgcagctatggagggcgatcggattgtgagacattcgggtgtgtaaccctgtagtccgatttgtgaaaagttgcttttcccccatgttcttgttctaaaggtaagctggcgtggctgcttgtacgaaagctggtgttttccgtcggaggaaatcaatgtatagttcgattgatccttgggaggtgtcgatgatacacatgattgtgtaaagagaaaaagcgcgaccaacttgactgttgcgtcattctacatcattctagtcctagaaaccgttctttcattttgaattactccgaacgtagacatctataagtaccagacaccgtgctttcgccagtcttaggatctgtctggcacggtaaagggattgtgttgggttttcattaagagaaaaatatacattaaattttgtcaacttcaacattggtggtctctatcctatgatgatcaacttcgaacgtagtgtttggttgaggagccaagtagaacggagtcgttccatctttgattctaggaatggagccgctctgttctgtgtttggtaatttggaacggagcggttatgtt

SEQ ID NO: 67278 - DNA, 1322 bp, Zea Mays
cgcccactcccgtgaaccccaaaacccttcctccccaaacaaccggcggcggcgcgaccgcgcgagggcttcgctttgcatccatggctctcgtcgccggctcctacgagcgcttcatctggggcttctctctcaaaaccctgacgtccccctccgccaccggcgcctcgccctccgagaccctcaccctcgcgccgctcttctcgtacccggcccacacgggcccggtgcgctgcgtggccgcggcgccgcgggcggggctggtggcctccggcggcgcggacgattccgtccgcctctacgacctcccttccgccgcggacctcggcccgctcctggacccctcggccgccgtctccgcgctcgccttctactcccggggccccgtgccgcggaacctcctggccgcctgcgacgacggctcgctccacatctacgacgccgacggcttcgcgctgctctccacgctccgcgccttcccgcgccacgaagccgccgaggcgctcgccgtgcacccgtcgggccgggtcgcgctcgccgtcggccgcgcgggggcgcttgccatgctcaacctcgtccgcggccgacgcagcttcgcatgccgcctcgagcaccctgcgtccgcgatcgcctacgccgaggacagggacggcggggaccgattcgtgatggctgccgagaacaaggtcagcgtgcacgactccgtggatgccagggttattcatgatatggactgtggcaagaaggtgctcgccatggcgcccgcaaagagtggggtcctttacactggaggcgaggaccgatgtattactgcttgggatctgtccagcggcaaggtctcctcacgcattgagggtgcccatgcaactcgtgtaaaaggggttgttgtttttggtaatagcaatgatggatcacagctctccaatctaatttcttctgcttcgtccgatggtgtcataaggatatgggacattcgaacaatcgggaacggaaagcctactccattagcagaggctaatacaaaagcaaggctaacttgtcttgctggaacgtcactgaaatgtgcagtggtgagagatgtcatatttgtgggggaaggctttccttatcccttccctagaccccactcatgtgggagccttcggcagccccctttataaacatgccttgagttagttttcacagacaaagtacagggcaatgttgaatctagattttcatatgccgatctttactgagaaaatatgttcagttgatctgccaatattctcatttgtattccctggctcactgctgctctttccattatgttaattgtatta

SEQ ID NO: 67279 - DNA, 2446 bp, Zea Mays
ctcatcactagtacttgatttcacacgtaacacgctcagtttcttggaatacatgatatctcctatctatttgctcgtcgctagctattctcgttttccctacattttctatccacgtaggaaagagagtgaatctagttagtcaaatagctagccagctagccatttggagacgccctaatgtaaggtgggctaaagtttagagctaactttagaccacttgtttagagatttagctctaagtttagagagaatatatcctatgcaatcaaacatattggtgcaagcgtgcaatcaagcgatctagtgcatccaatcaaaattcaaaccccttccaccagaaacttagtacccattttacattcaatctcttcaatatgaaaactttggatctagattggaagttttggatggtttgattgcacgattgcataggatatgttcccaagtttagaggagggaatccaaaaagactctacccttagtcgaacccatctgcttaattgctaataccaatggcaagccaccttgcttgtagctgtaggctctaggtgtagtgtgtctctcttattaggagtacccgatcatgcttagctcatatttattaggcatttaggttctttgttttattgttcattcttagtctttgttttgaatttttaactcttttctctttatgaaacacgtccgttgcatgttagcaaaaaaaaagcatcgaaaaccgcctacaccaagcatggttaccaatgcaggacaccaagactgaagcatatgtatcagaattcactggatttctctgtacatcacttagaagaaacttctttagactatgatatactttttttagctccagcatctggttctaatttttttaagcatggaaatgcagatgattaaaccattcatgaaacttcgatatactgagagcattgaactgcttatgcattctaaaaaggttacctcatttcctcaaatgtattcagctacgccttgaacttcgcaatacaattccaaattagtgaatataagcttagaaatataacagtaataaatagcccctatgaactgaaggtcaggacgttagtagtcttttgactagcatgattttataacacattatctcacaaaaaacaatatgcatgcaccattaaccagctcattctaatgggagagtcgatggatgctggataaatagatacaccttaatctattgctagaagcgagaaccaagaagatcattcaattcaaattgatctcaatgatgaattcattttttccacccatgattaactttcaagtcgtgtttgtgaactcactgctggattttatctctgatcatgaatagtattgctgcaaggttgtaaatccaatacatccagttcagaaaacattataaaacctcaaactctctttcttgatcacaatgttaatccgcgtgtatttatttttttgaatttgttggagcttcttccatttcgtcatattcaggagctgtgtacttttgctagttctaaaggaaaagctaatgctgctcaggacgaaattatgcggatttggggaggaaatcaagatctcacctctgagaaatagtcttatgaaacgccaagctctgggtgccactgttcaggtcttccgttcctgcttgaagtcccagagctgaagcctcggctctgcattggccggcaccaccggagaagcaccagcagcaccgcttccaagaaagaacgacggcagtccggtggcatcagctggagaagcggcgaacctctgcagcaggcacgcatgctgagacgtcggccacagcggcgcagcaacggcggcattggactgaagtgtgccccggtcgaaggcgattgcgtggtgaggctgctcctgaaggaaggagaagtggggcagcatcgtctcgaaggatatggccgacgcggagtgcgcgttcgggggctgggtggcgtagtaagcgagcgtcggctgctgctgcactggcttgctgctgttgttggcggagcagtgcaggatcaggtcggcgaacgcgccaccaccggcggcggcgttgttgttgtaggcgtgactgtcttgctgagagtgagcggcggtgttgtcaaccggggcgttggcaagcgagagaacggagctcttgctggtctcggaggtgctgagctcggcgtcgtcggcagcgccgcccggcggagatgcggcggcgtgggggaagacgaaggagcagtcgagcgacgggaggccgtcgatggcggcggcggcggcgcggatgagccactcgatggccttgctgggctggtcgacgccgaggcggtcctggatgtcgtagaactggatggccgtgggcaccgagaggcggacgcggcggtcccggagcccccgcgccgtcaccaccttactgtggcggtccttgccgccggccgcggcgcgcgccacccggcacgccggccac

SEQ ID NO: 67280 - DNA, 1050 bp, Zea Mays
gaaaaagtctagcctcgcgcaccgatctagtagcaaaccgattggttctttttggaaggggaatcgcgcaaatctggaagaaacaaatcagatagcgaaattgttgcgaaaaaagagttcagaaaatcttgcgcgggactgaaaatctcctagaactgaaattgattagcaatcacaatcacaatcgcagtcggtaaaaaagtgcaggggcttttgtgaatggaatctactgaaagcaacaggaatccgaaaaataaataatgaacacacatagagaggatgctgttcttgtaaattcacggtgccggcccttttccagctgtccagctttacagtgaccacgctgacctaatttacagccgaaccacactctcgctgccagaaaaaagcgtgcaaaaaagacgaagattcggagctcaaataaatatacgaacatcttatcgccaaatctggtaaactgaagagagcctgcgcagagtcgttgggcaaatcatgaaggcagcccttgactactcatcatcttcagttcttcgccaagaagaacgaagtaggaagcattcagggagcggaataatactggtagctgaatgtcagtaacgtatccacgaacggagtagttccccaaggcaggcacacgcacacgcagctcgtcaaatttgttcggatctcgatcgatcgggaaatgcggcatgaagatgaagcacgagaggaggggagagatcgatgcaagtgaagtgaaatgaaatgaatggagtcggagaggagaggtttctacctggtggctaaaccgaatccttagcgaacaaaagaaaggaatggaatcgatgtcggaggtgaggggaagtaatctcacctgaagtaaagcaagctccggagcctggagcctgaaggggaccgatcgatttggccagcaagggaaggggaggggagcgcgcgtgcagtgctgagctctcctcctctcctgcctgctttacctgctgggcttatccgcctgccggtgccggagcagcacgcagctgggccggagtggagtgggagcggacagcggag

SEQ ID NO: 67281 - DNA, 532 bp, Zea Mays
  misc_feature (1)..(2): n is a, c, g, or t
nngtttgctaggcgtctgattctgcattgttagctgaattagaaaacctggacatgaaagaagaaattgaaggacgagagcacagcgggagcgaggacaagttctcagtgatcttgtcaagcgacgacagcgctgctgctgcaggctttgctgtggcctgtgggcattggcatccgcgagcttctccacgagcgtcggcgtctccagagcagctcgcctctcgtccgcgcggcatccatcactcaccctacggcggcaatgttgatcgaccccagtcagctttgcttttccagtggcagtacgtatatggtcattatgaagctagctactggtcatcacagtgtggttagcggctgctattactgctattactgctattgctctgtctctgttctctaataacgatggtcctttttggtcccactcgcacatgggcatgtgagcctgtattgacccccacagacctgactgacacctgctaccggctcgtatttgtatttttccgcgtatatggacaggagcccagcctttt

SEQ ID NO: 67282 - DNA, 102 bp, Zea Mays
  misc_feature (1)..(1): n is a, c, g, or t
ngtttgctaggcgtctgattctgcattgttagctgaattagaaaacctggacatgaaagaagaaattgaagtggcaatcatttccagtttgcatcatttggc

SEQ ID NO: 67283 - DNA, 818 bp, Zea Mays
gtttgctaggcgtctgattctgcattgttagctgaattagaaaacctggacatgaaagaagaaattgaaggtgaaagatctggcacgcgagcattatctgtgtgcgtttggaacgtatccatccattatgtacaccgacatagttttggcttagtgtctgagctgcataacttatttatatttgattgcgcgacaagttttgcaatgagaaccgttttcagtactaactgtgcaattgcatcacgtacgggactgagttctctgtcaagagagtcattgacgccacaagttattgcagtggcaatcatttccagtttgcatcatttggcatgagttctcaatcagaactcagaaggatgacgagagcacagcgggagcgaggacaagttctcagtgatcttgtcaagcgacgacagcgctgctgctgcaggctttgctgtggcctgtgggcattggcatccgcgagcttctccacgagcgtcggcgtctccagagcagctcgcctctcgtccgcgcggcatccatcactcaccctacggcggcaatgttgatcgaccccagtcagctttgcttttccagtggcagtacgtatatggtcattatgaagctagctactggtcatcacagtgtggttagcggctgctattactgctattactgctattgctctgtctctgttctctaataacgatggtcctttttggtcccactcgcacatgggcatgtgagcctgtattgacccccacagacctgactgacacctgctaccggctcgtatttgtatttttccgcgtatatggacaggagcccagcctttt

SEQ ID NO: 67284 - DNA, 1667 bp, Zea Mays
ctccaccaccgtccaccgcctcccagttgagcggggacgccgtggaggggcgagggggagccagattgagccatggcctcctcctgggttcttgccctggttcttgcgctgtcggcaggcgcaagcctggcgcgtggctcagagccgtggtggaacgagacacaggtgtacgccaccaccgccaactccggtggcggcaacggcgtcttcgtcggcctcacgctcatccagtcggcggcggccaagggagcggtgtgcttggatggaagcttaccaggttaccacctccacagagggtttggatcaggagcaaacagttggctcgtcaatctcgagggtggaggctggtgcaatgatcgcagcagctgtgtgttccgcaagggcagtcgtcgtggatcatcaaatcacatggagaggcaactccagtttacagggatattgagtaacaaacctgaagagaatcccgatttctacaactggaatagagtgaaggtccggtactgtgatggtggatctttcactggtgatggctctgatgcggctgcaggcctttatttccgaggtcagcgcatttggcaggccgctatggatgacctaatggcccaaggaatgcgttatgctaatcaggcccttctttctggatgctctgccggtggtgtttctaccatacttcactgtgatgaattccatggattgtttccctcgaataccagagtcaaatgcctagctgatgctggaatgtttcttgacactgttgatgtttctggccgtcgggaaatgagatcctttttcaatggcattgtgagattgcagggttctggaagaagcttgcctaggtcttgcacctcacacatggacaaaacctcgtgctttttcccccagaatgtgttgccaaccatccgaaccccaacttttgttttgaacactgcctatgacgtgtggcagcttcaacaaagtgtggcccctagaacagctgatccccaaggtctttggtcaaagtgtaggacgaaccatgccttctgtaatagcaaccagctccagtttttgcaagggttcaggaaccagatgcttgatgccgtgaggggtttctctgcatcaaggcaaaatggtctgttcatcaactcatgttttgctcattgccagagcgagagacaggatacttggtacgcgaacaactcgccacgtcttggtaacaagaaaatcgctgacgctgttggggactggttcttcgagagggggaacgccaagtacacagactgcccatacccttgcgatggcacttgccatcaccttgtgttcaggggagaccactaagatcattcttcagcaccaacaaattcatcagatggtacaaggatcaaaccccaatgggtacagaatggaaaacaggatatagatacagataaggtgcaagtggtcggcttgcccatgtttgttcatcagtgagtcatatgattgatagtgcgaggacctcacccgcgaacgcgcggaggaggcctctgcattagattcacataccgtcatgatatcgattattttcattggaaaagcgtccatgattacgtaccagaacaattgagttacatactcatttcgtgtactgtattaataacactagaacgttacatattcatttgtcctgaagatcgtactacttggcatgagta

SEQ ID NO: 67285 - DNA, 3491 bp, Zea Mays
atggagcaaagcaggccgaccctacagggcaggagaggggcaatgggccatcacagggtgccgccgccggatgcgtactattgctccgcggtgaagaggaggctcagacggtgccttcctcttggctccccagcgactgctcctcgccgcggatgcagcagctacggcccgcgcgaggccgtcgcgctcctcctccggctgcagtccgcccccgccctcacggaggtacggagactccacgctgcgctgctggtgcgaggctaccatagaagcaccgtcctcgccgcgcagctggtacgcgcgtacgccaggatgcgggatggtgggctcgggcacgcggtgcgtgtgttcgatggaatgcctacgaggaactccttcgcgtggaacgctgtgatcaagggccttgtcgacgctggcaggttctcggaggcgctgcggtggtactgggacatggtccgtgacggctcggtcgttgctgatcgtttcacgtacccgcctgttctgaaagcgtgtgcggcgcttggcgaggttgagcaggggagaaaggttcaagagaacgtggagacggacattgcccggggcattgcaaagggcaacgtgtttgtgcagtgcgcgcttgtggacatgtttgccaagtgtgggtgcttaggtgaggcgaggaatatgtttgagagcatgggagtgagggacttggcttcgtggactgcgatgattggaggagccgtccgcggaggagactggcttgaggtgatgacgttgcttaagcgcatgaagtcagaagggtttcggcctgattcaatgatttttgctactgttattccagcatgtggtaaggtgaaagagctgaggactggaatggcattgcatggatatgcagtaaaatgcggagtaggtgatgatatctgtgttcctaatgctttggttgatatgtattgcaaatgtgctaggctggatatggctgcttctctgttttggtctatcgatcacaaggatgtgttctcttggagtaccataattgcagggcattcacagaatagaatatataatgtgagtgtcagtttgtttactgaaatggttgcttcaggcataaaaccaaattctactaccatagcaagcatacttcctagcatttcagagctgaggttactgaggtatggaaaagaaattcattgcttctccttaagaaatagattggagcacagtgagtttctagctagtgcactcatcgacttctactgtagacaaggatacattagggacgcacaaattgtttttgaattcaagccgaagaatgatttggtcgttttgaattcaatgatcagaggatatgtcgtgaataaggattcagagtctgcattacgtctattaagggcactgctgaaagagggactcagacctgatcatgtgactgttgtttcagttcttcctctatgcaatcaaccctcgaggctcctccagggtaaggagctacatgcttatgccatcagacataacataagttcgtgtttctcagttactaacgcacttacagatatgtactgcaagtgtggttgcctagaaatagccaacaagatttttctgctgatgacagagcgaaatactgttacatataacactctgatttcttctctgggaaagcatggccatgcagatcaagcattcattctttttgacctaatgaagagggatggagtttctccagataaagtgacttttgtagctctgttatcatgttgtagccatggaggccttattgacaagggcttatgcttctatgattccatgttgcgggactataatattcctcctgacaaggagcactattcatgtattgttgacctctacagtagatctgggaagcttgatgatgcttggagttttattgctaatttacaagaagtgccagaaatagatgttcttgggtgcctattgtcagcatgcagagatcaccatagaatggacattgctgagcttgttgcagaaagaatatttgagcaaaaccccaatgatcctggttatcacattctgttatctaacgtctatgccagtgctggaatgtggtctgaggtgactaggataagaactatgatagaagagaggagcttgaagaagagaacaggaaatagcttgatttaagatcatggcgtgtcgcttgtggttctttgactccctgtacatatcaaattcattttgcacaaaagaaaaacatcatttgcttgtggttgtatggaacaattaactagataggaaatccaaaaatgtctgactgtcatatttaacgggaagatacataactcagcgaaatcatgaacggtcacttcataacatgtcttggatacataaggcaagacggagtgtaaaactgctgatgtgaaggatagtgactaacttatctaactactgagaattagtgataaacctgggagagagaatgcaaggagacagctactactctgctactgcatcaaaacactgttcagatattttcttttctagaggaatacatttccatatttgcgggcataagcagacagtataccctgttctgaagtcctttttttgctagctacacttgtgaagaaaagtaagcaagtgggtgcacatcaacgctcaagtctttctatggtttggaagaagtttggattttgcgagggaaaaatggattttccagttatgcactgtttcaaaaattttattcaccatgagtcttggacttattctcctaggcaggtagttagaccacacatatcagtgcactgtttctccagactgggtttcagcacgacaaagcttttgcttactcatgaattagctcacctgttgctatcatatacaacgatggtgtctccatcaatggatgccaaaagcagaaccagcaccacaagtagaatcggtaaagcacccggatttcactgatgatgcatcataatgcaatgcaaaagggcagtaatcaatgagggtgctgggccaatgcagagggggtgggcagtgggctcaccacatgtcttcatcagatagttgattccccgcttgtcctactgagcgttgctgctatccgaagtttgtgcagaggattgagttgaaccacatggcctatattattacagcgtttgttcaattccggtgtcccagaatctatcaggttaacttgcaagcttcaagacaacagggaacgggcatccttatcggatccagatcagatctattctccaacttcttatcgaagttccgatggccggtgcgatgtagtttggggtttggaccatctgccatcctgcaacggtgatgggcggtgggtgccgacatgtccacaggacatcccgcccgttgaattgtctgcaaggagtatgcattatgacacagtagctagctagtgactttattatattatatgttgatgtgatgcctaactgtctcacatttatagctgaatggacgagcggatttggcatgacttatgtatttacgcggcagtggttagtagtgtatag

SEQ ID NO: 67286 - DNA, 2765 bp, Zea Mays
gactcgacaccgcagcatcaaccatcagagcaactccctgctcaggcctcaaaaagactcgcctggatcaaagcgcgcggcaaaggtagctcgaccgtgcgccagagcagcagagctagtccgctcggcgccgtggccggacctcgccagcgcggcaaaggtagctcgaccgcgcgccggagctagtacgctcggcgccgtggccggacctcgccctcgcggcagcggtgcgcgcagctgcctgcgcggcggcagcggcggagctctcccacgcagccacgtttggtgtgcttcttcctcccctacgcccgcctcctctttttcatcgagcgtgcgttggggcgaccccgtccgtgaaaaatggcgggcctcagcggcggcggcggaggctggggcggctacgacgacgacgactggggcctcagcgcggagcagctggaccagatggagcgggacgccatccgccagctcgctgagcgcaaggcctccgcctccgcggcctccaccgcccccatccccgcctcccctctcggagccacctcgccgctcccctcccgcgctaccgtgccggcggcggccgtctcgtcgccgctcgggggcaaccaccccgctaccagggcctctctggaggcccgcttcggcaaggtagaagcactatctccctcgagaaatgcagtgaataatagccagggcagctcgcctaagatatctgttcatcttttcctccattctagcggtatgatcgctgcaagattcccatacagccagttacttgtcgatgcatttcggaagataccaaaagccagttggaatgctaaagaaagggtatggatgtttcccccctcgtctttagcaatagtagaggaggttcctcgctcagtacctggattaactgtggaggttcacaaattggatccgctagttcagcgtgctttagctgctgctttacgatccaaagatcttcgaggtttgtatgacaggattccccctcatctcgagtcaaagcttatgccatttcagcgtgaaggcatcaggtttgttttacagcatggtggcagagccctgattgcagatgaaatgggtcttggaaagacactacaggcaattgctgttgcttcttgccttcgtgatgcctggccagtccttgtaatctctccatcttctttgcgattacattgggcatctgcgattcagagttggcttaacatccctgtggaagatatcttggtggtattgccacatactggaggatcacataaagcaggattcagagtggcttactcaaactcgaaaggagattttcacttggatggggtgttcaatgtgatatcttatgatgtagttcccaagatacaaagcacacttctggatttggatttcaagattgttatagctgatgaatcacattttatgaagaatggccaagcaaagagaacagttgcttcacttcctgttttgcagaaagctcaatatgttgttttgcttagtggaactcctgctttgtctcgcccgattgagctctttactcagatccaggccttgtatcctacagtgtacaagagtgttagtgagtatggcaatatatattgcaagggtggttttttcgggttgtatcaaggtgctagcaatcatgaggagctgcataatttgatgaaagcaactgtcatgattcgtaggttgaagaaagatgtcctttcacagttgcctgttaaacgtagacaacaggtctttctagatttaagtgagaaagatgtgaaaaatgtccgcgctctgtttattgagttggagactttgaaggtcaaaattgagtcctctgactccaaagagatgatcgactctctcagatttgcttaccagaatattgtcaataagatctatactgattcagctgtagccaaaattccagctgtgttggatttcctgggtactatgattgaggaaggttgcaagttcttaatatttgctcatcaccaacccatgattgatgccattgagaaacatctcttgaagaagaaagtaaagtgtatcaaaattgacggcaagacacctttaactacaagacaaaccttagtcacagatttccaaaacaatgatgacgtcaaggcagcagtgttatccatcaaagccggaggctacgggataactttgacagcagcgagcacggtaatctttgccgagttatcatggactcctggggacatcattcaagctgaagatcgcgcgcacaggatcggtcaggtctcgtccgtgaacgtgtattatcttctctcgaacggtactatagatgatcttatgtgggacgttgttcagggcaaacttgagaacctgggatgctggacgggcaggagaagacgctggaggtttcccagagggactgcaggccaagcccctcgaagaagcagaagacactggtcggcttcctcaagcggcccagcgcgtccacgtccgcggaggagggtatgcccagcacttaatgaagcagcctcggatctgaggcgcggtcgtggcttgtgagcgaaccagatcaggtcataggcagccagcagccacaatggtgttcggctctatcacgttgtaacacttctccctccgtatttgctcgctctttcgtttcctgagagatgacagatgtatgcgtttggctgacgaagggaagaaaaatgagcaaaacttgaagtatttgttagggaaggatcctaaacactgaattatatgataaatttaacataattgcgtttgctaaatcagaatttggtgtaagccag

SEQ ID NO: 67287 - DNA, 2547 bp, Zea Mays
gactcgacaccgcagcatcaaccatcagagcaactccctgctcaggcctcaaaaagactcgcctggatcaaagcgcgcggcaaaggtagctcgaccgtgcgccagagcagcagagctagtccgctcggcgccgtggccggacctcgccagcgcggcaaaggtagctcgaccgcgcgccggagctagtacgctcggcgccgtggccggacctcgccctcgcggcagcggtgcgcgcagctgcctgcgcggcggcagcggcggagctctcccacgcagccacgtttggtgtgcttcttcctcccctacgcccgcctcctctttttcatcgagcgtgcgttggggcgaccccgtccgtgaaaaatggcgggcctcagcggcggcggcggaggctggggcggctacgacgacgacgactggggcctcagcgcggagcagctggaccagatggagcgggacgccatccgccagctcgctgagcgcaaggcctccgcctccgcggcctccaccgcccccatccccgcctcccctctcggagccacctcgccgctcccctcccgcgctaccgtgccggcggcggccgtctcgtcgccgctcgggggcaaccaccccgctaccagggcctctctggaggcccgcttcggcaaggtagaagcactatctccctcgagaaatgcagtgaataatagccagggcagctcgcctaagatatctgttcatcttttcctccattctagcggtatgatcgctgcaagattcccatacagccagttacttgtcgatgcatttcggaagataccaaaagccagttggaatgctaaagaaagggtatggatgtttcccccctcgtctttagcaatagtagaggaggttcctcgctcagtacctggattaactgtggaggttcacaaattggatccgctagttcagcgtgctttagctgctgctttacgatccaaagatcttcgaggtttgtatgacaggattccccctcatctcgagtcaaagcttatgccatttcagcgtgaaggcatcaggtttgttttacagcatggtggcagagccctgattgcagatgaaatgggtcttggaaagacactacaggcaattgctgttgcttcttgccttcgtgatgcctggccagtccttgtaatctctccatcttctttgcgattacattgggcatctgcgattcagagttggcttaacatccctgtggaagatatcttggtggtattgccacatactggaggatcacataaagcaggattcagagtggcttactcaaactcgaaaggagattttcacttggatggggtgttcaatgtgatatcttatgatgtagttcccaagatacaaagcacacttctggatttggatttcaagattgttatagctgatgaatcacattttatgaagaatggccaagcaaagagaacagttgcttcacttcctgttttgcagaaagctcaatatgttgttttgcttagtggaactcctgctttgtctcgcccgattgagctctttactcagatccaggccttgtatcctacagtgtacaagagtgttagtgagtatggcaatatatattgcaagggtggttttttcgggttgtatcaaggtgctagcaatcatgaggagctgcataatttgatgaaagcaactgtcatgattcgtaggttgaagaaagatgtcctttcacagttgcctgttaaacgtagacaacaggtctttctagatttaagtgagaaagatgtgaaaaatgtccgcgctctgtttattgagttggagactttgaaggtcaaaattgagtcctctgactccaaagagatgatcgactctctcagatttgcttaccagaatattgtcaataagatctatactgattcagctgtagccaaaattccagctgtgttggatttcctgggtactatgattgaggaaggttgcaagttcttaatatttgctcatcaccaacccatgattgatgccattgagaaacatctcttgaagaagaaagtaaagtgtatcaaaattgacggcaagacacctttaactacaagacaaaccttagtcacagatttccaaaacaatgatgacgtcaaggcagcagtgatgctggacgggcaggagaagacgctggaggtttcccagagggactgcaggccaagcccctcgaagaagcagaagacactggtcggcttcctcaagcggcccagcgcgtccacgtccgcggaggagggtatgcccagcacttaatgaagcagcctcggatctgaggcgcggtcgtggcttgtgagcgaaccagatcaggtcataggcagccagcagccacaatggtgttcggctctatcacgttgtaacacttctccctccgtatttgctcgctctttcgtttcctgagagatgacagatgtatgcgtttggctgacgaagggaagaaaaatgagcaaaacttgaagtatttgttagggaaggatcctaaacactgaattatatgataaatttaacataattgcgtttgctaaatcagaatttggtgtaagccag

SEQ ID NO: 67288 - DNA, 2207 bp, Zea Mays
gactcgacaccgcagcatcaaccatcagagcaactccctgctcaggcctcaaaaagactcgcctggatcaaagcgcgcggcaaaggtagctcgaccgtgcgccagagcagcagagctagtccgctcggcgccgtggccggacctcgccagcgcggcaaaggtagctcgaccgcgcgccggagctagtacgctcggcgccgtggccggacctcgccctcgcggcagcggtgcgcgcagctgcctgcgcggcggcagcggcggagctctcccacgcagccacgtttggtagaagcactatctccctcgagaaatgcagcggtatgatcgctgcaagattcccatacagccagttacttgtcgatgcatttcggaagataccaaaagccagttggaatgctaaagaaagggtatggatgtttcccccctcgtctttagcaatagtagaggaggttcctcgctcagtacctggattaactgtggaggttcacaaattggatccgctagttcagcgtgctttagctgctgctttacgatccaaagatcttcgaggtttgtatgacaggattccccctcatctcgagtcaaagcttatgccatttcagcgtgaaggcatcaggtttgttttacagcatggtggcagagccctgattgcagatgaaatgggtcttggaaagacactacaggcaattgctgttgcttcttgccttcgtgatgcctggccagtccttgcgattcagagttggcttaacatccctgtggaagatatcttggtggtattgccacatactggaggatcacataaagcaggattcagagtggcttactcaaactcgaaaggagattttcacttggatggggtgttcaatgtgatatcttatgatgtagttcccaagatacaaagcacacttctggatttggatttcaagattgttatagctgatgaatcacattttatgaagaatggccaagcaaagagaacagttgcttcacttcctgttttgcagaaagctcaatatgttgttttgcttagtggaactcctgctttgtctcgcccgattgagctctttactcagatccaggccttgtatcctacagtgtacaagagtgttagtgagtatggcaatatatattgcaagggtggttttttcgggttgtatcaaggtgctagcaatcatgaggagctgcataatttgatgaaagcaactgtcatgattcgtaggttgaagaaagatgtcctttcacagttgcctgttaaacgtagacaacaggtctttctagatttaagtgagaaagatgtgaaaaatgtccgcgctctgtttattgagttggagactttgaaggtcaaaattgagtcctctgactccaaagagatgatcgactctctcagatttgcttaccagaatattgtcaataagatctatactgattcagctgtagccaaaattccagctgtgttggatttcctgggtactatgattgaggaaggttgcaagttcttaatatttgctcatcaccaacccatgattgatgccattgagaaacatctcttgttatccatcaaagccggaggctacgggataactttgacagcagcgagcacggtaatctttgccgagttatcatggactcctggggacatcattcaagctgaagatcgcgcgcacaggatcggtcaggtctcgtccgtgaacgtgtattatcttctctcgaacggtactatagatgatcttatgtgggacgttgttcagggcaaacttgagaacctggggcagatgctggacgggcaggagaagacgctggaggtttcccagagggactgcaggccaagcccctcgaagaagcagaagacactggtcggcttcctcaagcggcccagcgcgtccacgtccgcggaggagggtatgcccagcacttaatgaagcagcctcggatctgaggcgcggtcgtggcttgtgagcgaaccagatcaggtcataggcagccagcagccacaatggtgttcggctctatcacgttgtaacacttctccctccgtatttgctcgctctttcgtttcctgagagatgacagatgtatgcgtttggctgacgaagggaagaaaaatgagcaaaacttgaagtatttgttagggaaggatcctaaacactgaattatatgataaatttaacataattgcgtttgctaaatcagaatttggtgtaagccag

SEQ ID NO: 67289 - DNA, 2759 bp, Zea Mays
gactcgacaccgcagcatcaaccatcagagcaactccctgctcaggcctcaaaaagactcgcctggatcaaagcgcgcggcaaaggtagctcgaccgtgcgccagagcagcagagctagtccgctcggcgccgtggccggacctcgccagcgcggcaaaggtagctcgaccgcgcgccggagctagtacgctcggcgccgtggccggacctcgccctcgcggcagcggtgcgcgcagctgcctgcgcggcggcagcggcggagctctcccacgcagccacgtttggtgtgcttcttcctcccctacgcccgcctcctctttttcatcgagcgtgcgttggggcgaccccgtccgtgaaaaatggcgggcctcagcggcggcggcggaggctggggcggctacgacgacgacgactggggcctcagcgcggagcagctggaccagatggagcgggacgccatccgccagctcgctgagcgcaaggcctccgcctccgcggcctccaccgcccccatccccgcctcccctctcggagccacctcgccgctcccctcccgcgctaccgtgccggcggcggccgtctcgtcgccgctcgggggcaaccaccccgctaccagggcctctctggaggcccgcttcggcaaggtagaagcactatctccctcgagaaatgcagtgaataatagccagggcagctcgcctaagatatctgttcatcttttcctccattctagcggtatgatcgctgcaagattcccatacagccagttacttgtcgatgcatttcggaagataccaaaagccagttggaatgctaaagaaagggtatggatgtttcccccctcgtctttagcaatagtagaggaggttcctcgctcagtacctggattaactgtggaggttcacaaattggatccgctagttcagcgtgctttagctgctgctttacgatccaaagatcttcgaggtttgtatgacaggattccccctcatctcgagtcaaagcttatgccatttcagcgtgaaggcatcaggtttgttttacagcatggtggcagagccctgattgcagatgaaatgggtcttggaaagacactacaggcaattgctgttgcttcttgccttcgtgatgcctggccagtccttgtaatctctccatcttctttgcgattacattgggcatctgcgattcagagttggcttaacatccctgtggaagatatcttggtggtattgccacatactggaggatcacataaagcaggattcagagtggcttactcaaactcgaaaggagattttcacttggatggggtgttcaatgtgatatcttatgatgtagttcccaagatacaaagcacacttctggatttggatttcaagattgttatagctgatgaatcacattttatgaagaatggccaagcaaagagaacagttgcttcacttcctgttttgcagaaagctcaatatgttgttttgcttagtggaactcctgctttgtctcgcccgattgagctctttactcagatccaggccttgtatcctacagtgtacaagagtgttagtgagtatggcaatatatattgcaagggtggttttttcgggttgtatcaaggtgctagcaatcatgaggagctgcataatttgatgaaagcaactgtcatgattcgtaggttgaagaaagatgtcctttcacagttgcctgttaaacgtagacaacagatttaagtgagaaagatgtgaaaaatgtccgcgctctgtttattgagttggagactttgaaggtcaaaattgagtcctctgactccaaagagatgatcgactctctcagatttgcttaccagaatattgtcaataagatctatactgattcagctgtagccaaaattccagctgtgttggatttcctgggtactatgattgaggaaggttgcaagttcttaatatttgctcatcaccaacccatgattgatgccattgagaaacatctcttgaagaagaaagtaaagtgtatcaaaattgacggcaagacacctttaactacaagacaaaccttagtcacagatttccaaaacaatgatgacgtcaaggcagcagtgttatccatcaaagccggaggctacgggataactttgacagcagcgagcacggtaatctttgccgagttatcatggactcctggggacatcattcaagctgaagatcgcgcgcacaggatcggtcaggtctcgtccgtgaacgtgtattatcttctctcgaacggtactatagatgatcttatgtgggacgttgttcagggcaaacttgagaacctggggcagatgctggacgggcaggagaagacgctggaggtttcccagagggactgcaggccaagcccctcgaagaagcagaagacactggtcggcttcctcaagcggcccagcgcgtccacgtccgcggaggagggtatgcccagcacttaatgaagcagcctcggatctgaggcgcggtcgtggcttgtgagcgaaccagatcaggtcataggcagccagcagccacaatggtgttcggctctatcacgttgtaacacttctccctccgtatttgctcgctctttcgtttcctgagagatgacagatgtatgcgtttggctgacgaagggaagaaaaatgagcaaaacttgaagtatttgttagggaaggatcctaaacactgaattatatgataaatttaacataattgcgtttgctaaatcagaatttggtgtaagccag

SEQ ID NO: 67290 - DNA, 1016 bp, Zea Mays
ctacctccatactagcaagactcaatcggcgaaatcctgggcgtgcctgccaatgagcaagaagaggaagcatctggatccagcgaactcgttgaaagacagcgaacaagtagtcgcctcagatttcataagaggagacgatcttgatgacctattatcgaagcttatcaggagtgtggagattgccaaggcttcaaggggaggcttaccagaaaagatatggatgaagcaacaatttgctatcggcgtcaatgatgtcacaagggttcttgagcgaatgccgcattctgtcactgctcatcctgctcaaatgtctaatgaagcaccaactgtctcaggccgacgtcaagctcctttggtgccattgcaggctgtccttgtagctgccgactgcaatcccaaatggttaacaaaacacataccaacactagcgtctacaaggcaggtaccggtattgtgcgtgaaggacaacaagggaggctcagtaaggttaggccatgtggtgaatgtcagaacagcccttgccattggagtaaaggccaaagatagcgttctcaacaagaccattgatgagttcctgaaagacagtaaactggttgccaatgaaccataaagtaaccccaagtctagtgacacgtttgtactaaaaagcctgtacttccgggcatgcaacatcccaggatcatctcataaatgggtttaagtttgagaagggggtcaagtatcttgagcagattgtggcaatatcaatttggagggacttcttgagagaacagtcatgggaaataggacagactatttgtttggtccgtgcaatattgtttgactggtgaacctagttatccattgtgatctagaacttgtatcaaactccaatgtaacgagatgttaggatccttgtttattgggtacagttttttcttcttctcgaggctcgacaccggtacattaatttttcttgttttttatattctatagtatatataataatgtgaaaaggcttatattgtgatggt

SEQ ID NO: 67291 - DNA, 2228 bp, Zea Mays
gaacagcctactccagcctccagcgcctgctacgccgtcgcccacctccctcctctcctccagcgtcgcccgctcccgatcgtccaccgccacgcacctccctcctctgtcctctcctccaccccctcctccatctctagggcccgcctccctcttccagcgcccgagcaccccctcccctctcccacgtccagagtcggtctgacgttggcccatcgcccgataggtcctctagcagccaacgttgcctgcagctgcattccagagttccagagtttcagctacaaccacgaagttccaacgtctcctgcagctgctctatttgcacatacattgtttccagcaagcaacagtggaaaagatggtgatgatcaagacatggatgctcatgctcttgatattgatgagttggatgatgattactgatcctagatgcaagttctaacttgcttaattgcatagatttgtgtgttgaacttgatctgcttccttttatgctatttattttgtgaactcaaataatcaacttatgagtatgaacatattctatcgtgttgttttatgccaagtctgaaaagacgttccaacattagtttcaatgtttaaatgttgaaaacgtggttcctaacgttttattgttttaccgctttaataaccatggaaataaaaagagagacccaaacaagccgcagtgttttgtacgagaatgcaataactacagatcgaaatgtaaccagatattgcaaacttgtccatatatttcagatgcgctcaatgctaaaagatatgaaaccatgctcaattatgtgttacatctgctatataccccctctggtgttaatggatccatacaatatttaatgtatatgttttatatgtgtctagattcattgtcatccatttgaatatggacaaagaaataaagtgccaaaatgattaatatattggaacggagggagcgaacagagggagcattgttttcaagtcggacgacttgctagtcgttctggctgaccgacttgggcgtcgcgattaatcacgattagtcggacgacttggtcaattaatcgcgattggtccaaaccgacttagacgactaatcgtgactaatcgcgattaatcggacgacttgaaaacagtttgagggagtattgtatacattctatgtggtatttatatatacaaaacataaggctgttatttttttacagtcctttgtattttgaatttgaatacctattttcaagatcctgggcgtgcctgccaatgagcaagaagaggaagcatctggatccagcgaactcgttgaaagacagcgaacaagtagtcgcctcagatttcataagaggagacgatcttgatgacctattatcgaagcttatcaggagtgtggagattgccaaggcttcaaggggacgcttaccagaaaagatatggatgaagcaacaatttgctatcggcgtcaatgatgtcacaagggttcttgagcgaatgccgcattctgtcactgctcatcctgctcaaatgtctagtgaagcaccaactgtctcaggccaacgtcaagctcctttggtaccattgcaggctgtccttgtagctgccgactgcaatcccaaatggttaacaaaacacataccaacactagcgtttacaaggcaggtaccggtattgtgcatgaaggacaacaagggaggctcagtaaggttaggccatgtggtgaatgtcagaacagcgcttgccattggtgtaaaggccaaagatagcgttgtcaacaagactattgatgagttcctgaaagacagtaaactggttgccaatgaaccataaagtaacccaagtctagtgacacgtttgtactaaaaagcctgtacttctgggcatgcaacatcccaggatcatctcataaatgggtttaagtttgagaaggggatcaagtatcttgagcagattgtggcaatatcaatttggtgggacttcttcagagaacggtcatgggaaataggacagactatttgtttggtccgtgcaatattgtttgactggtgaactagttatccattgtgatctagaacttgtatcaaactccaatgtaacgagatgttagaatccttgtttattgggtacagttttttctttttctcgaggctcgacaccggtacattaatttttcttgttttctatattctatagtatatataataatgcgaaaaggcttacattgtgatgtt

SEQ ID NO: 67292 - DNA, 901 bp, Zea Mays
gaacagcctactccagcctccagcgcctgctacgccgtcgcccacctccctcctctcctccagcgtcgcccgctcccgatcgtccaccgccacgcacctccctcctctgtcctctcctccaccccctcctccatctctagggcccgcctccctcttccagcgcccgagcaccccctcccctctcccacgtccagagtcggtctgacgttggcccatcgcccgataggtcctctagcagccaacgttgcctgcagctgcattccagagttccagagtttcagctacaaccacgaagttccaacgtctcctgcagctgctctatttgatcctgggcgtgcctgccaatgagcaagaagaggaagcatctggatccagcgaactcgttgaaagacagcgaacaagtagtcgcctcagatttcataagaggagacgatcttgatgacctattatcgaagcttatcaggagtgtggagattgccaaggcttcaaggggacgcttaccagaaaagatatggatgaagcaacaatttgctatcggcgtcaatgatgtcacaagggttcttgagcgaatgccgcattctgtcactgctcatcctgctcaaatgtctagtgaagcaccaactgtctcaggccaacgtcaagctcctttggtaccattgcaggctgtccttgtagctgccgactgcaatcccaaatggttaacaaaacacataccaacactagcgtttacaaggcaggtaccggtattgtgcatgaaggacaacaagggaggctcagtaaggttaggccatgtggtgaatgtcagaacagcgcttgccattggtgtaaagggggtattgccacatactggaggatcacataaagcaggattcagagtggcttactcaaactcgaaaggaga

SEQ ID NO: 67293 - DNA, 1305 bp, Zea Mays
gaacagcctactccagcctccagcgcctgctacgccgtcgcccacctccctcctctcctccagcgtcgcccgctcccgatcgtccaccgccacgcacctccctcctctgtcctctcctccaccccctcctccatctctagggcccgcctccctcttccagcgcccgagcaccccctcccctctcccacgtccagagtcggtctgacgttggcccatcgcccgataggtcctctagcagccaacgttgcctgcagctgcattccagagttccagagtttcagctacaaccacgaagttccaacgtctcctgcagctgctctatttgtcctttgtattttgaatttgaatacctattttcaagatcctgggcgtgcctgccaatgagcaagaagaggaagcatctggatccagcgaactcgttgaaagacagcgaacaagtagtcgcctcagatttcataagaggagacgatcttgatgacctattatcgaagcttatcaggagtgtggagattgccaaggcttcaaggggacgcttaccagaaaagatatggatgaagcaacaatttgctatcggcgtcaatgatgtcacaagggttcttgagcgaatgccgcattctgtcactgctcatcctgctcaaatgtctagtgaagcaccaactgtctcaggccaacgtcaagctcctttggtaccattgcaggctgtccttgtagctgccgactgcaatcccaaatggttaacaaaacacataccaacactagcgtttacaaggcaggtaccggtattgtgcatgaaggacaacaagggaggctcagtaaggttaggccatgtggtgaatgtcagaacagcgcttgccattggtgtaaaggccaaagatagcgttgtcaacaagactattgatgagttcctgaaagacagtaaactggttgccaatgaaccataaagtaacccaagtctagtgacacgtttgtactaaaaagcctgtacttctgggcatgcaacatcccaggatcatctcataaatgggtttaagtttgagaaggggatcaagtatcttgagcagattgtggcaatatcaatttggtgggacttcttcagagaacggtcatgggaaataggacagactatttgtttggtccgtgcaatattgtttgactggtgaactagttatccattgtgatctagaacttgtatcaaactccaatgtaacgagatgttagaatccttgtttattggggggtattgccacatactggaggatcacataaagcaggattcagagtggcttactcaaactcgaaaggaga

SEQ ID NO: 67294 - DNA, 937 bp, Zea Mays
gaacagcctactccagcctccagcgcctgctacgccgtcgcccacctccctcctctcctccagcgtcgcccgctcccgatcgtccaccgccacgcacctccctcctctgtcctctcctccaccccctcctccatctctagggcccgcctccctcttccagcgcccgagcaccccctcccctctcccacgtccagagtcggtctgacgttggcccatcgcccgataggtcctctagcagccaacgttgcctgcagctgcattccagagttccagagtttcagctacaaccacgaagttccaacgtctcctgcagctgctctatttgtcctttgtattttgaatttgaatacctattttcaagatcctgggcgtgcctgccaatgagcaagaagaggaagcatctggatccagcgaactcgttgaaagacagcgaacaagtagtcgcctcagatttcataagaggagacgatcttgatgacctattatcgaagcttatcaggagtgtggagattgccaaggcttcaaggggacgcttaccagaaaagatatggatgaagcaacaatttgctatcggcgtcaatgatgtcacaagggttcttgagcgaatgccgcattctgtcactgctcatcctgctcaaatgtctagtgaagcaccaactgtctcaggccaacgtcaagctcctttggtaccattgcaggctgtccttgtagctgccgactgcaatcccaaatggttaacaaaacacataccaacactagcgtttacaaggcaggtaccggtattgtgcatgaaggacaacaagggaggctcagtaaggttaggccatgtggtgaatgtcagaacagcgcttgccattggtgtaaagggggtattgccacatactggaggatcacataaagcaggattcagagtggcttactcaaactcgaaaggaga

SEQ ID NO: 67295 - DNA, 1224 bp, Zea Mays
gaacagcctactccagcctccagcgcctgctacgccgtcgcccacctccctcctctcctccagcgtcgcccgctcccgatcgtccaccgccacgcacctccctcctctgtcctctcctccaccccctcctccatctctagggcccgcctccctcttccagcgcccgagcaccccctcccctctcccacgtccagagtcggtctgacgttggcccatcgcccgataggtcctctagcagccaacgttgcctgcagctgcattccagagttccagagtttcagctacaaccacgaagttccaacgtctcctgcagctgctctatttgatcctgggcgtgcctgccaatgagcaagaagaggaagcatctggatccagcgaactcgttgaaagacagcgaacaagtagtcgcctcagatttcataagaggagacgatcttgatgacctattatcgaagcttatcaggagtgtggagattgccaaggcttcaaggggacgcttaccagaaaagatatggatgaagcaacaatttgctatcggcgtcaatgatgtcacaagggttcttgagcgaatgccgcattctgtcactgctcatcctgctcaaatgtctagtgaagcaccaactgtctcaggccaacgtcaagctcctttggtaccattgcaggctgtccttgtagctgccgactgcaatcccaaatggttaacaaaacacataccaacactagcgtttacaaggcaggtaccggtattgtgcatgaaggacaacaagggaggctcagtaaggttaggccatgtggtgaatgtcagaacagcgcttgccattggtgtaaaggccaaagatagcgttgtcaacaagactattgatgagttcctgaaagacagtaaactggttgccaatgaaccataaagtaacccaagtctagtgacacgtttgtactaaaaagcctgtacttctgggcatgcaacatcccaggatcatctcataaatgggtttaagtttgagaaggggatcaagtatcttgagcagattgtggcaatatcaatttggtgggacttcttcagagaacggtcatgggaaataggacagactatttgtttggtccgtgcaatattgtttgactggtgaactagttatccattgtgatctagaacttgtatcaaactccaatgtaacgagatgttagaatccttgtttattggctatccatcttctgattgcaatgaat

SEQ ID NO: 67296 - DNA, 1417 bp, Zea Mays
gaacagcctactccagcctccagcgcctgctacgccgtcgcccacctccctcctctcctccagcgtcgcccgctcccgatcgtccaccgccacgcacctccctcctctgtcctctcctccaccccctcctccatctctagggcccgcctccctcttccagcgcccgagcaccccctcccctctcccacgtccagagtcggtctgacgttggcccatcgcccgataggtcctctagcagccaacgttgcctgcagctgcattccagagttccagagtttcagctacaaccacgaagttccaacgtctcctgcagctgctctatttgcacatacattgtttccagcaagcaacagtggaaaagatggtgatgatcaagacatggatgctcatgctcttgatattgatgagttggatgatgattactgatcctagatatcctgggcgtgcctgccaatgagcaagaagaggaagcatctggatccagcgaactcgttgaaagacagcgaacaagtagtcgcctcagatttcataagaggagacgatcttgatgacctattatcgaagcttatcaggagtgtggagattgccaaggcttcaaggggaggcttaccagaaaagatatggatgaagcaacaatttgctatcggcgtcaatgatgtcacaagggttcttgagcgaatgccgcattctgtcactgctcatcctgctcaaatgtctaatgaagcaccaactgtctcaggccgacgtcaagctcctttggtgccattgcaggctgtccttgtagctgccgactgcaatcccaaatggttaacaaaacacataccaacactagcgtctacaaggcaggtaccggtattgtgcgtgaaggacaacaagggaggctcagtaaggttaggccatgtggtgaatgtcagaacagcccttgccattggagtaaaggccaaagatagcgttctcaacaagaccattgatgagttcctgaaagacagtaaactggttgccaatgaaccataaagtaaccccaagtctagtgacacgtttgtactaaaaagcctgtacttccgggcatgcaacatcccaggatcatctcataaatgggtttaagtttgagaagggggtcaagtatcttgagcagattgtggcaatatcaatttggagggacttcttgagagaacagtcatgggaaataggacagactatttgtttggtccgtgcaatattgtttgactggtgaacctagttatccattgtgatctagaacttgtatcaaactccaatgtaacgagatgttaggatccttgtttattgggtacagttttttcttcttctcgaggctcgacaccggtacattaatttttcttgttttttatattctatagtatatataataatgtgaaaaggcttatattgtgatggt

SEQ ID NO: 67297 - DNA, 1277 bp, Zea Mays
gttgcttcacttcctgttttgcagaaccaactaattgtgacttacaatcacagaaagctcaatatgttgttttgcttagtggaactcctgctttgtctcgctagattgagctctttactcagatccaggccttgtatcctacagtgtacaagagtgttagtgagtatggcaatagatattgcaagggtgtaagtactattcttcgtgggtatggatatctactatccatatccatcacccgataggcacatgacatgtggacctagacatggccgcatcctagattccagtgccagcgccaggccccagcagcccagccccccaacggcccagctccccagccgagttttttgctattataaacctcattttaacttgcttcgacataatatactctacaatttagaattcaataaaacagtctttttaccacggttcaccattaaaatagaattactggttaatttaaaccaattttccttttcttttatcttttctacccgttttgcccttgctctattttgtgaacgcatccgtcgagggcagtcacaaggaactccaacgttggtgctgccgccgtcccagacttccgccaccgtgctgccgtcatccatacttcgccaccgcactgtcgccgtcgtcctagacttcgccaccgcgcgccgccgcctggcaggacttcacaacctcgctcgtagacatcaccagtatccacgccgtcctctgtatcaggttcgatcaggtttccagcatcctcgttagccacatgcacggggacgagtcagtcgagatgaattggagtttaaatcagagcaacacaatacagtcaccagttatattactagaacaagcatctccactgtgatgatgaaagcataacagcccaacagtgaagaaatgtgaagatggaggactttgtccatgagtactactctgtaaagatgttcaaaagggcatatgccagaagaatagagtttatttgtagctaagggtagttctagagggtccatcttgaccaagggtaccttaatcttgaggtaccgacagatgtgtttgtgaaccatatttagttatattgtgtgtgaaattgagaacagatcatggtggaaaaaacattgctctcagattgaattttggatgtcctaataatgctgaaaaactgcagcataacattctcttcaaataaatacaagtgatttaactgaaacctgtacctgctaatctgtatgatatgcggccatgtttctttcatctagaatgtataaatctgtgtgtag

SEQ ID NO: 67298 - DNA, 2197 bp, Zea Mays
gcagtcctgtggtcgcacggtccttcactcctgcgtcctgtgcctcggtgcctcccagacccaggcggccaggatcccagcctcccaggtccccggtggcggcagcagcctcccagtcccagatggccaccagttctaaaccctagccgccaaaccaacacgagcagctgtcgccctccaggccggccgagcggggcgccgggcaccgtcgcgccgagctgagcggagagtggagcacctgcaccgagcggccagcggtgcgccgacgcgccgtgcgccgagcacctgagtggccagcggggcgcccagcactcgtctagtcgtcttctctgattgtgatgtcaactcccaacgaaaattattatttgatgttgttggaatgttaaattgtgataaatttctgttagaatgctgctgaaatgttgttgtaattttagtgggcgggcggataacagatatctgttggataacggatatccggcgggtacaggtacggatatagatccgtatccacaagcgtaaatgggtatgggtatgtgtatgtgtatggattgggtttacctcgcgggtatggatacgcgaaacatatatccgcgttctacccgcccgattgccatccctaacaatacaggagaagagaatgggcttgcgctaggctgattaagccttgtgaaaactctgtgacataagctaggcagcgacaggggcggatttgggccgcaacgccatggaccggggcgtggtccatatacagagatatagtttggggttatggttcagaaatctaaaaaaaagagcgatactagacattttttagtagcactcacttatatacgtgtatcagaccgtttgggccgatttggatacagcccatgaaaggagaacagcccaacttacctctcgcttcatgcgtgagcgtgacgttgacggcgtaggctagcgcctagcgctagacccgcccgcggcccgccgcaccctcgcagtcccgactcctgcacaacgacgctgtcgagcctgcctggcgagtgttgtccggcggccggcaacggggaagagagcgtccgacggcgacgcactcgagcggcacccctcccaactcgctccctcctcggcccctgcagccctgctccgtggcgcgcatcactgggcggctcgccgtacaatcagcgagcgggtggcggctacctccatactagcaagactcaatcggcgaaatcctgggcgtgcctgccaatgagcaagaagaggaagcatctggatccagcgaactcgttgaaagacagcgaacaagtagtcgcctcagatttcataagaggagacgatcttgatgacctattatcgaagcttatcaggagtgtggagattgccaaggcttcaaggggaggcttaccagaaaagatatggatgaagcaacaatttgctatcggcgtcaatgatgtcacaagggttcttgagcgaatgccgcattctgtcactgctcatcctgctcaaatgtctaatgaagcaccaactgtctcaggccgacgtcaagctcctttggtgccattgcaggctgtccttgtagctgccgactgcaatcccaaatggttaacaaaacacataccaacactagcgtctacaaggcaggtaccggtattgtgcgtgaaggacaacaagggaggctcagtaaggttaggccatgtggtgaatgtcagaacagcccttgccattggagtaaaggccaaagatagcgttctcaacaagaccattgatgagttcctgaaagacagtaaactggttgccaatgaaccataaagtaaccccaagtctagtgacacgtttgtactaaaaagcctgtacttccgggcatgcaacatcccaggatcatctcataaatgggtttaagtttgagaagggggtcaagtatcttgagcagattgtggcaatatcaatttggagggacttcttgagagaacagtcatgggaaataggacagactatttgtttggtccgtgcaatattgtttgactggtgaacctagttatccattgtgatctagaacttgtatcaaactccaatgtaacgagatgttaggatccttgtttattgggtacagttttttcttcttctcgaggctcgacaccggtacattaatttttcttgttttttatattctatagtatatataataatgtgaaaaggcttatattgtgatggt

SEQ ID NO: 67299 - DNA, 1275 bp, Zea Mays
gcagtcctgtggtcgcacggtccttcactcctgcgtcctgtgcctcggtgcctcccagacccaggcggccaggatcccagcctcccaggtccccggtggcggcagcagcctcccagtcccagatggccaccagttctaaaccctagccgccaaaccaacacgagcagctgtcgccctccaggccggccgagcggggcgccgggcaccgtcgcgccgagctgagcggagagtggagcacctgcaccgagcggccagcggtgcgccgacgcgccgtgcgccgagcacctgagtggccagcggggcgcccagcactcgtctagtcgtcttctctgatcctgggcgtgcctgccaatgagcaagaagaggaagcatctggatccagcgaactcgttgaaagacagcgaacaagtagtcgcctcagatttcataagaggagacgatcttgatgacctattatcgaagcttatcaggagtgtggagattgccaaggcttcaaggggaggcttaccagaaaagatatggatgaagcaacaatttgctatcggcgtcaatgatgtcacaagggttcttgagcgaatgccgcattctgtcactgctcatcctgctcaaatgtctaatgaagcaccaactgtctcaggccgacgtcaagctcctttggtgccattgcaggctgtccttgtagctgccgactgcaatcccaaatggttaacaaaacacataccaacactagcgtctacaaggcaggtaccggtattgtgcgtgaaggacaacaagggaggctcagtaaggttaggccatgtggtgaatgtcagaacagcccttgccattggagtaaaggccaaagatagcgttctcaacaagaccattgatgagttcctgaaagacagtaaactggttgccaatgaaccataaagtaaccccaagtctagtgacacgtttgtactaaaaagcctgtacttccgggcatgcaacatcccaggatcatctcataaatgggtttaagtttgagaagggggtcaagtatcttgagcagattgtggcaatatcaatttggagggacttcttgagagaacagtcatgggaaataggacagactatttgtttggtccgtgcaatattgtttgactggtgaacctagttatccattgtgatctagaacttgtatcaaactccaatgtaacgagatgttaggatccttgtttattgggtacagttttttcttcttctcgaggctcgacaccgctcccggattatgtcctgcgcgttattcttcag

SEQ ID NO: 67300 - DNA, 1268 bp, Zea Mays
gcccgccgcaccctcgcagtcccgactcctgcacaacgacgctgtcgagcctgcctggcgagtgttgtccggcggccggcaacggggaagagagcgtccgacggcgacgcactcgagcggcacccctcccaactcgctccctcctcggcccctgcagccctgctccgtggcgcgcatcactgggcggctcgccgtacaatcagcgagcgggtggcggctacctccatactagcaagactcaatcggcgaatcctttgtattttgaatttgaatactattttcaagatcctgggcgtgcctgccaatgagcaagaagaggaagcatctggatccagcgaactcgttgaaagacagcgaacaagtagtcgcctcagatttcataagaggagacgatcttgatgacctattatcgaagcttatcaggagtgtggagattgccaaggcttcaaggggaggcttaccagaaaagatatggatgaagcaacaatttgctatcggcgtcaatgatgtcacaagggttcttgagcgaatgccgcattctgtcactgctcatcctgctcaaatgtctaatgaagcaccaactgtctcaggccgacgtcaagctcctttggtgccattgcaggctgtccttgtagctgccgactgcaatcccaaatggttaacaaaacacataccaacactagcgtctacaaggcaggtaccggtattgtgcgtgaaggacaacaagggaggctcagtaaggttaggccatgtggtgaatgtcagaacagcccttgccattggagtaaaggccaaagatagcgttctcaacaagaccattgatgagttcctgaaagacagtaaactggttgccaatgaaccataaagtaaccccaagtctagtgacacgtttgtactaaaaagcctgtacttccgggcatgcaacatcccaggatcatctcataaatgggtttaagtttgagaagggggtcaagtatcttgagcagattgtggcaatatcaatttggagggacttcttgagagaacagtcatgggaaataggacagactatttgtttggtccgtgcaatattgtttgactggtgaacctagttatccattgtgatctagaacttgtatcaaactccaatgtaacgagatgttaggatccttgtttattgggtacagttttttcttcttctcgaggctcgacaccggtacattaatttttcttgttttttatattctatagtatatataataatgtgaaaaggcttatattgtgatggt

SEQ ID NO: 67301 - DNA, 1113 bp, Zea Mays
tcaaactcacatagaagcaactcatgtccagcaccagctgggcataatggtattcctactgcaccgtgcaatttctggccaagcgggccaccttatcatggaccaccaatcaattatcctgatatgagtcggttgaatatttctgaatatcctaggggtattcataataaccaaggtttgcatgccaactaccatccaaaccatcctggttacaatgattatagctacagacctccaactcaacctaacatgcctagcaacatgcaaaatattggacactggggagccaacccgggatgttcacagccatcttcggaccctcaaggtcttgtaagatatatcttaggtgctttggaagttttgaagactgagaagattcctccaacagagcaatatatagcagattgtatatggtatggacatggtgatgctaatatgccaaattttgatgttaagaaggcacttcaagttgccatgcagcatcaagctgttgtcaagaaaaagttagggaaaatgtcattctttctgggaaaagatgaaaatctctggaaatgtgttaatataatggatgataacgcaaaatacccaaaagaaactctagatgctgttcatgctttcatgtcttctgctccaggctattctgagataaagagttctcaatctaggttggcagccgttgtcgtttaacataatagtggctgatgctactactgccactggtggaaaggcttagcatcggtacattatctgcttgtaccaattgaacatgttgaggttctggtcgttggtgcaagctgcgtccgcaaaagctaagttctgttgaggtttcctagcacaatgctctgcattttgccaagtttggggttaagttgttttacacacagtatatgttagctggagtgaaacagtaagtagccttagactgctaaattttagtgggagtcaatctgtcaactattgggcatgttgaaagaactctgggcagccctggctgtggctactcctatgggtgataattgtggtggtaagatgcttatgcaatcaagcataaagcggttcagagggactatcgtcttttgttcaggcagtataccgatgcttgatgctggtggt

SEQ ID NO: 67302 - DNA, 1204 bp, Zea Mays
  misc_feature (1)..(1): n is a, c, g, or t
nattgtaccaagatggcttcaaggcgtccatgaaatatgagttgacatggaggaaattttctgtagtattagactattggtatagctgcatagctgttgctattaagctactcgttgaagccttgatctacccacattatattcccagttcctacatgtactcattgcagtaagcatggatggacaggaccctgtgagtgtgaagttcagtgtatccacttttgaagcatggcaacagagtctgaaatgcaagcaaactgcattaaagacagtcatgctgctagctgcaaggttacctatagttcggtggcctctattggctctgccgggaaaggtttggagttcatctaagcgccttccagcatctttgctcccacctttagggcttgttcggttattcccaatacacatggattggatgggattggaaaaaattgtgaagaagtttgacttgtttgggattcaaacccatccaatcccgctcaatccacatggattgagagctaaccgaacaagcccttagatggcgggatgtttcttgtaatgctggcaaactattatgctgcttcttgtaaatcttactggttgctgattctaccaagtgctccggttgacatgttgcctgagagtaaatggcagtttgggtgtgtgcttcgacagcaattgcaaaaatggaacaggctagtagccgtgtcgttggcacaagttttggcaaatagacgtggttggtagccaaattggatatgctcttacagttcctttggtttggtttttgcgaatgtcgagacgtggacggtggaatggtggatccttctacaaaggaaatgatgtgaggatgtggacaagagaagaggagctggggtctcatatttcaaaactctattctattattatacataatagtagtaatagtaatatatatagggtcaagtataataagagccctgtattctaatagttaaaggaggtccaggctgatcactcctgcaacttggtttaacttggcacgccgactcaagcaggctgtcagatgcgccacccgccccactgtgcgctcaaaaaaggaatgcatgtacgagtcaatcattttctcttgcatgcacgtaaatttagaaaaaagatgtgtagcggtttctatttctaaatgtttttctccataaatataggatcgctgtaacaaccatacaactaggctcgtaaggac

SEQ ID NO: 67303 - DNA, 1990 bp, Zea Mays
attgtaccaagatggcttcaaggcgtccatgaaatatgagttgacatggaggaaattttctgtagtattagactattggtatagctgcatagctgttgctattaagctactcgttgaagccttgatctacccacattatattcccagttcctacatgtactcattgcagtaagcatggatggacaggaccctgtgagtgtgaagttcagtgtatccacttttgaagcatggcaacagagtctgaaatgcaagcaaactgcattaaagacagtcatgctgctagctgcaaggttacctatagttcggtggcctctattggctctgccgggaaaggtttggagttcatctaagcgccttccagcatctttgctcccacctttagggcttgttcggttattcccaatacacatggattggatgggattggaaaaaattgtgaagaagtttgacttgtttgggattcaaacccatccaatcccgctcaatccacatggattgagagctaaccgaacaagcccttagatggcgggatgtttcttgtaatgctggcaaactattatgctgcttcttgtaaatcttactggttgctgattctaccaagtgctccggttgacatgttgcctgagagtaaatggttgatgactctattaaatgcttcgatatgctgttgtctgtttctgttgtcttttgaaatgatcgtttggaggaaaactgcaggcagtttgggtgtgtgcttcgacagcaattgcaaaaatggaacaggctagtagccgtgtcgttggcacaagttttggcaaatagacgtggttggtagccaaattggatatgctcttacagttcctttgaaactttgtcgccaatggatgattatggacggagcccaatgtcttctatcataataggaaggggttctgggaggaacgcaactcctttttgccgtcgacatgcaaatccagaatgatcccattgactatgaaaaaaaggacttactaaaaataattgaaagaaaatggaaagttataagtgcaggttaccctgatgcacatgcaccaaaagaaacagccgcaaacattatgagtagaaatggggctttcaccaatgtttattcgatcttccgtggccagtcggaacaccagaacgcacaacatgaactgcatggatgatacatctaattaggtatatacaaggatggtgtggatgatttaccatcatgatgtctagtttaccttccatcctactccctcatcttcttcctgcaactctgcaagcaaaggatggacgagacacgactcatcagcgcacaccacaccacagtgaataccttgctgcttgcaacttgcattgcagtagctttttccaaagcaaaatgcacaaacggaaggtgttgcagaaatgaggaggtcgctttggagggagagcatccagatgattaattcctggaagaagctcgattctggcgattgatcgcacccaaggtccaaggagatctacaaaatgttggaagatcttgcaacaacacattgatgagcaatctaagggcccgttcgcttgtacaggaatgaaccgggattcgttccagctcatcaaaattatataaattagagaaataatccagctaggaatcattccggagctccaatgtctggaaaccgaacagtgcctaagggaaggtgcatcggttgaaaatagtgagaagcaggctcagctctccgaataacaaagaacctcagagcctgtgaagacaactgtttagcttatttccttgttgcacgagcacaagttgatcactagagactgcaaccgtttccaccatttcagtgaaggacaatgctcatgcaaggactgtactggtgattggcaaactttcaaacttgtaccgagccgttctcctatatccatggtcttcacaggcaatcgtttagttgaacatgcatctgaaagggcttctttttacgaacaacacatcgcactttctttctggagccatgga

SEQ ID NO: 67304 - DNA, 1206 bp, Zea Mays
attgtaccaagatggcttcaaggcgtccatgaaatatgagttgacatggaggaaattttctgtagtattagactattggtatagctgcatagctgttgctattaagctactcgttgaagccttgatctacccacattatattcccagttcctacatgtactcattgcagtaagcatggatggacaggaccctgtgagtgtgaagttcagtgtatccacttttgaagcatggcaacagagtctgaaatgcaagcaaactgcattaaagacagtcatgctgctagctgcaaggttacctatagttcggtggcctctattggctctgccgggaaaggtttggagttcatctaagcgccttccagcatctttgctcccacctttagggcttgttcggttattcccaatacacatggattggatgggattggaaaaaattgtgaagaagtttgacttgtttgggattcaaacccatccaatcccgctcaatccacatggattgagagctaaccgaacaagcccttagatggcgggatgtttcttgtaatgctggcaaactattatgctgcttcttgtaaatcttactggttgctgattctaccaagtgctccggttgacatgttgcctgagagtaaatggcagtttgggtgtgtgcttcgacagcaattgcaaaaatggaacaggctagtagccgtgtcgttggcacaagttttggcaaatagacgtggttggtagccaaattggatatgctcttacagttcctttgcaggtttggtttttgcgaatgtcgagacgtggacggtggaatggtggatccttctacaaaggaaatgatgtgaggatgtggacaagagaagaggagctggggtctcatatttcaaaactctattctattattatacataatagtagtaatagtaatatatatagggtcaagtataataagagccctgtattctaatagttaaaggaggtccaggctgatcactcctgcaacttggtttaacttggcacgccgactcaagcaggctgtcagatgcgccacccgccccactgtgcgctcaaaaaaggaatgcatgtacgagtcaatcattttctcttgcatgcacgtaaatttagaaaaaagatgtgtagcggtttctatttctaaatgtttttctccataaatataggatcgctgtaacaaccatacaactaggctcgtaaggac

SEQ ID NO: 67305 - DNA, 341 bp, Zea Mays
ttcaaggcgtccatgaaatatgagttgacatggaggaaattttctgtagtattagactattggtatagctgcatagctgttgctattaagctactcgttgaagccttgatctacccacattatattcccagttcctacatgtactcattgcagtaagcatggatggacaggaccctgtgagtgtgaagttcagtgtatccacttttgaagcatggcaacagagtctgaaatgcaagcaaactgcattaaagacagtcatgctgctagctgcaaggttacctatagttcggtggcctctattggctctgccgggaaaggcagtttgggtgtgtgcttcgaca

SEQ ID NO: 67306 - DNA, 1328 bp, Zea Mays
agcaacgtctcgccctcccagctcctcccaccaaacaaactgaaccactgtccgctgcgtgctttccttcctctcaacgccagccttgccgagagcccgagaccaatcgccgccatctcccggaatgacggggtgacgaaaccgcgccgcaccagacaagacagaggagccgccgccgcgacccacaggccaccgggtcgccgaggaggggatccagcgagccatgtcgaccgacgtgcccatgagccccgagctcgagcaggtggacggcgagatccaggacatcttccgcgcgctccagaatgggttccagaagatggacaagatcaaggactccagcaggcagtccaagcagctggaggatctcacggccaagatgagagagtgcaagcgcttgatcaaagagtttgaccgtatactcaaggatgaggagaaaaagaacacccctgatgtcaacaagcagctcaatgacaagaagcagttcatgatcaaagaactcaactcctatgtgaccttaaggaaaacgtaccagagcagccttggtaataagaggatcgaactattcgatacgggtaatgaccaggtggctgagggaactccagttcaaatggcatcagaaatgtcaaatcaagaactcattagcaccggaaggaaacaaatggaccaaactgatcaagctattgagcgctcaaaaatggttgtagcacaaactgttgaagttggagctcagactgctgcaactctgacacagcaaacggaacaaatgaagaggataggcaatgagctagattctgtccacttttcactgaagaaggctagtcaaatggtgaaagagattggccgtcagattgtcaacccgcataacaagaacatcagagacattccgggcctagcacctcccgccatgaacaggaagctgctgtccatcgacgctgcaggactctgagcgttgtgaatggctgcctcccgcagcacagcgcaacgcagcgcgtcagagttctcttatgagccacgatacatggcttcgcgattcttttgtgcttgtagtttacgtccgcccattctttccctattgcattggtgagtagtagcctcaggtttgtagcgggactcttgttgtttattgcttgcgagcccatagctttctggttgtttgtgtatatgcggtagtgatgtgaatgtgagagtcgagtggagattcttcatggttcgttcttatgagttgtgactggtttgtgagcttgtggtgaaaggttcgcagcttgcttggcatgcgtctcctctgttcctgccgtgctgctctgcagtcgatacaagaaaagataaaa

SEQ ID NO: 67307 - DNA, 1577 bp, Zea Mays
agcaacgtctcgccctcccagctcctcccaccaaacaaactgaaccactgtccgctgcgtgctttccttcctctcaacgccagccttgccgagagcccgagaccaatcgccgccatctcccggaatgacggggtgacgaaaccgcgccgcaccagacaagacagaggagccgccgccgcgacccacaggccaccgggtcgccgaggaggggatccagcgagccatgtcgaccgacgtgcccatgagccccgagctcgagcaggtggacggcgagatccaggacatcttccgcgcgctccagaatgggttccagaagatggacaagatcaaggactccagcaggcagtccaagcagctggaggatctcacggccaagatgagagagtgcaagcgcttgatcaaagagtttgaccgtatactcaaggatgaggagaaaaagaacacccctgatgtcaacaagcagctcaatgacaagaagcagttcatgatcaaagaactcaactcctatgtgaccttaaggaaaacgtaccagagcagccttggtaataagaggatcgaactattcgatacgggtaatgaccaggtggctgagggaactccagttcaaatggcatcagaaatgtcaaatcaagaactcattagcaccggaaggaaacaaatggaccaaactgatcaagctattgagcgctcaaaaatggttgtagcacaaactgttgaagttggagctcagactgctgcaactctgacacagcaaacggaacaaatgaagaggataggcaatgagctagattctgtccacttttcactgaagaaggctagtcaaatggtgaaagagattggccgtcaggttgctactgacaaatgcattatggcgttcctgtttctgattgtctgtggtgtcattgcaataattgttgttaagattgtcaacccgcataacaagaacatcagagacattccgggcctagcacctcccgccatgaacaggaagctgctgtccatcgacgctgcaggactctgagcgttgtgaatggctgcctcccgcagcacagcgcaacgcagcgcgtcagagttctcttatgagccacgatacatggcttcgcgattcttttgtgcttgtagtttacgtccgcccattctttccctattgcattggtgagtagtagcctcaggtttgtagcgggactcttgttgtttattgcttgcgagcccatagctttctggttgtttgtgtatatgcggtagtgatgtgaatgtgagagtcgagtggagattcttcatggttcgttcttatgagttgtgactggtttgtgagcttgtggtgaaaggttcgcagcttgcttggcatgcgtctcctctgttcctgccgtgctgctctgcagtcgatacaagaaaagataaaactggtaggttgcatcggggtttctgatggcaacgaacccagacacgccaggaccaacgttgatcaattatagacgctagcaatctgcaaaaggcgccccggcaacagtcacaggtgattttcagaggtacacattggctcaaattttggagactcctacagaaggaagaaacac

SEQ ID NO: 67308 - DNA, 1155 bp, Zea Mays
ctgagatgcttctccacagcattcggcggcggccagcgcccggacttcggcagaatgggttccagaagatggacaagatcaaggactccagcaggcagtccaagcagctggaggatctcacggccaagatgagagagtgcaagcgcttgatcaaagagtttgaccgtatactcaaggatgaggagaaaaagaacacccctgatgtcaacaagcagctcaatgacaagaagcagttcatgatcaaagaactcaactcctatgtgaccttaaggaaaacgtaccagagcagccttggtaataagaggatcgaactattcgatacgggtaatgaccaggtggctgagggaactccagttcaaatggcatcagaaatgtcaaatcaagaactcattagcaccggaaggaaacaaatggaccaaactgatcaagctattgagcgctcaaaaatggttgtagcacaaactgttgaagttggagctcagactgctgcaactctgacacagcaaacggaacaaatgaagaggataggcaatgagctagattctgtccacttttcactgaagaaggctagtcaaatggtgaaagagattggccgtcaggttgctactgacaaatgcattatggcgttcctgtttctgattgtctgtggtgtcattgcaataattgttgttaagattgtcaacccgcataacaagaacatcagagacattccgggcctagcacctcccgccatgaacaggaagctgctgtccatcgacgctgcaggactctgagcgttgtgaatggctgcctcccgcagcacagcgcaacgcagcgcgtcagagttctcttatgagccacgatacatggcttcgcgattcttttgtgcttgtagtttacgtccgcccattctttccctattgcattggtgagtagtagcctcaggtttgtagcgggactcttgttgtttattgcttgcgagcccatagctttctggttgtttgtgtatatgcggtagtgatgtgaatgtgagagtcgagtggagattcttcatggttcgttcttatgagttgtgactggtttgtgagcttgtggtgaaaggttcgcagcttgcttggcatgcgtctcctctgttcctgccgtgctgctctgcagtcgatacaagaaaagataaaa

SEQ ID NO: 67309 - DNA, 2843 bp, Zea Mays
tttgcttctctcctaacatggtagatagctagagtttcccccagccgccagccaccggctgctgcgccaccgccgtcggccaccacccgaccgtgcacaacacacctgcccgccctcgtgcgaagtagcacggcccctagctagggttggagcctagaccgtcggcgcccccacccatcgccggagtccggccaaccgccggcaccacggaatgaagccagttgtcggcgtccctactcctgatgcctacctgccccgcccgctcgttggcctcctagtagcagcgcgcccagttcacgctcccaccgctgctcgccagtcgccggccgtcgccgccaacgtgcctgcactcaccgccctccagtttcggctgtcgcgccttgcgctctcgatctctggacgtcgagttcatcgtcggcgcaccctcagcttctccacgccccgtcggcgttccctcggcgcctgcgttcactgcgccaccgcatcggtgttctttcacctcagtcgcaccacctcttcgcgttgccgtcttccctggcctacactatcgtctccctcgccttgcgtcatcagcttcctcgccttgcccgtcctcgccacacccgtgccgaccgtcctagcgcctgcccgtgagcgccaccatctctgactgctgccaccagctgtcacctgcagcgccgttgcgcgcttctgcgttgctcgccggtccaacctgctttcctgctccgctcagcacgatccatcacaacccactcaacatggttgctccttgttccacctctcttatgccatttccctccgtacctttgatgggaccaactttcgtgagtggtcagtgacgaaccctcctgtccaagggggcgctgctactgtcttctgcagctactgcaaggcgacgaccgacaacacataccatcgagaagtgcagacaatgtcctcctcgtcgccaacctctaatatgtgttttgacgtttaaacatagttcaaacgtcgtttaaatgtagttttaataacactgccagtcctccactaacgctgccgtagcttttgccgcccccacttcatttagctttgctcagtggcaccatcgtctcggtcacatggcaccatcgtctcggtcacatgtgtgggtctcgtttgtcatcacttgttcctagtggtgttcttgggacggtttctggtgatacctccctggttttaagcttggcaagcaactacagtagccctatcctagtagtcagactgcagactcaaccttttgatcttgttcactctaatgtatggggcattgctcccttcgtttcgaaagagggacatcgctattatgtgatttcattgatgatttttctcgtttcgcataagttattttttggattcacgagctcaagttcccactgcctatcagaattttgctattatggtcacacccaatttgattctcacattcatgtgtcacgggccgactctgcaggcgagtatttgtctcgcgctctccgtcaatctctcgctaagcaaggcacccttcctcaacattcttgtaccggtgctcacgctcacaatgctgttgttgagtgtaggcaccatcatcttcttgaaactgctcttgcatcactcctgacatcctttgtttctcttcatttttgggctgaagttgtgtctacaactgtttaccttgtgaacattcaaccctctattgctctacatggtgccactcctcttgagcaactctttgctcgaccatcgcagtacagtcatcttcatgcttttggttgtgttgcctttgtccttctccaatctcgtgaaaggaccaagctcattggacaatctgtttagtgtgtcttccttggatatgactctgagcgtaagggatatcgttgttgggactttgtcactcgtcgcattcgagtgtctcgggacgtcacctttgatgagtctcgtcccttctttactatggatttgtcctcttcttcctctcccactgagtctgttgatttcctcagtttggttccgcctcttcctatcaccttgtccctgctatctattcctccttcatcaccatcacctccacctccctctcctccaccaccaccccctcctctacctccctctcctctaccatcatcgcctcctctacctccgctaactccacctcctctatcattgaccgtcgtctcttcagctctatgcttattctgatgtgatttggggtaccgatccttcggatttcaaatccatctctgtctattgtgtctttcttgggtcctccttggtttttatggaagaccaagaagcagactgttgttgctcattccagtgttgatgttgagttgtgtactttggccagtatgacggctgaggtaacatggctttggtggttgttggctgactttgagatttctctcactacctccacgtctatgcactgtgatcataccggtgccattattattgctttggatccaatgaagcatcgactcactaaacgcattagcatcgactgtttctatgttcgatatgcagtttaggatcatgtgatttcccttcagtatgtgccttcagagttgcagcttgctgatttgcttgcaaggctcatactagagctcaacatagttttattctctccaaactcagtgttgttgacccgacatgagtttgagacgggtgttagtgtgtatatatagttccgttcttgtattgtattttctctagaatttagggttctctatgtaaacttacccaatgtacatttaccctttgggtcctatggaatagacaaattgtcatttgcttctctcctaacagatgtaaggtgtgtaacagttaacatgagcagtatattgtga

SEQ ID NO: 67310 - DNA, 155 bp, Zea Mays
attcactttcttcaaaggcacgatccaaatcactatgtatgttttctgtgtgaaaccaaaatcagtaggaattcaaaaactttaatattgcaatattacgttgtaagttcctcaatcaatctcttgttttccaaagcgaagtgagtcaattgagg

SEQ ID NO: 67311 - DNA, 1023 bp, Zea Mays
cgtatatatacgtggtccatgtcagttcgttcgtctcagcagtccgatagccaggaagcccgtgcacgtcgaccgacgtacgccaccatgccggggctcaccataggcgacaccgtccccaacctggagctggactccacccacggcaagatccgcatccacgactacgttggcgacggctacgctatcatcttctctcacccagccgacttcacgcccgtgtgcacgacggagatggcggcgatggcggggtacgccaaggagttcgagaagcgtggcgtgaagctgctgggcatctcgtgcgacgacgtggagtcgcacaggcagtggaccaaggacgtggaggcgtacggcgggaagcagcagcagcagcagcatacgacgacgaagaggtggccacgcccgctaactggaagcccggggagtgcgccgtcatcgcgcccggcgtctccgacgaggaggccaggaagatgttcccgcaggggttcgagaccgccgacctgccctccaagaagggctacctccgtttcaccaaggtttagctagccgacgtacggcacggacatctagctcgtctgtcagtccgcgtcgaccggggtgcgcggatcttttgtgcctgctggtggtttctctgactagtactagtatatatataggctctatgtatgtgcgtactatgccgtgccgtgttgtctcgtgtagtggtggcaaccggttcgtggcactaccgcgctagtattgtccacccatatcaatgtcctcttctgaacttagcggcgcacatgtttgtgcgtgtgtgtagcatctgctagtgcaattgcatgatgcatggccgtgcgaaaaggccctcggcgctacgacagcagccagcacggcacgtttcaaagtatgcctgatactgtacgatgtcttatagcatcttcgaaagactatttaaatagctcgccaagccaaattttggctacttaacaccaaaataaatctccaatagactcatcgagttatctgactatctaaattagt

SEQ ID NO: 67312 - DNA, 991 bp, Zea Mays
cgacagtggtggccacatccattcggctttctgggcttcaggaagatagtggcggacaggtgggagttcgccaacgagttcttcaggaagggcgccaagcacctcctcgccgagatccaccggaggaagtcgtcgcagccgctgccgacgccgctgccgccgcaccagccctaccaccaccacctccaccatctccaccaccacctcagcccgttctccccgccgccgctggcacagccggtgccgtcgtaccaccaccaccactttccaagaagagcccatcgccaccgccaccgcgccgcacggcggtgctcaagccgccgccgccggcggcaacaatgaaggcagcggcgccggctcccggcggggactttctggccgcgctgtcggaggacaaccggcagctgcggcggcgcaactcgctgctgctgtcggagctggcgcacatgaagaagctctacaacgacatcatctacttcctgcagaaccacgtggccccggtgacgagcccctcgtcggcggcgcacgcgtccctgcccagcgccggcggcggcggcgccgcggcgtcctcctgcaggctaatggagctggacccggcggactccccatccccgccgcggcggccggaggcggacgacggcacggacacggtgaagctgttcggcgtggccctgcagggcaagaagaagaagcgggcgcaccaggaggatggggacgacggcaaccatgagcagggaagcagcgacgtctagccgccggccggcttgcattgctagctctctcgttcgtgtacatacagagatcagatcagagagtagtagtttgcctcgctagctaggctaggctaggctttggtaattttcttctgagtgcgtactgaaattaatgtgcaagagcgaagtgtttgtctgagtaaaactaacaagaatctacggatgcgtgcatggaagctaagctagatgcagaggcttgcaccaccttctcaattcgc

SEQ ID NO: 67313 - DNA, 1494 bp, Zea Mays
attgcttctgcagttccaaccgtactcagaagcgctgctcacctgccgtggcccctcccggctcccaatgcgagaggatgcgcttttaaagggggcggaccgggctcgcctcgcctcgcctgggccggctgcatctttctcctcccaccatcacctcctccacctcctcctctttatccatctgccagggcgcacgaggagaacggcggcgtctgagatcgcgaggccgaggcttgtcccgtccccgctccgctcctcccacccacggtttctggaggacaattcttcgctgtctagccttcctcaaaagtaaaaagggtaaatgggatcagaagggccttcagttgtcactgtccatgttactggatttaagaagttccatggggttgctgagaacccaaccgagaaaattgtgaccaatcttaaatctttcttggaaaagcgagggttgccaaaaaatcttgtcctcggaagctgcacagttctcgaaacagcaggggaaggggcacttgccacattatataaggttttagagtctgctgttgcagacagaggaactgggtcctcggcacagggacaagtaatttggatccactttggggtcaacagtggcgcaataaggtttgcccttgagaaccaagctgttaatgaggctaccttccggtgtccagatgagctaggatggaaaccacagagggtccctattgtgccctctgatggaagcatctcacggacgagagagactaccctgccagtcaatgaattaaccaagtcactccggaagataggctacgacgtggtgccctccggcgacgccggtcggtttgtatgcaactacgtgtactaccactctcttcggttcgcggagcaacacggcatcaaatccctgttcgtgcatgttcccctcttcttgacgatcgacgaggaggtccagatgcacttcgtcgcttccctccttgaagtcatcgctttctcatccaactaggaacagcagttggaagatcagcgtctggattcctatctcaaggatggatgtaaagctggaatgctgcatgtaggctgaataaggtggtgtggtcattggcgatagatgatgatcttgctccagagggtgtgtttgggaattgggagggggggaaaagaggaaattgctgcatagagtcagacggtgtatcagcttgtacgccatcaatcaagtgctgtaaacatgcctgggaaataattggggacctggatttgaataagatttgagttgttgggggcggacgcgctacattaagacttgttcggttattcccaatatatatggatcggatgagattggaaaaaattaagaaaaagtttgacttgtttgggattcaaacccatccaattccactcaatccatatggattaggagctaaccgaacaagtccttacgtgatttacgtgcgacgggatagaaatcatgtatgttgacgtggataaatgtgctactagtctaggctgtttaat

SEQ ID NO: 67314 - DNA, 1325 bp, Zea Mays
ctgcataatttcttatctttgtgattcaggtttctggaggacaattcttcgctgtctagccttcctcaaaagtaaaaagggtaaatgggatcagaagggccttcagttgtcactgtccatgttactggatttaagaagttccatggggttgctgagaacccaaccgagaaaattgtgaccaatcttaaatctttcttggaaaagcgagggttgccaaaaaatcttgtcctcggaagctgcacagttctcgaaacagcaggggaaggggcacttgccacattatataaggttttagagtctgctgttgcagacagaggaactgggtcctcggcacagggacaagtaatttggatccactttggggtcaacagtggcgcaataaggtttgcccttgagaaccaagctgttaatgaggctaccttccggtgtccagatgagctaggatggaaaccacagagggtccctattgtgccctctgatggaagcatctcacggacgagagagactaccctgccagtcaatgaattaaccaagtcactccggaagataggctacgacgtggtgccctccggcgacgccggtcggtttgtatgcaactacgtgtactaccactctcttcggttcgcggagcaacacggcatcaaatccctgttcgtgcatgttcccctcttcttgacgatcgacgaggaggtccagatgcacttcgtcgcttccctccttgaagtcatcgctttctcatccaactaggaacagcagttggaagatcagcgtctggattcctatctcaaggatggatgtaaagctggaatgctgcatgtaggctgaataaggtggtgtggtcattggcgatagatgttaatcttgctccacaggttgtgtttgggaatcgggagggaaaaaaagagaggtcattggcgatagatgatgatcttgctccagagggtgtgtttgggaattgggagggggggaaaagaggaaattgctgcatagagtcagacggtgtatcagcttgtacgccatcaatcaagtgctgtaaacatgcctgggaaataattggggacctggatttgaataagatttgagttgttgggggcggacgcgctacattaagacttgttcggttattcccaatatatatggatcggatgagattggaaaaaattaagaaaaagtttgacttgtttgggattcaaacccatccaattccactcaatccatatggattaggagctaaccgaacaagtccttacgtgatttacgtgcgacgggatagaaatcatgtatgttgacgtggataaatgtgctactagtctaggctgtttaat

SEQ ID NO: 67315 - DNA, 2630 bp, Zea Mays
cggctctcgtttccgccgcgacgccgcctattcaaaccccgcaatcccaaaccctcccccccccctgccaccgggccatggcggcctcctcctcccgcggcgccgccgctgccgccgttgatgacgacgacgagccctacctcctgggcttcatcatctccaagatcgtcggcatgcgctactaccgcggcaaggtccacggccgcgagaccgtcggcctggtccgccagccgctcaaccggtacgataacaacgccatcgccgtctttaatgcccgcaacgaccaggtcggccacctcccaggcgccctcgcggcggtgctcgccccgctcctcgactcccacctcctcgccgcggcgcagggcatcgtgccccggtcgggctcgaagatcaaccccaacgcctacagcctcccctgccaggtccacctattcgcgcgccccgctgccgcatccgtcgtcgaggccgcgctccacgaggccggcatcgacctcatccacgtcgaccaccccgagttcgccctctcccaggcggccgcggtcatggagcagttcaagaagccggaccgcgaccgcgacgtcgataagctcttctcgcttgtggggaaagaagggaagaatcagactcagcccatggacccgcccggggatgtcgtgctgtccgagctcttcggacaccagaaggaggcgctggggtggatggtgcaccgggaggagtccgccgacctgccgcccttctggcaagaaggtgaagatgggggattcgagaacgtgcttaccaatcaaaagacggagaaacgaccgccgccgttaaagggcgggatcttcgctgatgatatggggcttgggaagacgcttacactcctgtcattgattggaaggactaaagctcgcaatgtgggtgcgaagaaggctagagggggcaagaggaggaaggttgaggacggaggggaggggtcgcggaccacgcttgtggtctgcccaccctcggtgttctcatcttgggtgacacaactggaggaacacttgaaagcaggcagcctgaaagtctacatgtaccatggcgagcggacgagagataagaaggagctgttgaagtatgacctcgttcttaccacctacagcatcttggggacagaatttgagcaggaggactcaccggtgaaggatatcgagtggtttcgtgtgatcctggatgaagcccatgtgatcaagaactctgcagcacggcagacgaaggcggttatcgctctgaatgcagagaggcggtgggtggtcactgggacacccattcagaacagctcatttgatttatatcccctcatggcatttttgagattccagcctttctcaatcaagagctactggcagagcttgatccagcgccccttagagaaaggaagtaaggctggattgtcacggttgcaaaacctcttaggtgctatttcattgcggagaatcaaagagatggacgatggaaacaagagcatggttgaacttccctccaaaactgttttggcatgttatattgatctttctgcagaggagcgtgaatactatgatcagatggaacaggaagggaggaacaaaatgcaggaattcggtgacagagattcgattctgagtaattactcaaccgtgctttatttcattctgaggctccgccagctctgtgatgatgttgctttgtgtcctttagacatgaaagcatggtttcctgcaagctctatcgaagatgtgtctaaacacccagagctgttgaagaaactggccttattggttgatgatggagatgactttgactgtcctatttgcctctctccaccaactaaaactgtcataaccagctgcactcacatatactgccaaacctgcatcctaaaaatcctcaagagctccagttcccgctgtccaatatgcaggcgcaccttatctaaagaggacctcttccttgctccagaggtaaagcatcctgatgaagatggttcaggcaaccttgagtctgacagacccctctcatccaaggtgaagatgctgatcttgctggaagcgcccctcagaaaggcaggctttaagacactacgcctcgacggctcaatgagcgcgaagaagaggctgcaagtcatccaagaattcagtcacggtggctctgactccccaactgtgctactggccagtctgaaagccgcgggagccggcgtgaacctcacagctgcctcgacggtgtacctgttcgacccctggtggaaccctggggtagaggagcaggccatggacagggtgcaccggatcggacagaagaaagaagtgaaggtgataaggctcatcgtgaagggcagcatcgaggagaggatactggccctgcaggagaggaagaagcggctgatcagcggcgcattcgggaagaagggaggcaagaacgagaaggagatgcgtgtcgaagagctacggatgatgttgggcctaggtgttacgcttaacagcaccaacaaaaaagtgcatcatcagtactgcaacactcacttatcatttttattatgtcaggaaatcgtcttgtcatatttccgtgcactgcactttttttgcaaatactatcaaattagccctgcagcaactacagctgtgtgtttg

SEQ ID NO: 67316 - DNA, 2692 bp, Zea Mays
atggcggcctcctcctcccgcggcgccgccgctgccgccgttgatgacgacgacgagccctacctcctgggcttcatcatctccaagatcgtcggcatgcgctactaccgcggcaaggtccacggccgcgagaccgtcggcctggtccgccagccgctcaaccggtacgataacaacgccatcgccgtctttaatgcccgcaacgaccaggtcggccacctcccaggcgccctcgcggcggtgctcgccccgctcctcgactcccacctcctcgccgcggcgcagggcatcgtgccccggtcgggctcgaagatcaaccccaacgcctacagcctcccctgccaggtccacctattcgcgcgccccgctgccgcatccgtcgtcgaggccgcgctccacgaggccggcatcgacctcatccacgtcgaccaccccgagttcgccctctcccaggcggccgcggtcatggagcagttcaagaagccggaccgcgaccgcgacgtcgataagctcttctcgcttgtggggaaagaagggaagaatcagactcagcccatggacccgcccggggatgtcgtgctgtccgagctcttcggacaccagaaggaggcgctggggtggatggtgcaccgggaggagtccgccgacctgccgcccttctggcaagaaggtgaagatgggggattcgagaacgtgcttaccaatcaaaagacggagaaacgaccgccgccgttaaagggcgggatcttcgctgatgatatggggcttgggaagacgcttacactcctgtcattgattggaaggactaaagctcgcaatgtgggtgcgaagaaggctagagggggcaagaggaggaaggttgaggacggaggggaggggtcgcggaccacgcttgtggtctgcccaccctcggtgttctcatcttgggtgacacaactggaggaacacttgaaagcaggcagcctgaaagtctacatgtaccatggcgagcggacgagagataagaaggagctgttgaagtatgacctcgttcttaccacctacagcatcttggggacagaatttgagcaggaggactcaccggtgaaggatatcgagtggtttcgtgtgatcctggatgaagcccatgtgatcaagaactctgcagcacggcagacgaaggcggttatcgctctgaatgcagagaggcggtgggtggtcactgggacacccattcagaacagctcatttgatttatatcccctcatggcatttttgagattccagcctttctcaatcaagagctactggcagagcttgatccagcgccccttagagaaaggaagtaaggctggattgtcacggttgcaaaacctcttaggtgctatttcattgcggagaatcaaagagatggacgatggaaacaagagcatggttgaacttccctccaaaactgttttggcatgttatattgatctttctgcagaggagcgtgaatactatgatcagatggaacaggaagggaggaacaaaatgcaggaattcggtgacagagattcgattctgagtaattactcaaccgtgctttatttcattctgaggctccgccagctctgtgatgatgttgctttgtgtcctttagacatgaaagcatggtttcctgcaagctctatcgaagatgtgtctaaacacccagagctgttgaagaaactggccttattggttgatgatggagatgactttgactgtcctatttgcctctctccaccaactaaaactgtcataaccagctgcactcacatatactgccaaacctgcatcctaaaaatcctcaagagctccagttcccgctgtccaatatgcaggcgcaccttatctaaagaggacctcttccttgctccagagttcaggaagatgctgatcttgctggaagcgcccctcagaaaggcaggctttaagacactacgcctcgacggctcaatgagcgcgaagaagaggctgcaagtcatccaagaattcagtcacggtggctctgactccccaactgtgctactggccagtctgaaagccgcgggagccggcgtgaacctcacagctgcctcgacggtgtacctgttcgacccctggtggaaccctggggtagaggagcaggccatggacagggtgcaccggatcggacagaagaaagaagtgaaggtgataaggctcatcgtgaagggcagcatcgaggagaggatactggccctgcaggagaggaagaagcggctgatcagcggcgcattcgggaagaagggaggcaagaacgagaaggagatgcgtgtcgaagagctacggatgatgttgggcctaggtaagtaaggaaaaggctggttggtggtgataggaggagtgatgcttgtgttgcttgtgatatagctctggcggtagaagttgtagctagggcgatggagatgagaccatcaaccatgacatcacagttttctcggtgtaggtagtttcagtgtaggcataggtagggctggaagaaaacgaaatccaggcacgcgtgctaaacattagcactagatcagtgctaaatgattgggtcctcacttcctcagctgtgatggtcaattactgaacacggtcaaatctagtagtagctgtgctaaatgaattgcgtttgtagctttcctatttatccaattggacagtcaggactcctgggcttggg

SEQ ID NO: 67317 - DNA, 2680 bp, Zea Mays
atggcggcctcctcctcccgcggcgccgccgctgccgccgttgatgacgacgacgagccctacctcctgggcttcatcatctccaagatcgtcggcatgcgctactaccgcggcaaggtccacggccgcgagaccgtcggcctggtccgccagccgctcaaccggtacgataacaacgccatcgccgtctttaatgcccgcaacgaccaggtcggccacctcccaggcgccctcgcggcggtgctcgccccgctcctcgactcccacctcctcgccgcggcgcagggcatcgtgccccggtcgggctcgaagatcaaccccaacgcctacagcctcccctgccaggtccacctattcgcgcgccccgctgccgcatccgtcgtcgaggccgcgctccacgaggccggcatcgacctcatccacgtcgaccaccccgagttcgccctctcccaggcggccgcggtcatggagcagttcaagaagccggaccgcgaccgcgacgtcgataagctcttctcgcttgtggggaaagaagggaagaatcagactcagcccatggacccgcccggggatgtcgtgctgtccgagctcttcggacaccagaaggaggcgctggggtggatggtgcaccgggaggagtccgccgacctgccgcccttctggcaagaaggtgaagatgggggattcgagaacgtgcttaccaatcaaaagacggagaaacgaccgccgccgttaaagggcgggatcttcgctgatgatatggggcttgggaagacgcttacactcctgtcattgattggaaggactaaagctcgcaatgtgggtgcgaagaaggctagagggggcaagaggaggaaggttgaggacggaggggaggggtcgcggaccacgcttgtggtctgcccaccctcggtgttctcatcttgggtgacacaactggaggaacacttgaaagcaggcagcctgaaagtctacatgtaccatggcgagcggacgagagataagaaggagctgttgaagtatgacctcgttcttaccacctacagcatcttggggacagaatttgagcaggaggactcaccggtgaaggatatcgagtggtttcgtgtgatcctggatgaagcccatgtgatcaagaactctgcagcacggcagacgaaggcggttatcgctctgaatgcagagaggcggtgggtggtcactgggacacccattcagaacagctcatttgatttatatcccctcatggcatttttgagattccagcctttctcaatcaagagctactggcagagcttgatccagcgccccttagagaaaggaagtaaggctggattgtcacggttgcaaaacctcttaggtgctatttcattgcggagaatcaaagagatggacgatggaaacaagagcatggttgaacttccctccaaaactgttttggcatgttatattgatctttctgcagaggagcgtgaatactatgatcagatggaacaggaagggaggaacaaaatgcaggaattcggtgacagagattcgattctgaacatgaaagcatggtttcctgcaagctctatcgaagatgtgtctaaacacccagagctgttgaagaaactggccttattggttgatgatggagatgactttgactgtcctatttgcctctctccaccaactaaaactgtcataaccagctgcactcacatatactgccaaacctgcatcctaaaaatcctcaagagctccagttcccgctgtccaatatgcaggcgcaccttatctaaagaggacctcttccttgctccagaggtaaagcatcctgatgaagatggttcaggcaaccttgagtctgacagacccctctcatccaagttcaggaagatgctgatcttgctggaagcgcccctcagaaaggcaggctttaagacactacgcctcgacggctcaatgagcgcgaagaagaggctgcaagtcatccaagaattcagtcacggtggctctgactccccaactgtgctactggccagtctgaaagccgcgggagccggcgtgaacctcacagctgcctcgacggtgtacctgttcgacccctggtggaaccctggggtagaggagcaggccatggacagggtgcaccggatcggacagaagaaagaagtgaaggtgataaggctcatcgtgaagggcagcatcgaggagaggatactggccctgcaggagaggaagaagcggctgatcagcggcgcattcgggaagaagggaggcaagaacgagaaggagatgcgtgtcgaagagctacggatgatgttgggcctaggtaagtaaggaaaaggctggttggtggtgataggaggagtgatgcttgtgttgcttgtgatatagctctggcggtagaagttgtagctagggcgatggagatgagaccatcaaccatgacatcacagttttctcggtgtaggtagtttcagtgtaggcataggtagggctggaagaaaacgaaatccaggcacgcgtgctaaacattagcactagatcagtgctaaatgattgggtcctcacttcctcagctgtgatggtcaattactgaacacggtcaaatctagtagtagctgtgctaaatgaattgcgtttgtagctttcctatttatccaattggacagtcaggactcctgggcttggg

SEQ ID NO: 67318 - DNA, 1411 bp, Zea Mays
ggctggctcactggctccgccggatcttctactccagcctgcccgctcctcctcctcctcctcctcggtatccatccgctcccgccttctcattccaaagctcgccccgcgtcgccgcccctccgcggatcctccctccccttccctcgtgtgctccggcggcattctccttcccgctgccagggtcgaggatttcttgtagatgactcgagcttcgactatcgatttcggacggcggaagcagagcgagctcttcggctcagggccactgcgtccagcaaacatcatcagaaataaattccccacctacaagaatggttcgaatgggattgttatcaaattggccgatggcccagaaatgccatctctcaaggaggccgttgccaaggaggcaacagatctgcttgataggtgtcagcgcccttcagtccgagagctcaccatgaaattcgagaagggctttaacacagctaccttgctgtctaatgaggctaaatggagacatgcggctttattggagcgggacatccttctaaaggatcttaaaagtgtgttggaatcgctgagaggtcgagtagggggcaaaaataaagatgaaatcgtggagtctctatctatggtggatattttagccattgagctatccaaaagagaagatgagttgctccggcaaaaaacagaggtcacaaaaattgcagacacgctgaaactggcttctacagatgccaagagaattattgacgaagaaagagccaatgctcggttggagatagaaagtgctaaagcttctgtacaaaaaattcaatcagcacttaaagagcaggaacttttttctcaaagaactgggaagcaggatgtcgatgaactgaaggaagaagttcaagaagcacgaagagtgaaaatgctgcattgcccaagcaaggcaatggacattgagaacgagatccaagttctgcgtgatcaactggctgaaaaatcttcagattctcttcgccttttgaaagagttggagctgcatcgaagttacggggaaaatgacatgcccttgtatgaattaaagggtctagaaaccttaggctcaacgttgcacatactgtagttcgattgtcgcatctgatcactgagagtagctgagctcagtttagcgttgtacgtacgtagtgccaactgccaagtgttggctccgattcattttttttaagtttaggactcgttgcgtgtactcgccggttgtgtagtgtagtagttatgtatacttgtgttcctgatgaagagctgaactacgagtgcctagatgtcatgatgcatccatgatggcatatcgggtacctgtccggtatgtcgggtatagcagcttggtcagcggacgcacaacaaaattctaggtgaggttgacaacataagagacatt

SEQ ID NO: 67319 - DNA, 1347 bp, Zea Mays
ctcctcctcctcggtatccatccgctcccgccttctcattccaaagctcgccccgcgtcgccgcccctccgcggatcctccctccccttccctcgtgtgctccggcggcattctccttcccgctgccagggtcgaggatttcttgtagatgactcgagcttcgactatcgatttcggacggcggaagcagagcgagctcttcggctcagggccactgcgtccagcaaacatcatcagaaataaattccccacctacaagaatggttcgaatgggattgttatcaaattggccgatggcccagaaatgccatctctcaaggaggccgttgccaaggaggcaacagatctgcttgataggtgtcagcgcccttcagtccgagagctcaccatgaaattcgagaagggctttaacacagctaccttgctgtctaatgaggctaaatggagacatgcggctttattggagcgggacatccttctaaaggatcttaaaagtgtgttggaatcgctgagaggtcgagtagggggcaaaaataaagatgaaatcgtggagtctctatctatggtggatattttagccattgagctatccaaaagagaagatgagttgctccggcaaaaaacagaggtcacaaaaattgcagacacgctgaaactgatgccaagagaattattgacgaagaaagagccaatgctcggttggagatagaaagtgctaaagcttctgtacaaaaaattcaatcagcacttaaagagcaggaacttttttctcaaagaactgggaagcaggatgtcgatgaactgaaggaagaagttcaagaagcacgaagagtgaaaatgctgcattgcccaagcaaggcaatggacattgagaacgagatccaagttctgcgtgatcaactggctgaaaaatcttcagattctcttcgccttttgaaagagttggagctgcatcgaagttacggggaaaatgacatgcccttgtatgaattaaagggtctagaaaccttaggctcaacgttgcacatactgtagttcgattgtcgcatctgatcactgagagtagctgagctcagtttagcgttgtacgtacgtagtgccaactgccaagtgttggctccgattcattttttttaagtttaggactcgttgcgtgtactcgccggttgtgtagtgtagtagttatgtatacttgtgttcctgatgaagagctgaactacgagtgcctagatgtcatgatgcatccatgatggcatatcgggtacctgtccggtatgtcgggtatagcagcttggtcagcggacgcacaacaaaattctaggtgaggttgacaacataagagacatt

SEQ ID NO: 67320 - DNA, 1353 bp, Zea Mays
ctcctcctcctcggtatccatccgctcccgccttctcattccaaagctcgccccgcgtcgccgcccctccgcggatcctccctccccttccctcgtgtgctccggcggcattctccttcccgctgggtcgaggatttcttgtagatgactcgagcttcgactatcgatttcggacggcggaagcagagcgagctcttcggctcagggccactgcgtccagcaaacatcatcagaaataaattccccacctacaagaatggttcgaatgggattgttatcaaattggccgatggcccagaaatgccatctctcaaggaggccgttgccaaggaggcaacagatctgcttgataggtgtcagcgcccttcagtccgagagctcaccatgaaattcgagaagggctttaacacagctaccttgctgtctaatgaggctaaatggagacatgcggctttattggagcgggacatccttctaaaggatcttaaaagtgtgttggaatcgctgagaggtcgagtagggggcaaaaataaagatgaaatcgtggagtctctatctatggtggatattttagccattgagctatccaaaagagaagatgagttgctccggcaaaaaacagaggtcacaaaaattgcagacacgctgaaactggcttctacagatgccaagagaattattgacgaagaaagagccaatgctcggttggagatagaaagtgctaaagcttctgtacaaaaaattcaatcagcacttaaagagcaggaacttttttctcaaagaactgggaagcaggatgtcgatgaactgaaggaagaagttcaagaagcacgaagagtgaaaatgctgcattgcccaagcaaggcaatggacattgagaacgagatccaagttctgcgtgatcaactggctgaaaaatcttcagattctcttcgccttttgaaagagttggagctgcatcgaagttacggggaaaatgacatgcccttgtatgaattaaagggtctagaaaccttaggctcaacgttgcacatactgtagttcgattgtcgcatctgatcactgagagtagctgagctcagtttagcgttgtacgtacgtagtgccaactgccaagtgttggctccgattcattttttttaagtttaggactcgttgcgtgtactcgccggttgtgtagtgtagtagttatgtatacttgtgttcctgatgaagagctgaactacgagtgcctagatgtcatgatgcatccatgatggcatatcgggtacctgtccggtatgtcgggtatagcagcttggtcagcggacgcacaacaaaattctaggtgaggttgacaacataagagacatt

SEQ ID NO: 67321 - DNA, 1981 bp, Zea Mays
catggcctttttgcctcccctaagaactgcattgttctttttttaaattttttttacacttcgttcgggaattccaacgcgtgcctgttcgctgctccagggtcgaggatttcttgtagatgactcgagcttcgactatcgatttcggacggcggaagcagagcgagctcttcggctcagggccactgcgtccagcaaacatcatcagaaataaattccccacctacaagaatggttcgaatgggattgttatcaaattggccgatggcccagaaatgccatctctcaaggaggccgttgccaaggaggcaacagatctgcttgataggtgtcagcgcccttcagtccgagagctcaccatgaaattcgagaagggctttaacacagctaccttgctgtctaatgaggctaaatggagacatgcggctttattggagcgggacatccttctaaaggatcttaaaagtgtgttggaatcgctgagaggtcgagtagggggcaaaaataaagatgaaatcgtggagtctctatctatggtggatattttagccattgagctatccaaaagagaagatgagttgctccggcaaaaaacagaggtcacaaaaattgcagacacgctgaaactggcttctacagatgccaagagaattattgacgaagaaagagccaatgctcggttggagatagaaagtgctaaagcttctgtacaaaaaattcaatcagcacttaaagagcaggaacttttttctcaaagaactgggaagcaggatgtcgatgaactgaaggaagaagttcaagaagcacgaagagtgaaaatgctgcattgcccaagcaaggcaatggacattgagaacgagatccaagttctgcgtgatcaactggctgaaaaatcttcagattctcttcgccttttgaaagagttggagctgcatcgaagttacggggaaaatgacatgcccttgtatgaattaaagggtctagaaaccttaggctcaacgttgcgcatagttgttcacgagtgtgcctctgtagatttctcgaacagttcaatccagtggtttcgcatacagcctgaaggaagcaagaaagaaattatttcaggcgccacaaaaccagtatatgctccagaaccacatgatgtggggcggtacatccaagctgaagtcaaatctggtggccaaatctcagtcgcaaaaactgccggttcaatagatcctgctgcaggattggttgaatatgtagaaactctcgtgaggaatcctgaaactgattataatgtagtcattattcaagtaaatggagttgctcaggctgcagactccgttcacgttctttgcatcgggagattgcggatgagacttgctaaagaaaagacggtcgttgcgaaggagttctattcctcgtcaatgcagttgtgtggcgttagaggaggtggagacgccgctccccaatcgatcttctggcaacccagaaagggcctcagctttgtgctggcatttgagacaaccagagaacgcaactcggcgctcatgctcgcccggaggttcgccatcgactgcaatatcatccttggtggtccgggggacaaaacgtcatggtgaagtgaaacaaccagcgcactctggaacctgaagcctgaccgattcttgaattgcacatactgtagttcgattgtcgcatctgatcactgagagtagctgagctcagtttagcgttgtacgtacgtagtgccaactgccaagtgttggctccgattcattttttttaagtttaggactcgttgcgtgtactcgccggttgtgtagtgtagtagttatgtatacttgtgttcctgatgaagagctgaactacgagtgcctagatgtcatgatgcatccatgatggcatatcgggtacctgtccggtatgtcgggtatagcagcttggtcagcggacgcacaacaaaattctaggtgaggttgacaacataagagacatt

SEQ ID NO: 67322 - DNA, 1078 bp, Zea Mays
gatctaggcccgacccgacccgatccggatccggactatggtctgtctatattgaataatcactcttctccgttcacaccctgtgcgcgcgggctctcttcgtcgtgcggcaactgcgcgaccgccgacgcccgacggcaggtgcaccaggtcttcgtcgaccccttcgcaaggcctcggttccatccttcgccggaggcgaccgcccgtcaacaggacttgatctactactcactagcggtgtagagatggtcgtgtcttccaggtcgagtatgccaccaaggccgtcgacaacagcgggactattgttgggatcaagtgcaaagatggcattgtcctgggtgtcgagaagctggtaacctcaaagatgatgctggaaggatcaaaccgaaggatccattcggtgcaccgtcactctggcttggctgttgctggtttagcagcagatggcaggcaaattgtttcaaggaccaaatcagaagctgccagttatgaaaagaccagggtctatggagaacccatttctgtgaaggaattggctgatcgtgtggcaagttatgttcatctttgcacgctgtactggtggctcaggccttttggttgtggtgttattcttggaggttatgatagggatgggccacagctctacatgatagaaccctcaggagtttcctacaaatacttcggtgctgcattggggaagggaagacaggctgcaaagactgagatagaaaagttgaaactttcggagcttacctgccgggaaggcattgttgaagttgcaaagataatttatggagtgcatgacgaagcgaaggacaaagcttttgagttggagttgagctggatctgtgatgaatcgaaccgccagcatcagaaggttccaaatgaactgttggagcaggccaaagctgctgctcaggcagctcttgaggagatggatgctgactaagaaacaggacgatttgcccagacttggtgtttttgataaagagctgtttcttgatttgatgcaagtaggcttggtactcttcatgtttgtggcatatggttagcaggcatgaatgtgacatcaaac

SEQ ID NO: 67323 - DNA, 1015 bp, Zea Mays
cccacatgggccgccaaaggcctaagcctgggcatgcgcctgggctggccgcactgtgcccctgccacactccgtccctcttccctggacttgatctactactcactagcggtgtagaggtgaagataagaacttgaccatgagcagcataggcacaggttatgatttgtctgtcacgaccttctccccagatggtcgtgtcttccaggtcgagtatgccaccaaggccgtcgacaacagcgggactattgttgggatcaagtgcaaagatggcattgtcctgggtgtcgagaagctggtaacctcaaagatgatgctggaaggatcaaaccgaaggatccattcggtgcaccgtcactctggcttggctgttgctggtttagcagcagatggcaggcaaattgtttcaaggaccaaatcagaagctgccagttatgaaaaggtctatggagaacccatttctgtgaaggaattggctgatcgtgtggcaagttatgttcatctttgcacgctgtactggtggctcaggccttttggttgtggtgttattcttggaggttatgatagggatgggccacagctctacatgatagaaccctcaggagtttcctacaaatacttcggtgctgcattggggaagggaagacaggctgcaaagactgagatagaaaagttgaaactttcggagcttacctgccgggaaggcattgttgaagttgcaaagataatttatggagtgcatgacgaagcgaaggacaaagcttttgagttggagttgagctggatctgtgatgaatcgaaccgccagcatcagaaggttccaaatgaactgttggagcaggccaaagctgctgctcaggcagctcttgaggagatggatgctgactaagaaacaggacgatttgcccagacttggtgtttttgataaagagctgtttcttgatttgatgcaagtaggcttggtactcttcatgtttgtggcatatggttagcaggcatgaatgtgacatcaaac

SEQ ID NO: 67324 - DNA, 1482 bp, Zea Mays
aatagcccaatgcgctgaatagcgcagcatcctttcccttctcccccaccctcggcctcgcttccagccatccgccgcggctcgtctccgtctcccggctcctcggcgtctagctcgtcaacgcgcgcgtccgccgtcggctcctccgaccggcgtcccaccacaggggaatacagatcgacgatccgctgggcttgcaaacatgtatatccgagtgaagcgcaacaagagtacctacttcattcaatgtgaaccaacagagacagctttgagcatcaaacagaagttgcactcgctgatagatcaacctcctagtagtcagcagttggtcttgtggcctagcagtgatgtgcttgaagactcaaagactttggcagatcaaaaggtggataacgattccattgttgcattggcactaagaaaaggtatcgtgctcacttgctgaattgttaatgggtttttgcctactttttattttccttatctttcaggtagtgccttttgcattattaatgtttcttttcttttttgcttactcttagtataccactcgatggttatgattattgcccagcaactgtttacatttgtagaaaataccttatattatgtcttaggtcatcattcactagtcagcagcttgatctgtcttctggactgcgggtttgacctaccaaaccatattattgctgatgccattctttctctagcagaaatttacacattttccctcatttctatgttaataataagctaagaagaatctatgattgcaaagtggtttatcatagcataacagcaggttgtccctattctaaataaagtgaatgcatgatgctagtccttttctaaaaactcaacctactcaatgcagcttcttgctttccttgttccgccgtgggttaccctttctatagctatttcattttcggtctgatagttcctgactgtaatttctgttccttcaccagatgacggtgagtttgaggaagttttcatcgctaggccggaggatttcatgtcatcatcatgataaagattagtccatcatttctacaaagggaccactgcgcgttcttggagtggaccgtcgctctatgctggttcttctagaatctgggatgtggcttgcttgtccctttgggaggaaaaagaaaatcttttatctgttgtatgcgaatccatctgtgccttcatcacctaatgcactcgctgttgctgctggcattcctggttggccccattgctcgattcaactgcgctgtcggtcacataatgggcaacgcgtttggttggcgccacaagattacgacgacagttttgggcttgtggtttctctttctcagggcaaaattttagtgaatgtttggacagatttcgtctgctcttacattaatggttctttttttttttttttgcctttgtaagtcagtttcataatttggcagaattgttgcctactttggtccaccctttccgttc

SEQ ID NO: 67325 - DNA, 936 bp, Zea Mays
aatagcccaatgcgctgaatagcgcagcatcctttcccttctcccccaccctcggcctcgcttccagccatccgccgcggctcgtctccgtctcccggctcctcggcgtctagctcgtcaacgcgcgcgtccgccgtcggctcctccgaccggcgtcccaccacaggggaatacagatcgacgatccgctgggcttgcaaacatgtatatccgagtgaagcgcaacaagagtacctacttcattcaatgtgaaccaacagagacagctttgagcatcaaacagaagttgcactcgctgatagatcaacctcctagtagtcagcagttggtcttgtggcctagcagtgatgtgcttgaagactcaaagactttggcagatcaaaaggtggataacgattccattgttgcattggcactaagaaaagatgacggtgagtttgaggaagttttcatcgctaggccggaggatttcatgtcatcatcatgataaagattagtccatcatttctacaaagggaccactgcgcgttcttggagtggaccgtcgctctatgctggttcttctagaatctgggatgtggcttgcttgtccctttgggaggaaaaagaaaatcttttatctgttgtatgcgaatccatctgtgccttcatcacctaatgcactcgctgttgctgctggcattcctggttggccccattgctcgattcaactgcgctgtcggtcacataatgggcaacgcgtttggttggcgccacaagattacgacgacagttttgggcttgtggtttctctttctcagggcaaaattttagtgaatgtttggacagatttcgtctgctcttacattaatggttctttttttttttttttgcctttgtaagtcagtttcataatttggcagaattgttgcctactttggtccaccctttccgttc

SEQ ID NO: 67326 - DNA, 1924 bp, Zea Mays
ggggtttctggggaccggcttgcttctagagctgaatctcactcacctcgagatgcactgtgacgcgctggcccatggtgagcttctgatgccaattaggactaaacatgcttcctcgctgcgctcaagtgggagaacaagaaatcagcctagacactagtcatctgctgcaagcagaaaatgcacccttattcacttaagagttccaagggagcaccaattctgccacggccagtcttcgttttcttcatcgcgacatttggtttctatgtatgctatctctccttcaatcagataacgctagagaacaacagagaggggaatagtcgagaagaacaaagggacgatatttgcagaaagccttatgtgccgtatgaggagctcagttatgtgcactttccaaaacctacaagttatagcaggggggagtgctcgtgtactcctgttcggttctttgtaatcgtgtctatgcaaagatcgggaagtggatggtttgagaccttgatgaatagtcaccctaacattagttccaatggcgaaatctttaacagaatggatagaagagaaaatatatcgtctatcttacaaacgcttgatacgctgtataatttggactggctcaccagcgccgctaagaatgagtgcacagctgcatttggactgaagtggatgcttaatcagggaattttggaaaaccctgaagatatagttagttatttgaacaagaagggtgtctccgtgatatttctgttcaggaggaacacattgcgcaggcttgtatctgtgctggccaacgactatgacaaagatgcaaagcagttgaatggaactcacaagtctcatgttcactcaaaagaagaggctgagatattagcaaaattcaaaccacatctggatacgtcgactctaattacaaacatcagaaacatcgagaaggccatcagagattgcttggaccacttcaagagtacgcggcacatgatcctctattatgaggatataatcagcaacagcaatgcattatcccgggtgcaagagttcctcagggtcccggtgaggaggctgatgagccggcaggtgaaaattcacacgaggcctcttccggaccttgtcaagaactgggaggaagttagcagcaaactgaacgggacagagtttgctcacttccttgatggttcagattatgccaagtgatggacggcaggttattcgcatttggagttgtagttgcaaacatgctttagaattcttttgtacagatgagtttgtaaagagcaaggcatgaagacaacagatgacgatcacaagtgcagatggaatcgtagaaaatattcctagttttctccttttttttgtattgttattacgactgccaataagattgcggccaagaatagctggcttctgactatcagatcagacaattctggaccaaagataataacgtttcggcatcatattagcagcgggtatacccccgaacaacttacgtaaatgctttgcacaggagtaaaattccactcgaaaaaatgtttacaagtacaacatcgctaaagatcgtacggatgtcatggtgcacacatgggctctcatcttagcagaggcagactattggcgtcgtctctttatcctctcgagggcgcccagctgctcattcccttgggcacctgagctttcctcattgttctcggcagctctcttgccgagctcaccaaataccgcagcaggaacgctcttctccgcaatttggacatcgggttcctcatcgtcactctcatcgggcagctcaatgtcctcattgttagcagcctgttgcctgctgctctcgacctgggcctctactccagcactgacaaagttcatcatcctgttagcagaggctggggcagtgcttggtgctgctggtggggcagtagatggtccg

SEQ ID NO: 67327 - DNA, 2651 bp, Zea Mays
  misc_feature (1)..(2): n is a, c, g, or t
nntcttgaaacttggagacttcgtacacccaatgaatgggatcatatgactgtttggtatgatctgctccaatggaggaatgagatgtacaattcagtaatagatgcattcaaggactttggtcaaacaaatcctcaacttcatcatcttggctaccgagacaaggcttggaatgtgaataagctcgctcacatagctcgcaagcaaggtcttcctgaagtttgtgtaactatacttgataagatgtatggtcatgctactatggaagttcaggaagcatttgtgaagatatgtgaacaagctaaggcttacttagaaatgaaaggagaactagtcagtggtcttaacttaatcaataataccaatttagaatttttccctgtgaagaacaaagcagaaatatttcgtctgagaggtgattttctgttaaaaatgaacgaatgcgagactgcaaatcagtcttattcaaatgccataactctttttaagcatttgcccaaaggatggattagctggggaaattactgtgatatggtttttaaagaaacaaaagatgaggtttggcttgagtatgcagtcagttgttttttccagggcatcaaatatggagtttcaaactcaaggagccatctagctcgaattctctaccttcttagctttgatggacaaaatgaacctgttggaagagctttggataaatatcttgagcagctgcctcactgggtttggctttcatggatacctcagttgttgttgtcgttacagagaagtgaagcccaacactgtaaattggttttgatgaagatagctcaagtttacccgcaggcattgtattattggcttcgtacatacttgatggaacgccgtgatgttgctactaaaactgaaataggaagaaacatgttggctcagcagcgcatgcagcaagctatgatggcaaacaatgcggccaataacttacctgacggaagtgcaagggcatctaatcatgcaggtagtaacatgacttctgacaaccagtctcatcaagcctcccaatcagttggtgctgcaggttctcatgatggtggtaatgtccaaggacaagatccggaacgatctacccctgaaggtggcacaaataccagccatgatcaaggtcaacagagttctacaggtgctgagggctcacaagttccgcttagacgtaatagcggacatgggtgggtaacttctgcagcaagtgcatttgatgctgcaaaagacataatggaagctcttagaagcaaacatactaatctagccaatgagcttgagcttttactgtcagaaattggatcacggtttgttactctgcctgaggaaagacttctagctgtggttaatgctctgcttcatcgctgctacaaatatccaactgcaaccactggcgaggttccacagtctctcaagaaggaactctctggtgtatgtagagcttgcttctcacaagatgctgttaacaagcatgttgattttgtgaaggagtacaagcaagattttgaacgtgatcttgacccagagagcgctactacttttcctgcaacccttgctgaacttacggagagattgaaacactggaagaacattcttcagagtaatgtagaggatcggttcccagcagtattaaaactggaggaagaaagtaaaacacttcgggattttcatgttgttgatattgaactcccagggcagtacttcacagatcaggaaatcgcaccggaccacactgttaagttggacagagttggacctgacattccaattgtccggaggcatggcagtagctttcgacggttgacactcattggttctgatggttcacagcgccattttattgttcagacatcactgactccgaatgctcggagtgatgaaaggatgctgcagctattccgtgtgctaaataaaatgtttgacaaacacaaagaatctaggcggcggcatctggctatccatactccaataattattcctgtttggtctcagcttaatcaagccgtttcagggcagctctctcctgaagcaattgtggagctacgtctgcaagcatacaatgagattacaaaaaatattgttaatgataatattttctcccaatatatgcacaagattctgccaactggcaactacctgtggaccttcaagaaacaatttgcaatccaagtggctctctcctgcttcatgtcgtatatgctgcagattggcggcagggctcctaacaaaattctatttgctaaaaatactgggaagatcttccagactgacttccatccaggctgacacgcaacttgcaagctttcttctcgaattttggtgttgaaggtctcattgtgtctgccatgtgctctgctgcccagtcagtggtttctcctaaacaaagccagcacatttggcatcatttggctatgtttttccgagatgaactgttatcttggtcgtggaggcggcctctgggcattccatcagtccctgtcgctgctggaatgatcaacccatcagatttccaacagaaggtggtaaacaatgtggagcatgtcatcagtcgtatcaagtcaatatcgccacattgtctggctgaggaggaagtgtttcttggtgggattaatattgtatcattatggtgcttctga

SEQ ID NO: 67328 - DNA, 2751 bp, Zea Mays
cttgaaacttggagacttcgtacacccaatgaatgggatcatatgactgtttggtatgatctgctccaatggaggaatgagatgtacaattcagtaatagatgcattcaaggactttggtcaaacaaatcctcaacttcatcatcttggctaccgagacaaggcttggaatgtgaataagctcgctcacatagctcgcaagcaaggtcttcctgaagtttgtgtaactatacttgataagatgtatggtcatgctactatggaagttcaggaagcatttgtgaagatatgtgaacaagctaaggcttacttagaaatgaaaggagaactagtcagtggtcttaacttaatcaataataccaatttagaatttttccctgtgaagaacaaagcagaaatatttcgtctgagaggtgattttctgttaaaaatgaacgaatgcgagactgcaaatcagtcttattcaaatgccataactctttttaagcatttgcccaaaggatggattagctggggaaattactgtgatatggtttttaaagaaacaaaagatgaggtttggcttgagtatgcagtcagttgttttttccagggcatcaaatatggagtttcaaactcaaggagccatctagctcgaattctctaccttcttagctttgatggacaaaatgaacctgttggaagagctttggataaatatcttgagcagctgcctcactgggtttggctttcatggatacctcagttgttgttgtcgttacagagaagtgaagcccaacactgtaaattggttttgatgaagatagctcaagtttacccgcaggcattgtattattggcttcgtacatacttgatggaacgccgtgatgttgctactaaaactgaaataggaagaaacatgttggctcagcagcgcatgcagcaagctatgatggcaaacaatgcggccaataacttacctgacggaagtgcaagggcatctaatcatgcaggttctcatgatggtggtaatgtccaaggacaagatccggaacgatctacccctgaaggtggcacaaataccagccatgatcaaggtcaacagagttctacaggtgctgagggctcacaagttccgcttagacgtaatagcggacatgggtgggtaacttctgcagcaagtgcatttgatgctgcaaaagacataatggaagctcttagaagcaaacatactaatctagccaatgagcttgagcttttactgtcagaaattggatcacggtttgttactctgcctgaggaaagacttctagctgtggttaatgctctgcttcatcgctgctacaaatatccaactgcaaccactggcgaggttccacagtctctcaagaaggaactctctggtgtatgtagagcttgcttctcacaagatgctgttaacaagcatgttgattttgtgaaggagtacaagcaagattttgaacgtgatcttgacccagagagcgctactacttttcctgcaacccttgctgaacttacggagagattgaaacactggaagaacattcttcagagtaatgtagaggatcggttcccagcagtattaaaactggaggaagaaagtaaaacacttcgggattttcatgttgttgatattgaactcccagggcagtacttcacagatcaggaaatcgcaccggaccacactgttaagttggacagagttggacctgacattccaattgtccggaggcatggcagtagctttcgacggttgacactcattggttctgatggttcacagcgccattttattgttcagacatcactgactccgaatgctcggagtgatgaaaggatgctgcagctattccgtgtgctaaataaaatgtttgacaaacacaaagaatctaggcggcggcatctggctatccatactccaataattattcctgtttggtctcaggttcggatggttgaggatgatttaatgtatagcacttttcttgaggtgtatgaaattaattgtgcacggcataatagagaagctgactcgcctattacaattttcaaagagcagcttaatcaagccgtttcagggcagctctctcctgaagcaattgtggagctacgtctgcaagcatacaatgagattacaaaaaatattgttaatgataatattttctcccaatatatgcacaagattctgccaactggcaactacctgtggaccttcaagaaacaatttgcaatccaagtggctctctcctgcttcatgtcgtatatgctgcagattggcggcagggctcctaacaaaattctatttgctaaaaatactgggaagatcttccagactgacttccatccagcttatgatccaaatgggatgattgagttcaacgagcttgttccatttaggctgacacgcaacttgcaagctttcttctcgaattttggtgttgaaggtctcattgtgtctgccatgtgctctgctgcccagtcagtggtttctcctaaacaaagccagcacatttggcatcatttggctatgtttttccgagatgaactgttatcttggtcgtggaggcggcctctgggcattccatcagtccctgtcgctgctggaatgatcaacccatcagatttccaacagaaggtggtaaacaatgtggagcatgtcatcagtcgtatcaagtcaatatcgccacattgtctggctgaggaggaagtgtttcttggtgggattaatattgtatcattatggtgcttctga

SEQ ID NO: 67329 - DNA, 2662 bp, Zea Mays
cttgaaacttggagacttcgtacacccaatgaatgggatcatatgactgtttggtatgatctgctccaatggaggaatgagatgtacaattcagtaatagatgcattcaaggactttggtcaaacaaatcctcaacttcatcatcttggctaccgagacaaggcttggaatgtgaataagctcgctcacatagctcgcaagcaaggtcttcctgaagtttgtgtaactatacttgataagatgtatggtcatgctactatggaagttcaggaagcatttgtgaagatatgtgaacaagctaaggcttacttagaaatgaaaggagaactagtcagtggtcttaacttaatcaataataccaatttagaatttttccctgtgaagaacaaagcagaaatatttcgtctgagaggtgattttctgttaaaaatgaacgaatgcgagactgcaaatcagtcttattcaaatgccataactctttttaagcatttgcccaaaggatggattagctggggaaattactgtgatatggtttttaaagaaacaaaagatgaggtttggcttgagtatgcagtcagttgttttttccagggcatcaaatatggagtttcaaactcaaggagccatctagctcgaattctctaccttcttagctttgatggacaaaatgaacctgttggaagagctttggataaatatcttgagcagctgcctcactgggtttggctttcatggatacctcagttgttgttgtcgttacagagaagtgaagcccaacactgtaaattggttttgatgaagatagctcaagtttacccgcaggcattgtattattggcttcgtacatacttgatggaacgccgtgatgttgctactaaaactgaaataggaagaaacatgttggctcagcagcgcatgcagcaagctatgatggcaaacaatgcggccaataacttacctgacggaagtgcaagggcatctaatcatgcaggtagtaacatgacttctgacaaccagtctcatcaagcctcccaatcagttggtgctgcaggttctcatgatggtggtaatgtccaaggacaagatccggaacgatctacccctgaaggtggcacaaataccagccatgatcaaggtcaacagagttctacaggtgctgagggctcacaagttccgcttagacgtaatagcggacatgggtgggtaacttctgcagcaagtgcatttgatgctgcaaaagacataatggaagctcttagaagcaaacatactaatctagccaatgagcttgagcttttactgtcagaaattggatcacggtttgttactctgcctgaggaaagacttctagctgtggttaatgctctgcttcatcgctgctacaaatatccaactgcaaccactggcgaggttccacagtctctcaagaaggaactctctggtgtatgtagagcttgcttctcacaagatgctgttaacaagcatgttgattttgtgaaggagtacaagcaagattttgaacgtgatcttgacccagagagcgctactacttttcctgcaacccttgctgaacttacggagagattgaaacactggaagaacattcttcagagtaatgtagaggatcggttcccagcagtattaaaactggaggaagaaagtaaaacacttcgggattttcatgttgttgatattgaactcccagggcagtacttcacagatcaggaaatcgcaccggaccacactgttaagttggacagagttggacctgacattccaattgtccggaggcatggcagtagctttcgacggttgacactcattggttctgatggttcacagcgccattttattgttcagacatcactgactccgaatgctcggagtgatgaaaggatgctgcagctattccgtgtgctaaataaaatgtttgacaaacacaaagaatctaggcggcggcatctggctatccatactccaataattattcctgtttggtctcaggttcggatggttgaggatgatttaatgtatagcacttttcttgaggtgtatgaaattaattgtgcacggcataatagagaagctgactcgcctattacaattttcaaagagcagcttaatcaagccgtttcagggcagctctctcctgaagcaattgtggagctacgtctgcaagcatacaatgagattacaaaaaatattgttaatgataatattttctcccaatatatgcacaagattctgccaactggcaactacctgtggaccttcaagaaacaatttgcaatccaagtggctctctcctgcttcatgtcgtatatgctgcagattggcggcagggctcctaacaaaattctatttgctaaaaatactgggaagatcttccagactgacttccatccagcaaagccagcacatttggcatcatttggctatgtttttccgagatgaactgttatcttggtcgtggaggcggcctctgggcattccatcagtccctgtcgctgctggaatgatcaacccatcagatttccaacagaaggtggtaaacaatgtggagcatgtcatcagtcgtatcaagtcaatatcgccacattgtctggctgaggaggaagtgtttcttggtgggattaatattgtatcattatggtgcttctga

SEQ ID NO: 67330 - DNA, 2761 bp, Zea Mays
tgaaacttggagacttcgtacacccaatgaatgggatcatatgactgtttggtatgatctgctccaatggaggaatgagatgtacaattcagtaatagatgcattcaaggactttggtcaaacaaatcctcaacttcatcatcttggctaccgagacaaggcttggaatgtgaataagctcgctcacatagctcgcaagcaaggtcttcctgaagtttgtgtaactatacttgataagatgtatggtcatgctactatggaagttcaggaagcatttgtgaagatatgtgaacaagctaaggcttacttagaaatgaaaggagaactagtcagtggtcttaacttaatcaataataccaatttagaatttttccctgtgaagaacaaagcagaaatatttcgtctgagaggtgattttctgttaaaaatgaacgaatgcgagactgcaaatcagtcttattcaaatgccataactctttttaagcatttgcccaaaggatggattagctggggaaattactgtgatatggtttttaaagaaacaaaagatgaggtttggcttgagtatgcagtcagttgttttttccagggcatcaaatatggagtttcaaactcaaggagccatctagctcgaattctctaccttcttagctttgatggacaaaatgaacctgttggaagagctttggataaatatcttgagcagctgcctcactgggtttggctttcatggatacctcagttgttgttgtcgttacagagaagtgaagcccaacactgtaaattggttttgatgaagatagctcaagtttacccgcaggcattgtattattggcttcgtacatacttgatggaacgccgtgatgttgctactaaaactgaaataggaagaaacatgttggctcagcagcgcatgcagcaagctatgatggcaaacaatgcggccaataacttacctgacggaagtgcaagggcatctaatcatgcagttggtgctgcaggttctcatgatggtggtaatgtccaaggacaagatccggaacgatctacccctgaaggtggcacaaataccagccatgatcaaggtcaacagagttctacaggtgctgagggctcacaagttccgcttagacgtaatagcggacatgggtgggtaacttctgcagcaagtgcatttgatgctgcaaaagacataatggaagctcttagaagcaaacatactaatctagccaatgagcttgagcttttactgtcagaaattggatcacggtttgttactctgcctgaggaaagacttctagctgtggttaatgctctgcttcatcgctgctacaaatatccaactgcaaccactggcgaggttccacagtctctcaagaaggaactctctggtgtatgtagagcttgcttctcacaagatgctgttaacaagcatgttgattttgtgaaggagtacaagcaagattttgaacgtgatcttgacccagagagcgctactacttttcctgcaacccttgctgaacttacggagagattgaaacactggaagaacattcttcagagtaatgtagaggatcggttcccagcagtattaaaactggaggaagaaagtaaaacacttcgggattttcatgttgttgatattgaactcccagggcagtacttcacagatcaggaaatcgcaccggaccacactgttaagttggacagagttggacctgacattccaattgtccggaggcatggcagtagctttcgacggttgacactcattggttctgatggttcacagcgccattttattgttcagacatcactgactccgaatgctcggagtgatgaaaggatgctgcagctattccgtgtgctaaataaaatgtttgacaaacacaaagaatctaggcggcggcatctggctatccatactccaataattattcctgtttggtctcaggttcggatggttgaggatgatttaatgtatagcacttttcttgaggtgtatgaaattaattgtgcacggcataatagagaagctgactcgcctattacaattttcaaagagcagcttaatcaagccgtttcagggcagctctctcctgaagcaattgtggagctacgtctgcaagcatacaatgagattacaaaaaatattgttaatgataatattttctcccaatatatgcacaagattctgccaactggcaactacctgtggaccttcaagaaacaatttgcaatccaagtggctctctcctgcttcatgtcgtatatgctgcagattggcggcagggctcctaacaaaattctatttgctaaaaatactgggaagatcttccagactgacttccatccagcttatgatccaaatgggatgattgagttcaacgagcttgttccatttaggctgacacgcaacttgcaagctttcttctcgaattttggtgttgaaggtctcattgtgtctgccatgtgctctgctgcccagtcagtggtttctcctaaacaaagccagcacatttggcatcatttggctatgtttttccgagatgaactgttatcttggtcgtggaggcggcctctgggcattccatcagtccctgtcgctgctggaatgatcaacccatcagatttccaacagaaggtggtaaacaatgtggagcatgtcatcagtcgtatcaagtcaatatcgccacattgtctggctgaggaggaagtgtttcttggtgggattaatattgtatcattatggtgcttctga

SEQ ID NO: 67331 - DNA, 1148 bp, Zea Mays
cacccagtcacccactccatcctgcccgccgccgtagctggtagctaagctacgtgaagaagatggttgggctcctccgtccactctccgccgccgccaccttactcctcgcccccgccacgccactcactggttcctcagtctccgctagttccgtcggcggcaggcggtggagaagcgtgagggcggacgccggcgggggctggctatccgggctgctgggcggcaagggcggcggcgcgtccacggcgatgatggtgacgccgggaaccgtgaaggccggcgaccccgtcctgcacgagcccgcgcaggaggtggcgccgggggacgtgctgtccgagaaggtgcagggcgtcatcgaccggatggtcgacgtcatgcgcagggccccaggcgtcggcctcgccgccccgcagatcggcgtcccgctcaggattattgttctcgaggatacgcaggagtacatcagctatgcacccaagaaggacatcgaagcacaagaccgccgcccctttgatcttctcgtcggtcattatcaatccaaagattaagagcacgagtaaaagaaccgcgctgttctttgagggatgtctcagtgttgatggatacagggcggtcgtggagcggcatctggacgttgaagtttcaggtctggaccggaatgggagcaccatgaaggtacgggcttcaggatggcaagcgcgcatcctccagcatgaatgtgatcatcttgaaggcacgctgtatgttgacaagatggtagcaaggacattcagggtcgtcgagaacttggatttgccccttcccactggatgccctcaactagggttcagtccacaagtacactagtgtgagcaattgtagccatggaggttgagagcctttggagcgatagaccacacgtggcagagaagcttgagcaaagacttgatgccgatagaacaaagcaacagtgaagagcaagtgaagttctgattgatgaaccaataaggacacatgatgacatgaagtggatcatatcattcatgatgttgattgcatgtttctgtaccatcaccattagagaaagagataaaatggaatgcacaaaacatgtataatttgtagaacatttcattttattattcaaaggttgtgtagagaagtaa

SEQ ID NO: 67332 - DNA, 197 bp, Zea Mays
tggggatccaattacttcatccgcttttgtcgatgagctgttaacatcagtcatttggaacatctgagagatttgcttgtatctccacgagtttcgggaaggtccatgtcatcagaattagagtagatgctaagtacaactaggagcaaggtggtgacgtgttaaatctgaggagtaatggtctccctggattaacc

SEQ ID NO: 67333 - DNA, 4783 bp, Zea Mays
cttactgttcataagaaatttggtacctgacatttcttctattaacaggttggtgcactttgcagacccattgtttgaaaatggaagtttgcaatcttcagagcaattgaggatgcggccttccgagaacatgaggtcacaaacttcaaccaaatcaccatcaaacatagccagcaagtttagacatccatcagacttccaagatcaccatcatgtgcagattgttgatcctcgtgctaatgtgtataaattcacgggttcaatgcagaatcaatcatcagatcataacatttcaaaaaggtcaaggtcacctactttgtcctacgaggatgctgatggcacgaaagctcatgttaatactggtggaaattctagaagactggttgactattcggataccatcaatgatgaaaatgttgaagcctcaaaaaggatgcgatcacctgcatcagagttcacacgcatggtcaagtcaccaccatcagataccagaggcaatatcaggtctgatgcatccttttccaagttcagaaatcaaatacaatcacgcattggtggtgcatgttcaccatcacaacagatgtctcatctttcagactccaatgaactaaacacgttagctatttctccaccaaagccttctacccttagcgctaccagaagaacagggatctcttctttggatgctactgctgatgatcatttgaccccttcaactgaacttgagagggaggaacaagcaaaagccaagcgtctggctcgtttccatgttgaattaagcaggccagtagaaaatactaatgattttgtgaaaacagttaaaagctctgcagataagtccaaacaagccacatcagtgggaagaactcctttgagaacaaatgatgacaccgatgacaatactttggttgacatggattccacagctttggctgcaattgttgggctttgccctgatatgtgcccagaacctgagagggcagagcgtgagagaaaaggagatcttgataggtatgaaagattggacggagacagaaacctaactactgagcttctcgctgttaaaaagataaggctccacataattgcgatgcatgaattatgtgaatacaacaaaggagaaggtttttccgagggttttgatgcacacctcaacattgagcagatgaataaaacatcagttgagctatttcaaatgtatgatgaccataggagagaaggtgttctcttctcaacagaaaaggagtttcggggttattatgcactgctcaagttagacaaacatcctggttacaaggttgaacctgctgagttatctctggatcttgctaagatgtctcgtgaaattagaggcagtccagagatcttgtttgcaagagaagttgcaagagcatgcagaatggggaactttatttccttcttccgtcttgcaaggaaagctacatatttgcaggcctgtttgatgcatgctcattttgcaaagctaaggaggcaagcactcgcttccttgcacagtggtcttcagaatggccaaggcatccctatttcgcaggttgtggtgtggcttgctatggagggcgaggatgttgaaaatctattagaataccatggttttgggttgaggcagtatgaagaactgtacttagtcaaagaaggaccttttcttaacagtgaaagtgatttcccatctggctgttcacagcttgtgcattctaaaaaatcgcagagggtcgttgatgatgtttcttctgggccagattgtgctccaactagcaaagaaaagactgtctttccatatactggtcaaccagttgctggcaaaagagatctatttctaccacagaatgctcctgcgattcctcctgatggcagaatggatttggatccatcatttcctgggcctatttcaatcactcctgacagacagattagcccattgttttcagatcctttctctccaagagctgccagtaaactattcagttcaacacatccaaagcctctctccccaactgaaggtagaaaagacaggttttcatctgtccttactgctgtttctccacgtactggcaagagggacatactgtcaaaaacaccaaaagtagcttcaccaaaagctgaagccaagacaaaattggttaatgaccttatagctgaagaccaggatagtggtgttgctgagatccctcagaaggtagagatgcaaacagacatactgtggtcacaagctaacacgcaaaacgccaatgctctggcagaaccaattatttcacatcctcttgcagatagcatgtctttaaattactccagtatgtatggagcggaagatgacttcagggcacatgtttctggcatcggtgcagatatggatgagggaactccaccagatcatgaatgtctggttattggagctggattgcctattagctcccctttgtcctatcatgaggaatatgaggaccatagtattagtaacagcacaaatgatgattggttaccaattgttatgcccgcaaagaaactaatttctgatgaaaacctgaaagcaatattgaggaaatggaggcagcatgctgctgacaagcgattacttagggagcagaagaatgctcttgctgttgcagcattgtgttctctatcactcggcccaccagttcataaaagtacaacggtgtctaagctagcagtcgaagaactagatattggccacgcctttaaagaaagacaagcaagaaagcaaaggtcctggtcacggctaaatgtttcggagttgtctggtcccattctaaatgaaaataaccctgatgctagatgcctctgctggaagttgcttgtacttgttccaccgggtatggaatcccagaccaacagttttgtctcaaaatggttacttagaaagctcatgggttatggaatcggagatattggattggttgtttcttcagcaggcctatcaatttggacagagtggatcagttttccaaatgcatgttgtttgtctgttgttagggccagcgatcaacaagttattgataatgatattgctaacagtacaagctgtatagtatttgtagtgtctgaaagcatttcatgggaaatgcagaaggaacggtttaacagtcttttagcctgcataccagatgaatccaatcttcctcttctgattttcagtggcgatacatataacgaaggatatgagtatgcgtcaaagtacatcatcaacaggcttggcctcaatggtcttaacagaggaaagatcggttcgtctttggttatttttcttgttgaaaactacacagaagaccatgccaatggtttctttgatgatgacaaactgcgtgagggcctgaagtggctggtaagtagtttgccagtgcagcctgatgtcactcttgtgaagacccatgaattgcttctggaatacttgaatccacaacttgagctgcttaacacccatgttgcacctggagctggtcctggcgattgcatttcagtattcaacaatgctgtcaatcaacttgcagaagagattttggctgcagcaaacgcaaactgtagccaatggccagctcccgagattgatcttctggagagaacaagcaatgagaggatatatgcagaaatgttcttgcctagcattggatggtcttcgccatcaaggatccagccactgcttgcagccattaatagctgcaagattccagagttcagttacgatctatcttggctaaaccatggttctcacatgggcaagcagatccaggatcagaagaagttacttgaggagtgcttggcgagatacttgaccgaatcagcccggctcttagatgaaagccaggtggtcaccgaagtgaatgttatggtgcagaattgtgttggccttgaactccaggattcgtcttactatctcgctcccagatgggtggcgatcttccgtcgtatttacaactggaggctagcaaagctctctaccggaaagttgtcagaagcttatgttctgactcagcacctgtatcaggctcctgcagcagctggctcaaatggtaccacacaagggcttactgctaacaccgccagcagtgatgctgtggatcacatcatgatgcctgctgtttcaaccggcatcacactagacgaaatcatcgagatcagttgtgacctcaatgttgttgatgcgcagcccgtaactctgccaccacgactgcctgtgcatgttcatgaagaacctcaggcacttgctgataccaacggcgtgcttggagttgatgaaatgtacataccaagaagagtagagttgggggaggtgatgcccatctcggacgacaagctttcccggctaagagtagagttgggggaggcgatgcccatcaagacggacgacaagctttcacggctactggagcagtgcaccaagctgcaggacaggatcgatgagacactttccatatacttttgagccccgtagtaaggctggaagggttttgttacaccatccttccacatttgttgtaacttgtaaaactagattttgtggaagtgaaaactaacactgccaagttaaagcgttcttgtttggcaggaatgaaatatagaagcgtcatttttcttctcgaatcatgtcattgtcagtaaagtacctaaagcacgatttgggtcagaccagcccggtgcgagcataactgtattgcgtgcacagctattgacgctcccacgctaccgtagtccgctttgtcactccctgcactgcagggcctgacagtaaattttgggaagaacaacaaat

SEQ ID NO: 67334 - DNA, 4743 bp, Zea Mays
aacaggttggtgcactttgcagacccattgtttgaaaatggaagtttgcaatcttcagagcaattgaggatgcggccttccgagaacatgaggtcacaaacttcaaccaaatcaccatcaaacatagccagcaagtttagacatccatcagacttccaagatcaccatcatgtgcagattgttgatcctcgtgctaatgtgtataatagattcacgggttcaatgcagaatcaatcatcagatcataacatttcaaaaaggtcaaggtcacctactttgtcctacgaggatgctgatggcacgaaagctcatgttaatactggtggaaattctagaagactggttgactattcggataccatcaatgatgaaaatgttgaagcctcaaaaaggatgcgatcacctgcatcagagttcacacgcatggtcaagtcaccaccatcagataccagaggcaatatcaggtctgatgcatccttttccaagttcagaaatcaaatacaatcacgcattggtggtgcatgttcaccatcacaacagatgtctcatctttcagactccaatgaactaaacacgttagctatttctccaccaaagccttctacccttagcgctaccagaagaacagggatctcttctttggatgctactgctgatgatcatttgaccccttcaactgaacttgagagggaggaacaagcaaaagccaagcgtctggctcgtttccatgttgaattaagcaggccagtagaaaatactaatgattttgtgaaaacagttaaaagctctgcagataagtccaaacaagccacatcagtgggaagaactcctttgagaacaaatgatgacaccgatgacaatactttggttgacatggattccacagctttggctgcaattgttgggctttgccctgatatgtgcccagaacctgagagggcagagcgtgagagaaaaggagatcttgataggtatgaaagattggacggagacagaaacctaactactgagcttctcgctgttaaaaagataaggctccacataattgcgatgcatgaattatgtgaatacaacaaaggagaaggtttttccgagggttttgatgcacacctcaacattgagcagatgaataaaacatcagttgagctatttcaaatgtatgatgaccataggagagaaggtgttctcttctcaacagaaaaggagtttcggggttattatgcactgctcaagttagacaaacatcctggttacaaggttgaacctgctgagttatctctggatcttgctaagatgtctcgtgaaattagaggcagtccagagatcttgtttgcaagagaagttgcaagagcatgcagaatggggaactttatttccttcttccgtcttgcaaggaaagctacatatttgcaggcctgtttgatgcatgctcattttgcaaagctaaggaggcaagcactcgcttccttgcacagtggtcttcagaatggccaaggcatccctatttcgcaggttgtggtgtggcttgctatggagggcgaggatgttgaaaatctattagaataccatggttttgggttgaggcagtatgaagaactgtacttagtcaaagaaggaccttttcttaacagtgaaagtgatttcccatctggctgttcacagcttgtgcattctaaaaaatcgcagagggtcgttgatgatgtttcttctgggccagattgtgctccaactagcaaagaaaagactgtctttccatatactggtcaaccagttgctggcaaaagagatctatttctaccacagaatgctcctgcgattcctcctgatggcagaatggatttggatccatcatttcctgggcctatttcaatcactcctgacagacagattagcccattgttttcagatcctttctctccaagagctgccagtaaactattcagttcaacacatccaaagcctctctccccaactgaaggtagaaaagacaggttttcatctgtccttactgctgtttctccacgtactggcaagagggacatactgtcaaaaacaccaaaagtagcttcaccaaaagctgaagccaagacaaaattggttaatgaccttatagctgaagaccaggatagtggtgttgctgagatccctcagaaggtagagatgcaaacagacatactgtggtcacaagctaacacgcaaaacgccaatgctctggcagaaccaattatttcacatcctcttgcagatagcatgtctttaaattactccagtatgtatggagcggaagatgacttcagggcacatgtttctggcatcggtgcagatatggatgagggaactccaccagatcatgaatgtctggttattggagctggattgcctattagctcccctttgtcctatcatgaggaatatgaggaccatagtattagtaacagcacaaatgatgattggttaccaattgttatgcccgcaaagaaactaatttctgatgaaaacctgaaagcaatattgaggaaatggaggcagcatgctgctgacaagcgattacttagggagcagaagaatgctcttgctgttgcagcattgtgttctctatcactcggcccaccagttcataaaagtacaacggtgtctaagctagcagtcgaagaactagatattggccacgcctttaaagaaagacaagcaagaaagcaaaggtcctggtcacggctaaatgtttcggagttgtctggtcccattctaaatgaaaataaccctgatgctagatgcctctgctggaagttgcttgtacttgttccaccgggtatggaatcccagaccaacagttttgtctcaaaatggttacttagaaagctcatgggttatggaatcggagatattggattggttgtttcttcagcaggcctatcaatttggacagagtggatcagttttccaaatgcatgttgtttgtctgttgttagggccagcgatcaacaagttattgataatgatattgctaacagtacaagctgtatagtatttgtagtgtctgaaagcatttcatgggaaatgcagaaggaacggtttaacagtcttttagcctgcataccagatgaatccaatcttcctcttctgattttcagtggcgatacatataacgaaggatatgagtatgcgtcaaagtacatcatcaacaggcttggcctcaatggtcttaacagaggaaagatcggttcgtctttggttatttttcttgttgaaaactacacagaagaccatgccaatggtttctttgatgatgacaaactgcgtgagggcctgaagtggctggtaagtagtttgccagtgcagcctgatgtcactcttgtgaagacccatgaattgcttctggaatacttgaatccacaacttgagctgcttaacacccatgttgcacctggagctggtcctggcgattgcatttcagtattcaacaatgctgtcaatcaacttgcagaagagattttggctgcagcaaacgcaaactgtagccaatggccagctcccgagattgatcttctggagagaacaagcaatgagaggatatatgcagaaatgttcttgcctagcattggatggtcttcgccatcaaggatccagccactgcttgcagccattaatagctgcaagattccagagttcagttacgatctatcttggctaaaccatggttctcacatgggcaagcagatccaggatcagaagaagttacttgaggagtgcttggcgagatacttgaccgaatcagcccggctcttagatgaaagccaggtggtcaccgaagtgaatgttatggtgcagaattgtgttggccttgaactccaggattcgtcttactatctcgctcccagatgggtggcgatcttccgtcgtatttacaactggaggctagcaaagctctctaccggaaagttgtcagaagcttatgttctgactcagcacctgtatcaggctcctgcagcagctggctcaaatggtaccacacaagggcttactgctaacaccgccagcagtgatgctgtggatcacatcatgatgcctgctgtttcaaccggcatcacactagacgaaatcatcgagatcagttgtgacctcaatgttgttgatgcgcagcccgtaactctgccaccacgactgcctgtgcatgttcatgaagaacctcaggcacttgctgataccaacggcgtgcttggagttgatgaaatgtacataccaagaagagtagagttgggggaggtgatgcccatctcggacgacaagctttcccggctaagagtagagttgggggaggcgatgcccatcaagacggacgacaagctttcacggctactggagcagtgcaccaagctgcaggacaggatcgatgagacactttccatatacttttgagccccgtagtaaggctggaagggttttgttacaccatccttccacatttgttgtaacttgtaaaactagattttgtggaagtgaaaactaacactgccaagttaaagcgttcttgtttggcaggaatgaaatatagaagcgtcatttttcttctcgaatcatgtcattgtcagtaaagtacctaaagcacgatttgggtcagaccagcccggtgcgagcataactgtattgcgtgcacagctattgacgctcccacgctaccgtagtccgctttgtcactccctgcactgcagggcctgacagtaaattttgggaagaacaacaaat

SEQ ID NO: 67335 - DNA, 4731 bp, Zea Mays
aacaggttggtgcactttgcagacccattgtttgaaaatggaagtttgcaatcttcagagcaattgaggatgcggccttccgagaacatgaggtcacaaacttcaaccaaatcaccatcaaacatagccagcaagtttagacatccatcagacttccaagatcaccatcatgtgcagattgttgatcctcgtgctaatgtgtataaattcacgggttcaatgcagaatcaatcatcagatcataacatttcaaaaaggtcaaggtcacctactttgtcctacgaggatgctgatggcacgaaagctcatgttaatactggtggaaattctagaagactggttgactattcggataccatcaatgatgaaaatgttgaagcctcaaaaaggatgcgatcacctgcatcagagttcacacgcatggtcaagtcaccaccatcagataccagaggcaatatcaggtctgatgcatccttttccaagttcagaaatcaaatacaatcacgcattggtggtgcatgttcaccatcacaacagatgtctcatctttcagactccaatgaactaaacacgttagctatttctccaccaaagccttctacccttagcgctaccagaagaacagggatctcttctttggatgctactgctgatgatcatttgaccccttcaactgaacttgagagggaggaacaagcaaaagccaagcgtctggctcgtttccatgttgaattaagcaggccagtagaaaatactaatgattttgtgaaaacagttaaaagctctgcagataagtccaaacaagccacatcagtgggaagaactcctttgagaacaaatgatgacaccgatgacaatactttggttgacatggattccacagctttggctgcaattgttgggctttgccctgatatgtgcccagaacctgagagggcagagcgtgagagaaaaggagatcttgataggtatgaaagattggacggagacagaaacctaactactgagcttctcgctgttaaaaagataaggctccacataattgcgatgcatgaattatgtgaatacaacaaaggagaaggtttttccgagggttttgatgcacacctcaacattgagcagatgaataaaacatcagttgagctatttcaaatgtatgatgaccataggagagaaggtgttctcttctcaacagaaaaggagtttcggggttattatgcactgctcaagttagacaaacatcctggttacaaggttgaacctgctgagttatctctggatcttgctaagatgtctcgtgaaattagaggcagtccagagatcttgtttgcaagagaagttgcaagaatggggaactttatttccttcttccgtcttgcaaggaaagctacatatttgcaggcctgtttgatgcatgctcattttgcaaagctaaggaggcaagcactcgcttccttgcacagtggtcttcagaatggccaaggcatccctatttcgcaggttgtggtgtggcttgctatggagggcgaggatgttgaaaatctattagaataccatggttttgggttgaggcagtatgaagaactgtacttagtcaaagaaggaccttttcttaacagtgaaagtgatttcccatctggctgttcacagcttgtgcattctaaaaaatcgcagagggtcgttgatgatgtttcttctgggccagattgtgctccaactagcaaagaaaagactgtctttccatatactggtcaaccagttgctggcaaaagagatctatttctaccacagaatgctcctgcgattcctcctgatggcagaatggatttggatccatcatttcctgggcctatttcaatcactcctgacagacagattagcccattgttttcagatcctttctctccaagagctgccagtaaactattcagttcaacacatccaaagcctctctccccaactgaaggtagaaaagacaggttttcatctgtccttactgctgtttctccacgtactggcaagagggacatactgtcaaaaacaccaaaagtagcttcaccaaaagctgaagccaagacaaaattggttaatgaccttatagctgaagaccaggatagtggtgttgctgagatccctcagaaggtagagatgcaaacagacatactgtggtcacaagctaacacgcaaaacgccaatgctctggcagaaccaattatttcacatcctcttgcagatagcatgtctttaaattactccagtatgtatggagcggaagatgacttcagggcacatgtttctggcatcggtgcagatatggatgagggaactccaccagatcatgaatgtctggttattggagctggattgcctattagctcccctttgtcctatcatgaggaatatgaggaccatagtattagtaacagcacaaatgatgattggttaccaattgttatgcccgcaaagaaactaatttctgatgaaaacctgaaagcaatattgaggaaatggaggcagcatgctgctgacaagcgattacttagggagcagaagaatgctcttgctgttgcagcattgtgttctctatcactcggcccaccagttcataaaagtacaacggtgtctaagctagcagtcgaagaactagatattggccacgcctttaaagaaagacaagcaagaaagcaaaggtcctggtcacggctaaatgtttcggagttgtctggtcccattctaaatgaaaataaccctgatgctagatgcctctgctggaagttgcttgtacttgttccaccgggtatggaatcccagaccaacagttttgtctcaaaatggttacttagaaagctcatgggttatggaatcggagatattggattggttgtttcttcagcaggcctatcaatttggacagagtggatcagttttccaaatgcatgttgtttgtctgttgttagggccagcgatcaacaagttattgataatgatattgctaacagtacaagctgtatagtatttgtagtgtctgaaagcatttcatgggaaatgcagaaggaacggtttaacagtcttttagcctgcataccagatgaatccaatcttcctcttctgattttcagtggcgatacatataacgaaggatatgagtatgcgtcaaagtacatcatcaacaggcttggcctcaatggtcttaacagaggaaagatcggttcgtctttggttatttttcttgttgaaaactacacagaagaccatgccaatggtttctttgatgatgacaaactgcgtgagggcctgaagtggctggtaagtagtttgccagtgcagcctgatgtcactcttgtgaagacccatgaattgcttctggaatacttgaatccacaacttgagctgcttaacacccatgttgcacctggagctggtcctggcgattgcatttcagtattcaacaatgctgtcaatcaacttgcagaagagattttggctgcagcaaacgcaaactgtagccaatggccagctcccgagattgatcttctggagagaacaagcaatgagaggatatatgcagaaatgttcttgcctagcattggatggtcttcgccatcaaggatccagccactgcttgcagccattaatagctgcaagattccagagttcagttacgatctatcttggctaaaccatggttctcacatgggcaagcagatccaggatcagaagaagttacttgaggagtgcttggcgagatacttgaccgaatcagcccggctcttagatgaaagccaggtggtcaccgaagtgaatgttatggtgcagaattgtgttggccttgaactccaggattcgtcttactatctcgctcccagatgggtggcgatcttccgtcgtatttacaactggaggctagcaaagctctctaccggaaagttgtcagaagcttatgttctgactcagcacctgtatcaggctcctgcagcagctggctcaaatggtaccacacaagggcttactgctaacaccgccagcagtgatgctgtggatcacatcatgatgcctgctgtttcaaccggcatcacactagacgaaatcatcgagatcagttgtgacctcaatgttgttgatgcgcagcccgtaactctgccaccacgactgcctgtgcatgttcatgaagaacctcaggcacttgctgataccaacggcgtgcttggagttgatgaaatgtacataccaagaagagtagagttgggggaggtgatgcccatctcggacgacaagctttcccggctaagagtagagttgggggaggcgatgcccatcaagacggacgacaagctttcacggctactggagcagtgcaccaagctgcaggacaggatcgatgagacactttccatatacttttgagccccgtagtaaggctggaagggttttgttacaccatccttccacatttgttgtaacttgtaaaactagattttgtggaagtgaaaactaacactgccaagttaaagcgttcttgtttggcaggaatgaaatatagaagcgtcatttttcttctcgaatcatgtcattgtcagtaaagtacctaaagcacgatttgggtcagaccagcccggtgcgagcataactgtattgcgtgcacagctattgacgctcccacgctaccgtagtccgctttgtcactccctgcactgcagggcctgacagtaaattttgggaagaacaacaaat

SEQ ID NO: 67336 - DNA, 4957 bp, Zea Mays
aacaggttggtgcactttgcagacccattgtttgaaaatggaagtttgcaatcttcagagcaattgaggatgcggccttccgagaacatgaggtcacaaacttcaaccaaatcaccatcaaacatagccagcaagtttagacatccatcagacttccaagatcaccatcatgtgcagattgttgatcctcgtgctaatgtgtataaattcacgggttcaatgcagaatcaatcatcagatcataacatttcaaaaaggtcaaggtcacctactttgtcctacgaggatgctgatggcacgaaagctcatgttaatactggtggaaattctagaagactggttgactattcggataccatcaatgatgaaaatgttgaagcctcaaaaaggatgcgatcacctgcatcagagttcacacgcatggtcaagtcaccaccatcagataccagaggcaatatcaggtctgatgcatccttttccaagttcagaaatcaaatacaatcacgcattggtggtgcatgttcaccatcacaacagatgtctcatctttcagactccaatgaactaaacacgttagctatttctccaccaaagccttctacccttagcgctaccagaagaacagggatctcttctttggatgctactgctgatgatcatttgaccccttcaactgaacttgagagggaggaacaagcaaaagccaagcgtctggctcgtttccatgttgaattaagcaggccagtagaaaatactaatgattttgtgaaaacagttaaaagctctgcagataagtccaaacaagccacatcagtgggaagaactcctttgagaacaaatgatgacaccgatgacaatactttggttgacatggattccacagctttggctgcaattgttgggctttgccctgatatgtgcccagaacctgagagggcagagcgtgagagaaaaggagatcttgataggtatgaaagattggacggagacagaaacctaactactgagcttctcgctgttaaaaagtataataggactgctgagagagatgcagacttgataaggcctctgccaattttacagaagacaatggagtatcttcttagtttgctggatcacacatatgatgacagtttcttgggcttatacaacttcttgtgggataggatgcgagcaataagaatggatcttagaatgcaacatttcttcaatcaagaggctattttctatgcttgagcaaatgataaggctccacataattgcgatgcatgaattatgtgaatacaacaaaggagaaggtttttccgagggttttgatgcacacctcaacattgagcagatgaataaaacatcagttgagctatttcaaatgtatgatgaccataggagagaaggtgttctcttctcaacagaaaaggagtttcggggttattatgcactgctcaagttagacaaacatcctggttacaaggttgaacctgctgagttatctctggatcttgctaagatgtctcgtgaaattagaggcagtccagagatcttgtttgcaagagaagttgcaagagcatgcagaatggggaactttatttccttcttccgtcttgcaaggaaagctacatatttgcaggcctgtttgatgcatgctcattttgcaaagctaaggaggcaagcactcgcttccttgcacagtggtcttcagaatggccaaggcatccctatttcgcaggttgtggtgtggcttgctatggagggcgaggatgttgaaaatctattagaataccatggttttgggttgaggcagtatgaagaactgtacttagtcaaagaaggaccttttcttaacagtgaaagtgatttcccatctggctgttcacagcttgtgcattctaaaaaatcgcagagggtcgttgatgatgtttcttctgggccagattgtgctccaactagcaaagaaaagactgtctttccatatactggtcaaccagttgctggcaaaagagatctatttctaccacagaatgctcctgcgattcctcctgatggcagaatggatttggatccatcatttcctgggcctatttcaatcactcctgacagacagattagcccattgttttcagatcctttctctccaagagctgccagtaaactattcagttcaacacatccaaagcctctctccccaactgaaggtagaaaagacaggttttcatctgtccttactgctgtttctccacgtactggcaagagggacatactgtcaaaaacaccaaaagtagcttcaccaaaagctgaagccaagacaaaattggttaatgaccttatagctgaagaccaggatagtggtgttgctgagatccctcagaaggtagagatgcaaacagacatactgtggtcacaagctaacacgcaaaacgccaatgctctggcagaaccaattatttcacatcctcttgcagatagcatgtctttaaattactccagtatgtatggagcggaagatgacttcagggcacatgtttctggcatcggtgcagatatggatgagggaactccaccagatcatgaatgtctggttattggagctggattgcctattagctcccctttgtcctatcatgaggaatatgaggaccatagtattagtaacagcacaaatgatgattggttaccaattgttatgcccgcaaagaaactaatttctgatgaaaacctgaaagcaatattgaggaaatggaggcagcatgctgctgacaagcgattacttagggagcagaagaatgctcttgctgttgcagcattgtgttctctatcactcggcccaccagttcataaaagtacaacggtgtctaagctagcagtcgaagaactagatattggccacgcctttaaagaaagacaagcaagaaagcaaaggtcctggtcacggctaaatgtttcggagttgtctggtcccattctaaatgaaaataaccctgatgctagatgcctctgctggaagttgcttgtacttgttccaccgggtatggaatcccagaccaacagttttgtctcaaaatggttacttagaaagctcatgggttatggaatcggagatattggattggttgtttcttcagcaggcctatcaatttggacagagtggatcagttttccaaatgcatgttgtttgtctgttgttagggccagcgatcaacaagttattgataatgatattgctaacagtacaagctgtatagtatttgtagtgtctgaaagcatttcatgggaaatgcagaaggaacggtttaacagtcttttagcctgcataccagatgaatccaatcttcctcttctgattttcagtggcgatacatataacgaaggatatgagtatgcgtcaaagtacatcatcaacaggcttggcctcaatggtcttaacagaggaaagatcggttcgtctttggttatttttcttgttgaaaactacacagaagaccatgccaatggtttctttgatgatgacaaactgcgtgagggcctgaagtggctggtaagtagtttgccagtgcagcctgatgtcactcttgtgaagacccatgaattgcttctggaatacttgaatccacaacttgagctgcttaacacccatgttgcacctggagctggtcctggcgattgcatttcagtattcaacaatgctgtcaatcaacttgcagaagagattttggctgcagcaaacgcaaactgtagccaatggccagctcccgagattgatcttctggagagaacaagcaatgagaggatatatgcagaaatgttcttgcctagcattggatggtcttcgccatcaaggatccagccactgcttgcagccattaatagctgcaagattccagagttcagttacgatctatcttggctaaaccatggttctcacatgggcaagcagatccaggatcagaagaagttacttgaggagtgcttggcgagatacttgaccgaatcagcccggctcttagatgaaagccaggtggtcaccgaagtgaatgttatggtgcagaattgtgttggccttgaactccaggattcgtcttactatctcgctcccagatgggtggcgatcttccgtcgtatttacaactggaggctagcaaagctctctaccggaaagttgtcagaagcttatgttctgactcagcacctgtatcaggctcctgcagcagctggctcaaatggtaccacacaagggcttactgctaacaccgccagcagtgatgctgtggatcacatcatgatgcctgctgtttcaaccggcatcacactagacgaaatcatcgagatcagttgtgacctcaatgttgttgatgcgcagcccgtaactctgccaccacgactgcctgtgcatgttcatgaagaacctcaggcacttgctgataccaacggcgtgcttggagttgatgaaatgtacataccaagaagagtagagttgggggaggtgatgcccatctcggacgacaagctttcccggctaagagtagagttgggggaggcgatgcccatcaagacggacgacaagctttcacggctactggagcagtgcaccaagctgcaggacaggatcgatgagacactttccatatacttttgagccccgtagtaaggctggaagggttttgttacaccatccttccacatttgttgtaacttgtaaaactagattttgtggaagtgaaaactaacactgccaagttaaagcgttcttgtttggcaggaatgaaatatagaagcgtcatttttcttctcgaatcatgtcattgtcagtaaagtacctaaagcacgatttgggtcagaccagcccggtgcgagcataactgtattgcgtgcacagctattgacgctcccacgctaccgtagtccgctttgtcactccctgcactgcagggcctgacagtaaattttgggaagaacaacaaat

SEQ ID NO: 67337 - DNA, 4960 bp, Zea Mays
aacaggttggtgcactttgcagacccattgtttgaaaatggaagtttgcaatcttcagagcaattgaggatgcggccttccgagaacatgaggtcacaaacttcaaccaaatcaccatcaaacatagccagcaagtttagacatccatcagacttccaagatcaccatcatgtgcagattgttgatcctcgtgctaatgtgtataatagattcacgggttcaatgcagaatcaatcatcagatcataacatttcaaaaaggtcaaggtcacctactttgtcctacgaggatgctgatggcacgaaagctcatgttaatactggtggaaattctagaagactggttgactattcggataccatcaatgatgaaaatgttgaagcctcaaaaaggatgcgatcacctgcatcagagttcacacgcatggtcaagtcaccaccatcagataccagaggcaatatcaggtctgatgcatccttttccaagttcagaaatcaaatacaatcacgcattggtggtgcatgttcaccatcacaacagatgtctcatctttcagactccaatgaactaaacacgttagctatttctccaccaaagccttctacccttagcgctaccagaagaacagggatctcttctttggatgctactgctgatgatcatttgaccccttcaactgaacttgagagggaggaacaagcaaaagccaagcgtctggctcgtttccatgttgaattaagcaggccagtagaaaatactaatgattttgtgaaaacagttaaaagctctgcagataagtccaaacaagccacatcagtgggaagaactcctttgagaacaaatgatgacaccgatgacaatactttggttgacatggattccacagctttggctgcaattgttgggctttgccctgatatgtgcccagaacctgagagggcagagcgtgagagaaaaggagatcttgataggtatgaaagattggacggagacagaaacctaactactgagcttctcgctgttaaaaagtataataggactgctgagagagatgcagacttgataaggcctctgccaattttacagaagacaatggagtatcttcttagtttgctggatcacacatatgatgacagtttcttgggcttatacaacttcttgtgggataggatgcgagcaataagaatggatcttagaatgcaacatttcttcaatcaagaggctattttctatgcttgagcaaatgataaggctccacataattgcgatgcatgaattatgtgaatacaacaaaggagaaggtttttccgagggttttgatgcacacctcaacattgagcagatgaataaaacatcagttgagctatttcaaatgtatgatgaccataggagagaaggtgttctcttctcaacagaaaaggagtttcggggttattatgcactgctcaagttagacaaacatcctggttacaaggttgaacctgctgagttatctctggatcttgctaagatgtctcgtgaaattagaggcagtccagagatcttgtttgcaagagaagttgcaagagcatgcagaatggggaactttatttccttcttccgtcttgcaaggaaagctacatatttgcaggcctgtttgatgcatgctcattttgcaaagctaaggaggcaagcactcgcttccttgcacagtggtcttcagaatggccaaggcatccctatttcgcaggttgtggtgtggcttgctatggagggcgaggatgttgaaaatctattagaataccatggttttgggttgaggcagtatgaagaactgtacttagtcaaagaaggaccttttcttaacagtgaaagtgatttcccatctggctgttcacagcttgtgcattctaaaaaatcgcagagggtcgttgatgatgtttcttctgggccagattgtgctccaactagcaaagaaaagactgtctttccatatactggtcaaccagttgctggcaaaagagatctatttctaccacagaatgctcctgcgattcctcctgatggcagaatggatttggatccatcatttcctgggcctatttcaatcactcctgacagacagattagcccattgttttcagatcctttctctccaagagctgccagtaaactattcagttcaacacatccaaagcctctctccccaactgaaggtagaaaagacaggttttcatctgtccttactgctgtttctccacgtactggcaagagggacatactgtcaaaaacaccaaaagtagcttcaccaaaagctgaagccaagacaaaattggttaatgaccttatagctgaagaccaggatagtggtgttgctgagatccctcagaaggtagagatgcaaacagacatactgtggtcacaagctaacacgcaaaacgccaatgctctggcagaaccaattatttcacatcctcttgcagatagcatgtctttaaattactccagtatgtatggagcggaagatgacttcagggcacatgtttctggcatcggtgcagatatggatgagggaactccaccagatcatgaatgtctggttattggagctggattgcctattagctcccctttgtcctatcatgaggaatatgaggaccatagtattagtaacagcacaaatgatgattggttaccaattgttatgcccgcaaagaaactaatttctgatgaaaacctgaaagcaatattgaggaaatggaggcagcatgctgctgacaagcgattacttagggagcagaagaatgctcttgctgttgcagcattgtgttctctatcactcggcccaccagttcataaaagtacaacggtgtctaagctagcagtcgaagaactagatattggccacgcctttaaagaaagacaagcaagaaagcaaaggtcctggtcacggctaaatgtttcggagttgtctggtcccattctaaatgaaaataaccctgatgctagatgcctctgctggaagttgcttgtacttgttccaccgggtatggaatcccagaccaacagttttgtctcaaaatggttacttagaaagctcatgggttatggaatcggagatattggattggttgtttcttcagcaggcctatcaatttggacagagtggatcagttttccaaatgcatgttgtttgtctgttgttagggccagcgatcaacaagttattgataatgatattgctaacagtacaagctgtatagtatttgtagtgtctgaaagcatttcatgggaaatgcagaaggaacggtttaacagtcttttagcctgcataccagatgaatccaatcttcctcttctgattttcagtggcgatacatataacgaaggatatgagtatgcgtcaaagtacatcatcaacaggcttggcctcaatggtcttaacagaggaaagatcggttcgtctttggttatttttcttgttgaaaactacacagaagaccatgccaatggtttctttgatgatgacaaactgcgtgagggcctgaagtggctggtaagtagtttgccagtgcagcctgatgtcactcttgtgaagacccatgaattgcttctggaatacttgaatccacaacttgagctgcttaacacccatgttgcacctggagctggtcctggcgattgcatttcagtattcaacaatgctgtcaatcaacttgcagaagagattttggctgcagcaaacgcaaactgtagccaatggccagctcccgagattgatcttctggagagaacaagcaatgagaggatatatgcagaaatgttcttgcctagcattggatggtcttcgccatcaaggatccagccactgcttgcagccattaatagctgcaagattccagagttcagttacgatctatcttggctaaaccatggttctcacatgggcaagcagatccaggatcagaagaagttacttgaggagtgcttggcgagatacttgaccgaatcagcccggctcttagatgaaagccaggtggtcaccgaagtgaatgttatggtgcagaattgtgttggccttgaactccaggattcgtcttactatctcgctcccagatgggtggcgatcttccgtcgtatttacaactggaggctagcaaagctctctaccggaaagttgtcagaagcttatgttctgactcagcacctgtatcaggctcctgcagcagctggctcaaatggtaccacacaagggcttactgctaacaccgccagcagtgatgctgtggatcacatcatgatgcctgctgtttcaaccggcatcacactagacgaaatcatcgagatcagttgtgacctcaatgttgttgatgcgcagcccgtaactctgccaccacgactgcctgtgcatgttcatgaagaacctcaggcacttgctgataccaacggcgtgcttggagttgatgaaatgtacataccaagaagagtagagttgggggaggtgatgcccatctcggacgacaagctttcccggctaagagtagagttgggggaggcgatgcccatcaagacggacgacaagctttcacggctactggagcagtgcaccaagctgcaggacaggatcgatgagacactttccatatacttttgagccccgtagtaaggctggaagggttttgttacaccatccttccacatttgttgtaacttgtaaaactagattttgtggaagtgaaaactaacactgccaagttaaagcgttcttgtttggcaggaatgaaatatagaagcgtcatttttcttctcgaatcatgtcattgtcagtaaagtacctaaagcacgatttgggtcagaccagcccggtgcgagcataactgtattgcgtgcacagctattgacgctcccacgctaccgtagtccgctttgtcactccctgcactgcagggcctgacagtaaattttgggaagaacaacaaat

SEQ ID NO: 67338 - DNA, 2527 bp, Zea Mays
ccggccatcagccgtaacatagcggcgagatgtccttcttgttccgtaaaagcgcgcccgtagccgcaggagatcgcgcgctccgtcaaggacccccctcgtcgccctcgacaccatgaccggcgcggcggcgcgaagttataaagttaatcatgacagtgagatgacacttggtcttacttgttcaccacatgctcttgaggatgctgagaaaaacatacttacgtttaggcatacacttgctggtgaagtggaaccaaatcaagagcaggttctgcagatagcccttgagatttgcaaggagggtgttatttccttctttgttcagaatcttccttccttgggttgggagatatatattggagtcaagtagcttcgagttgtttttccagtaagttgaattgccaaacttcgatattgcttctgatgctctgaacaccttcaaggatttgctaaccaaacatgaagatcaagtctctgaattcctgagctcaaattatgaacaggtcagccaaataatacctttatgtagaacgaatgaaattcataattttaatgtttattccaaataattaagaggaccaatagttttgctccaccctgtcccttgcattttgtatcttcctccgtgtcatcttttgcataggttggtttggcttttaatgaataattgttcttttgtattgctaaagttttgaagcgccgatccattgtaaacatgcgcagtttttactctacacaaagacaatcggtgaaggttagactatttaaattgcaatttcttgtagggtacaaaaatgcgatgctttaaggcacttcgctgcatgccagtttcgttcagagtttctgttagaggccccaaatgctcaatagtgaagagtttcattttcgaagttcgttacttaaacattatggtgggtcttctgaaggtattagagtataagttccctgcttatatttaaagaatcagcaatgatattgatcacccttctcatttcctctgtttcttgatttttcacttaagtagttatgacattttagtgccattatcttgtgaaaaatggcggttgttattagcacaatagatgagagatcctgctttggcttttggatatcttgccaagcaaaggtcatcctcagagactaagatatacgtgcagaactatactcttgcaattgttctttagtgactgccagagatccggccattcagatctaaatggctttctgtttatagctaaattgcatagcaccattgttcatgttgaatactaccattttatttctctgggctatttatgtattgcttgggtaccccagtcatcttgtatctaacagtgagtattcgagcagttctcatagtttctaatacaaaagtagttcaaatattccttcttaaatgaaatgacacgcaaatctcctgcgttgtttgagagaaaaaaagtagtccaaatatacacacttgccaactagccagtgctacaaattttcttcttttaagacaaatgatgaaaacaacacaggttagtcatagatagtttgttttcatcttcataactagtggccatctttttcatgctatacacattctttttttaatgcctctactaagtactacctccgttctcgaatatttgtcgtccgctagtttatttttgacctaaaacgtgacaaataaaaaagaacggagggagtactagccagtgtcttttgtaggattcaaccaaaaatatcaggatatgttccttgcacattttgaaggtatacgtttaccctttcggttttacgttggatagctgttggtttgaattaatcatagctttgcgtgagcactatgttgttgccattttttggaaggttcattttcactacgcggatgcaggtatttgttgccaatccaaacaaacctcgagagattatctcaggttttggctgacaatcacagagaactgttgaagctactccacaatctccccactagcaaaggtattactactgtattgcctaattctaacattttaattatcaaagaaatcgagaagcttgcgcggatgtcagtataaaccctcaggaaattcgaacatagctccttgatgttgatgttcaggaaccctttctcacctcaaagttctgaagacatcctgtgtaatgtgctgccctgtatggagcttgtttttcatatatggaaaaggtttggccacaaactgcattctccgtgtgaaacacttagcattcgtatcggaattcattgatttatgcacttgtagcagaattcgctgcaggaataaactgcactgtggtttggtgttggtaccatcgagaaaattgggtgagggtgtgtagtattttatatgagtaagattgtcatcaagtggatccatctgttgcaatgggtgtcgaggctgattatcttattttctctctcttattcttgctcttttctctctcttattcttcctctttttttctctctcttcatcttctttcttcctttcccttccccttcttctttcttcctcttctttcc

SEQ ID NO: 67339 - DNA, 3005 bp, Zea Mays
ccggccatcagccgtaacatagcggcgagatgtccttcttgttccgtaaaagcgcgcccgtagccgcaggagatcgcgcgctccgtcaaggacccccctcgtcgccctcgacaccatgaccggcgcggcggcgcgaagttataaagttaatcatgacagtgagatgacacttggtcttacttgttcaccacatgctcttgaggatgctgagaaaaacatacttacgtttaggcatacacttgctggtgaagtggaaccaaatcaagagcaggttctgcagatagcccttgagatttgcaaggagggtgttatttccttctttgttcagaatcttccttccttgggttgggaggtatgtttttttcttcttctgaaattcaggaggactgcatatcattgcattaatagaagaaagaaagggttgggaggtatgtatattcacaaattgagtgtgacaacctttttcactgtgttattagccttattggtgccccaacggatttcttccgtgtcttgtctccacgagaatagctatattcaacgttggctcgccaagcctatcacaacccttctcttcctttactagggcttcgaacctgctatgttgagacaacgtaggcggagttatgttgctccagtatattgaaaatcattttgatcttctggatttccttgttgtttggtaaggcctgtttctgaagttatgaattggattggaacacagggaattggagcatgctgattcgtttcttggctggaaatgggaatgcaattgcagaaatatatagataactgattgcttcctatggctatttatttttaccacttatatttgcatagttgtattattttgtgtgtttgtttgtgaaatgcatttgtagtatatgcaatagttttaccacttctacttgcattattttttttcctcaaacgcacaagagagttgcacatcattatattaagagaggagaaaaggtctaaagtggaccagagtacaaagcccggagtgcagaaaaaactggacgtaagcagtaagcaccatgaacctaacacccatgcctcctctccaacaacacaagagaagaaacataagcaaaggataaggcagacccgactagtctaaactgtagcactagaagtagccaagaccctatttaaggcaactgcaagcccaagactctcaagatgcttagcacccgccttatcccagcagatcaattaatctaaaaacagtcttttgacagtgctaatggaaggattcactccatcaaaaacaaccttgttacgaagaagccataagcaccaagcccctagaattatgacactattgaagccttttatcctgctcttatgcacttttttaagagcctttccccaccgcacagcaaaagagatctcatcaatatcaaaagtgagatcacccagtcccatgagcgacaaaatatgatgcaaaaactgtctagcaaaactgcaagtgcaaaggagatattgggttgtttcttgctcttgatcacataggggacacaccaggtattgcaatcctctcatttgaagtctatcaacagtccaacacttattccttattgacaaccaaaggaaaaacttgcattttgagggagcccaagtcttccacaatcttttcgatggctcaaatgaaatggaacccatgaagaaggctgtatagcaggacttgcattatttttgtgtgtttgtctatgaactgctcctgtagtatatgccattgtaatactcctgcgcctgactgatttaactatgttttaccagctacaagaacttggaagtaaggtttggaatatttgttcaactatattttcttttcttagtggatctgcaatagcatacagtttccagcatatatgccttcgcctgacatctgtttttttagaacctctggccctttgtagttgcatgcatggacagatatagtacataatgcattcgctaaaacaagcagtcatggaaatgtactctgtagtatgcagatgttagattttgcaaaaaaaactaaagcaaacaaacaaataaatgagttagttaattttgcaaatgattatgttttcatacatttgattttatactgctctttcagatatatattggagtcaagtagcttcgagttgtttttccagtaagttgaattgccaaacttcgatattgcttctgatgctctgaacaccttcaaggatttgctaaccaaacatgaagatcaagtctctgaattcctgagctcaaattatgaacagggtacaaaaatgcgatgctttaaggcacttcgctgcatgccagtttcgttcagagtttctgttagaggccccaaatgctcaatagtgaagagtttcattttcgaagttcgttacttaaacattatggtgggtcttctgaaggtatttgttgccaatccaaacaaacctcgagagattatctcaggttttggctgacaatcacagagaactgttgaagctactccacaatctccccactagcaaagaaatcgagaagcttgcgcggatgtcagtataaaccctcaggaaattcgaacatagctccttgatgttgatgttcaggaaccctttctcacctcaaagttctgaagacatcctgtgtaatgtgctgccctgtatggagcttgtttttcatatatggaaaaggtttggccacaaactgcattctccgtgtgaaacacttagcattcgtatcggaattcattgatttatgcacttgtagcagaattcgctgcaggaataaactgcactgtggtttggtgttggtaccatcgagaaaattgggtgagggtgtgtagtattttatatgagtaagattgtcatcaagtggatccatctgttgcaatgggtgtcgaggctgattatcttattttctctctcttattcttgctcttttctctctcttattcttcctctttttttctctctcttcatcttctttcttcctttcccttccccttcttctttcttcctcttctttcc

SEQ ID NO: 67340 - DNA, 3415 bp, Zea Mays
ccggccatcagccgtaacatagcggcgagatgtccttcttgttccgtaaaagcgcgcccgtagccgcaggagatcgcgcgctccgtcaaggacccccctcgtcgccctcgacaccatgaccggcgcggcggcgcgaagttataaagttaatcatgacagtgagatgacacttggtcttacttgttcaccacatgctcttgaggatgctgagaaaaacatacttacgtttaggcatacacttgctggtgaagtggaaccaaatcaagagcaggttctgcagatagcccttgagatttgcaaggagggtgttatttccttctttgttcagaatcttccttccttgggttgggaggtatgtttttttcttcttctgaaattcaggaggactgcatatcattgcattaatagaagaaagaaagggttgggaggtatgtatattcacaaattgagtgtgacaacctttttcactgtgttattagccttattggtgccccaacggatttcttccgtgtcttgtctccacgagaatagctatattcaacgttggctcgccaagcctatcacaacccttctcttcctttactagggcttcgaacctgctatgttgagacaacgtaggcggagttatgttgctccagtatattgaaaatcattttgatcttctggatttccttgttgtttggtaaggcctgtttctgaagttatgaattggattggaacacagggaattggagcatgctgattcgtttcttggctggaaatgggaatgcaattgcagaaatatatagataactgattgcttcctatggctatttatttttaccacttatatttgcatagttgtattattttgtgtgtttgtttgtgaaatgcatttgtagtatatgcaatagttttaccacttctacttgcattattttttttcctcaaacgcacaagagagttgcacatcattatattaagagaggagaaaaggtctaaagtggaccagagtacaaagcccggagtgcagaaaaaactggacgtaagcagtaagcaccatgaacctaacacccatgcctcctctccaacaacacaagagaagaaacataagcaaaggataaggcagacccgactagtctaaactgtagcactagaagtagccaagaccctatttaaggcaactgcaagcccaagactctcaagatgcttagcacccgccttatcccagcagatcaattaatctaaaaacagtcttttgacagtgctaatggaaggattcactccatcaaaaacaaccttgttacgaagaagccataagcaccaagcccctagaattatgacactattgaagccttttatcctgctcttatgcacttttttaagagcctttccccaccgcacagcaaaagagatctcatcaatatcaaaagtgagatcacccagtcccatgagcgacaaaatatgatgcaaaaactgtctagcaaaactgcaagtgcaaaggagatattgggttgtttcttgctcttgatcacataggggacacaccaggtattgcaatcctctcatttgaagtctatcaacagtccaacacttattccttattgacaaccaaaggaaaaacttgcattttgagggagcccaagtcttccacaatcttttcgatggctcaaatgaaatggaacccatgaagaaggctgtatagcaggacttgcattatttttgtgtgtttgtctatgaactgctcctgtagtatatgccattgtaatactcctgcgcctgactgatttaactatgttttaccagctacaagaacttggaagtaaggtttggaatatttgttcaactatattttcttttcttagtggatctgcaatagcatacagtttccagcatatatgccttcgcctgacatctgtttttttagaacctctggccctttgtagttgcatgcatggacagatatagtacataatgcattcgctaaaacaagcagtcatggaaatgtactctgtagtatgcagatgttagattttgcaaaaaaaactaaagcaaacaaacaaataaatgagttagttaattttgcaaatgattatgttttcatacatttgattttatactgctctttcagatatatattggagtcaagtagcttcgagttgtttttccagtaagttgaattgccaaacttcgatattgcttctgatgctctgaacaccttcaaggtaaatataatcttgtcaatttgatctttaaaataaaaaatggatttatgtttgcttcttcaggattgatgtttgctgttgacaagatacttgcaggatttgctaaccaaacatgaagatcaagtctctgaattcctgagctcaaattatgaacaggtcagccaaataatacctttatgtagaacgaatgaaattcataattttaatgtttattccaaataattaagaggaccaatagttttgctccaccctgtcccttgcattttgtatcttcctccgtgtcatcttttgcataggttggtttggcttttaatgaataattgttcttttgtattgctaaagttttgaagcgccgatccattgtaaacatgcgcagtttttactctacacaaagacaatcggtgaaggttagactatttaaattgcaatttcttgtagggtacaaaaatgcgatgctttaaggcacttcgctgcatgccagtttcgttcagagtttctgttagaggccccaaatgctcaatagtgaagagtttcattttcgaagttcgttacttaaacattatggtgtatttgttgccaatccaaacaaacctcgagagattatctcaggttttggctgacaatcacagagaactgttgaagctactccacaatctccccactagcaaaggtattactactgtattgcctaattctaacattttaattatcaaagaaatcgagaagcttgcgcggatgtcagtataaaccctcaggaaattcgaacatagctccttgatgttgatgttcaggaaccctttctcacctcaaagttctgaagacatcctgtgtaatgtgctgccctgtatggagcttgtttttcatatatggaaaaggtttggccacaaactgcattctccgtgtgaaacacttagcattcgtatcggaattcattgatttatgcacttgtagcagaattcgctgcaggaataaactgcactgtggtttggtgttggtaccatcgagaaaattgggtgagggtgtgtagtattttatatgagtaagattgtcatcaagtggatccatctgttgcaatgggtgtcgaggctgattatcttattttctctctcttattcttgctcttttctctctcttattcttcctctttttttctctctcttcatcttctttcttcctttcccttccccttcttctttcttcctcttctttcc

SEQ ID NO: 67341 - DNA, 2314 bp, Zea Mays
ccggccatcagccgtaacatagcggcgagatgtccttcttgttccgtaaaagcgcgcccgtagccgcaggagatcgcgcgctccgtcaaggacccccctcgtcgccctcgacaccatgaccggcgcggcggcgcgaaggctcttgaggatgctgagaaaaacatacttacgtttaggcatacacttgctggtgaagtggaaccaaatcaagagcaggttctgcagatagcccttgagatttgcaaggagggtgttatttccttctttgttcagaatcttccttccttgggttgggagatatatattggagtcaagtagcttcgagttgtttttccagtaagttgaattgccaaacttcgatattgcttctgatgctctgaacaccttcaaggatttgctaaccaaacatgaagatcaagtctctgaattcctgagctcaaattatgaacagggtacaaaaatgcgatgctttaaggcacttcgctgcatgccagtttcgttcagagtttctgttagaggccccaaatgctcaatagtgaagagtttcattttcgaagttcgttacttaaacattatggtgggtcttctgaaggtattagagtataagttccctgcttatatttaaagaatcagcaatgatattgatcacccttctcatttcctctgtttcttgatttttcacttaagtagttatgacattttagtgccattatcttgtgaaaaatggcggttgttattagcacaatagatgagagatcctgctttggcttttggatatcttgccaagcaaaggtcatcctcagagactaagatatacgtgcagaactatactcttgcaattgttctttagtgactgccagagatccggccattcagatctaaatggctttctgtttatagctaaattgcatagcaccattgttcatgttgaatactaccattttatttctctgggctatttatgtattgcttgggtaccccagtcatcttgtatctaacagtgagtattcgagcagttctcatagtttctaatacaaaagtagttcaaatattccttcttaaatgaaatgacacgcaaatctcctgcgttgtttgagagaaaaaaagtagtccaaatatacacacttgccaactagccagtgctacaaattttcttcttttaagacaaatgatgaaaacaacacaggttagtcatagatagtttgttttcatcttcataactagtggccatctttttcatgctatacacattctttttttaatgcctctactaagtactacctccgttctcgaatatttgtcgtccgctagtttatttttgacctaaaacgtgacaaataaaaaagaacggagggagtactagccagtgtcttttgtaggattcaaccaaaaatatcaggatatgttccttgcacattttgaaggtatacgtttaccctttcggttttacgttggatagctgttggtttgaattaatcatagctttgcgtgagcactatgttgttgccattttttggaaggttcattttcactacgcggatgcaggtatttgttgccaatccaaacaaacctcgagagattatctcaggttttggctgacaatcacagagaactgttgaagctactccacaatctccccactagcaaaggtattactactgtattgcctaattctaacttaaccctaaccctattctgtgtccaagcaatcgatgctagtaatagagtaacagaatatgatgattggaactcgatgttaagatttctgagtgatgtgcattgaagcgctaataatgtgccccattttaattatcaaagaaatcgagaagcttgcgcggatgtcagtataaaccctcaggaaattcgaacatagctccttgatgttgatgttcaggaaccctttctcacctcaaagttctgaagacatcctgtgtaatgtgctgccctgtatggagcttgtttttcatatatggaaaaggtttggccacaaactgcattctccgtgtgaaacacttagcattcgtatcggaattcattgatttatgcacttgtagcagaattcgctgcaggaataaactgcactgtggtttggtgttggtaccatcgagaaaattgggtgagggtgtgtagtattttatatgagtaagattgtcatcaagtggatccatctgttgcaatgggtgtcgaggctgattatcttattttctctctcttattcttgctcttttctctctcttattcttcctctttttttctctctcttcatcttctttcttcctttcccttccccttcttctttcttcctcttctttcc

SEQ ID NO: 67342 - DNA, 1105 bp, Zea Mays
ccggccatcagccgtaacatagcggcgagatgtccttcttgttccgtaaaagcgcgcccgtagccgcaggagatcgcgcgctccgtcaaggacccccctcgtcgccctcgacaccatgaccggcgcggcggcgcgaaggcatacacttgctggtgaagtggaaccaaatcaagagcaggttctgcagatagcccttgagatttgcaaggagggtgttatttccttctttgttcagaatcttccttccttgggttgggaggatttgctaaccaaacatgaagatcaagtctctgaattcctgagctcaaattatgaacagggtacaaaaatgcgatgctttaaggcacttcgctgcatgccagtttcgttcagagtttctgttagaggccccaaatgctcaatagtgaagagtttcattttcgaagttcgttacttaaacattatggtgggtcttctgaaggattcaaccaaaaatatcaggatatgttccttgcacattttgaaggtatttgttgccaatccaaacaaacctcgagagattatctcaggttttggctgacaatcacagagaactgttgaagctactccacaatctccccactagcaaagaaatcgagaagcttgcgcggatgtcagtataaaccctcaggaaattcgaacatagctccttgatgttgatgttcaggaaccctttctcacctcaaagttctgaagacatcctgtgtaatgtgctgccctgtatggagcttgtttttcatatatggaaaaggtttggccacaaactgcattctccgtgtgaaacacttagcattcgtatcggaattcattgatttatgcacttgtagcagaattcgctgcaggaataaactgcactgtggtttggtgttggtaccatcgagaaaattgggtgagggtgtgtagtattttatatgagtaagattgtcatcaagtggatccatctgttgcaatgggtgtcgaggctgattatcttattttctctctcttattcttgctcttttctctctcttattcttcctctttttttctctctcttcatcttctttcttcctttcccttccccttcttctttcttcctcttctttcc

SEQ ID NO: 67343 - DNA, 4164 bp, Zea Mays
ccggccatcagccgtaacatagcggcgagatgtccttcttgttccgtaaaagcgcgcccgtagccgcaggagatcgcgcgctccgtcaaggacccccctcgtcgccctcgacaccatgaccggcgcggcggcgcgaagttataaagttaatcatgacagtgagatgacacttggtcttacttgttcaccacatgctcttgaggatgctgagaaaaacatacttacgtttaggcatacacttgctggtgaagtggaaccaaatcaagagcaggttctgcagatagcccttgagatttgcaaggagggtgttatttccttctttgttcagaatcttccttccttgggttgggaggtatgtttttttcttcttctgaaattcaggaggactgcatatcattgcattaatagaagaaagaaagggttgggaggtatgtatattcacaaattgagtgtgacaacctttttcactgtgttattagccttattggtgccccaacggatttcttccgtgtcttgtctccacgagaatagctatattcaacgttggctcgccaagcctatcacaacccttctcttcctttactagggcttcgaacctgctatgttgagacaacgtaggcggagttatgttgctccagtatattgaaaatcattttgatcttctggatttccttgttgtttggtaaggcctgtttctgaagttatgaattggattggaacacagggaattggagcatgctgattcgtttcttggctggaaatgggaatgcaattgcagaaatatatagataactgattgcttcctatggctatttatttttaccacttatatttgcatagttgtattattttgtgtgtttgtttgtgaaatgcatttgtagtatatgcaatagttttaccacttctacttgcattattttttttcctcaaacgcacaagagagttgcacatcattatattaagagaggagaaaaggtctaaagtggaccagagtacaaagcccggagtgcagaaaaaactggacgtaagcagtaagcaccatgaacctaacacccatgcctcctctccaacaacacaagagaagaaacataagcaaaggataaggcagacccgactagtctaaactgtagcactagaagtagccaagaccctatttaaggcaactgcaagcccaagactctcaagatgcttagcacccgccttatcccagcagatcaattaatctaaaaacagtcttttgacagtgctaatggaaggattcactccatcaaaaacaaccttgttacgaagaagccataagcaccaagcccctagaattatgacactattgaagccttttatcctgctcttatgcacttttttaagagcctttccccaccgcacagcaaaagagatctcatcaatatcaaaagtgagatcacccagtcccatgagcgacaaaatatgatgcaaaaactgtctagcaaaactgcaagtgcaaaggagatattgggttgtttcttgctcttgatcacataggggacacaccaggtattgcaatcctctcatttgaagtctatcaacagtccaacacttattccttattgacaaccaaaggaaaaacttgcattttgagggagcccaagtcttccacaatcttttcgatggctcaaatgaaatggaacccatgaagaaggctgtatagcaggacttgcattatttttgtgtgtttgtctatgaactgctcctgtagtatatgccattgtaatactcctgcgcctgactgatttaactatgttttaccagctacaagaacttggaagtaaggtttggaatatttgttcaactatattttcttttcttagtggatctgcaatagcatacagtttccagcatatatgccttcgcctgacatctgtttttttagaacctctggccctttgtagttgcatgcatggacagatatagtacataatgcattcgctaaaacaagcagtcatggaaatgtactctgtagtatgcagatgttagattttgcaaaaaaaactaaagcaaacaaacaaataaatgagttagttaattttgcaaatgattatgttttcatacatttgattttatactgctctttcagatatatattggagtcaagtagcttcgagttgtttttccagtaagttgaattgccaaacttcgatattgcttctgatgctctgaacaccttcaaggatttgctaaccaaacatgaagatcaagtctctgaattcctgagctcaaattatgaacaggtcagccaaataatacctttatgtagaacgaatgaaattcataattttaatgtttattccaaataattaagaggaccaatagttttgctccaccctgtcccttgcattttgtatcttcctccgtgtcatcttttgcataggttggtttggcttttaatgaataattgttcttttgtattgctaaagttttgaagcgccgatccattgtaaacatgcgcagtttttactctacacaaagacaatcggtgaaggttagactatttaaattgcaatttcttgtagggtacaaaaatgcgatgctttaaggcacttcgctgcatgccagtttcgttcagagtttctgttagaggccccaaatgctcaatagtgaagagtttcattttcgaagttcgttacttaaacattatggtgggtcttctgaaggtattagagtataagttccctgcttatatttaaagaatcagcaatgatattgatcacccttctcatttcctctgtttcttgatttttcacttaagtagttatgacattttagtgccattatcttgtgaaaaatggcggttgttattagcacaatagatgagagatcctgctttggcttttggatatcttgccaagcaaaggtcatcctcagagactaagatatacgtgcagaactatactcttgcaattgttctttagtgactgccagagatccggccattcagatctaaatggctttctgtttatagctaaattgcatagcaccattgttcatgttgaatactaccattttatttctctgggctatttatgtattgcttgggtaccccagtcatcttgtatctaacagtgagtattcgagcagttctcatagtttctaatacaaaagtagttcaaatattccttcttaaatgaaatgacacgcaaatctcctgcgttgtttgagagaaaaaaagtagtccaaatatacacacttgccaactagccagtgctacaaattttcttcttttaagacaaatgatgaaaacaacacaggttagtcatagatagtttgttttcatcttcataactagtggccatctttttcatgctatacacattctttttttaatgcctctactaagtactacctccgttctcgaatatttgtcgtccgctagtttatttttgacctaaaacgtgacaaataaaaaagaacggagggagtactagccagtgtcttttgtaggattcaaccaaaaatatcaggatatgttccttgcacattttgaaggtatttgttgccaatccaaacaaacctcgagagattatctcaggttttggctgacaatcacagagaactgttgaagctactccacaatctccccactagcaaaggtattactactgtattgcctaattctaacattttaattatcaaagaaatcgagaagcttgcgcggatgtcagtataaaccctcaggaaattcgaacatagctccttgatgttgatgttcaggaaccctttctcacctcaaagttctgaagacatcctgtgtaatgtgctgccctgtatggagcttgtttttcatatatggaaaaggtttggccacaaactgcattctccgtgtgaaacacttagcattcgtatcggaattcattgatttatgcacttgtagcagaattcgctgcaggaataaactgcactgtggtttggtgttggtaccatcgagaaaattgggtgagggtgtgtagtattttatatgagtaagattgtcatcaagtggatccatctgttgcaatgggtgtcgaggctgattatcttattttctctctcttattcttgctcttttctctctcttattcttcctctttttttctctctcttcatcttctttcttcctttcccttccccttcttctttcttcctcttctttcc

SEQ ID NO: 67344 - DNA, 4119 bp, Zea Mays
ccggccatcagccgtaacatagcggcgagatgtccttcttgttccgtaaaagcgcgcccgtagccgcaggagatcgcgcgctccgtcaaggacccccctcgtcgccctcgacaccatgaccggcgcggcggcgcgaagttataaagttaatcatgacagtgagatgacacttggtcttacttgttcaccacatgctcttgaggatgctgagaaaaacatacttacgtttaggcatacacttgctggtgaagtggaaccaaatcaagagcaggttctgcagatagcccttgagatttgcaaggagggtgttatttccttctttgttcagaatcttccttccttgggttgggaggtatgtttttttcttcttctgaaattcaggaggactgcatatcattgcattaatagaagaaagaaagggttgggaggtatgtatattcacaaattgagtgtgacaacctttttcactgtgttattagccttattggtgccccaacggatttcttccgtgtcttgtctccacgagaatagctatattcaacgttggctcgccaagcctatcacaacccttctcttcctttactagggcttcgaacctgctatgttgagacaacgtaggcggagttatgttgctccagtatattgaaaatcattttgatcttctggatttccttgttgtttggtaaggcctgtttctgaagttatgaattggattggaacacagggaattggagcatgctgattcgtttcttggctggaaatgggaatgcaattgcagaaatatatagataactgattgcttcctatggctatttatttttaccacttatatttgcatagttgtattattttgtgtgtttgtttgtgaaatgcatttgtagtatatgcaatagttttaccacttctacttgcattattttttttcctcaaacgcacaagagagttgcacatcattatattaagagaggagaaaaggtctaaagtggaccagagtacaaagcccggagtgcagaaaaaactggacgtaagcagtaagcaccatgaacctaacacccatgcctcctctccaacaacacaagagaagaaacataagcaaaggataaggcagacccgactagtctaaactgtagcactagaagtagccaagaccctatttaaggcaactgcaagcccaagactctcaagatgcttagcacccgccttatcccagcagatcaattaatctaaaaacagtcttttgacagtgctaatggaaggattcactccatcaaaaacaaccttgttacgaagaagccataagcaccaagcccctagaattatgacactattgaagccttttatcctgctcttatgcacttttttaagagcctttccccaccgcacagcaaaagagatctcatcaatatcaaaagtgagatcacccagtcccatgagcgacaaaatatgatgcaaaaactgtctagcaaaactgcaagtgcaaaggagatattgggttgtttcttgctcttgatcacataggggacacaccaggtattgcaatcctctcatttgaagtctatcaacagtccaacacttattccttattgacaaccaaaggaaaaacttgcattttgagggagcccaagtcttccacaatcttttcgatggctcaaatgaaatggaacccatgaagaaggctgtatagcaggacttgcattatttttgtgtgtttgtctatgaactgctcctgtagtatatgccattgtaatactcctgcgcctgactgatttaactatgttttaccagctacaagaacttggaagtaaggtttggaatatttgttcaactatattttcttttcttagtggatctgcaatagcatacagtttccagcatatatgccttcgcctgacatctgtttttttagaacctctggccctttgtagttgcatgcatggacagatatagtacataatgcattcgctaaaacaagcagtcatggaaatgtactctgtagtatgcagatgttagattttgcaaaaaaaactaaagcaaacaaacaaataaatgagttagttaattttgcaaatgattatgttttcatacatttgattttatactgctctttcagatatatattggagtcaagtagcttcgagttgtttttccagtaagttgaattgccaaacttcgatattgcttctgatgctctgaacaccttcaaggatttgctaaccaaacatgaagatcaagtctctgaattcctgagctcaaattatgaacaggtcagccaaataatacctttatgtagaacgaatgaaattcataattttaatgtttattccaaataattaagaggaccaatagttttgctccaccctgtcccttgcattttgtatcttcctccgtgtcatcttttgcataggttggtttggcttttaatgaataattgttcttttgtattgctaaagttttgaagcgccgatccattgtaaacatgcgcagtttttactctacacaaagacaatcggtgaaggttagactatttaaattgcaatttcttgtagggtacaaaaatgcgatgctttaaggcacttcgctgcatgccagtttcgttcagagtttctgttagaggccccaaatgctcaatagtgaagagtttcattttcgaagttcgttacttaaacattatggtgggtcttctgaaggtattagagtataagttccctgcttatatttaaagaatcagcaatgatattgatcacccttctcatttcctctgtttcttgatttttcacttaagtagttatgacattttagtgccattatcttgtgaaaaatggcggttgttattagcacaatagatgagagatcctgctttggcttttggatatcttgccaagcaaaggtcatcctcagagactaagatatacgtgcagaactatactcttgcaattgttctttagtgactgccagagatccggccattcagatctaaatggctttctgtttatagctaaattgcatagcaccattgttcatgttgaatactaccattttatttctctgggctatttatgtattgcttgggtaccccagtcatcttgtatctaacagtgagtattcgagcagttctcatagtttctaatacaaaagtagttcaaatattccttcttaaatgaaatgacacgcaaatctcctgcgttgtttgagagaaaaaaagtagtccaaatatacacacttgccaactagccagtgctacaaattttcttcttttaagacaaatgatgaaaacaacacaggttagtcatagatagtttgttttcatcttcataactagtggccatctttttcatgctatacacattctttttttaatgcctctactaagtactacctccgttctcgaatatttgtcgtccgctagtttatttttgacctaaaacgtgacaaataaaaaagaacggagggagtactagccagtgtcttttgtaggattcaaccaaaaatatcaggatatgttccttgcacattttgaaggtatttgttgccaatccaaacaaacctcgagagattatctcaggttttggctgacaatcacagagaactgttgaagctactccacaatctccccactagcaaagaaatcgagaagcttgcgcggatgtcagtataaaccctcaggaaattcgaacatagctccttgatgttgatgttcaggaaccctttctcacctcaaagttctgaagacatcctgtgtaatgtgctgccctgtatggagcttgtttttcatatatggaaaaggtttggccacaaactgcattctccgtgtgaaacacttagcattcgtatcggaattcattgatttatgcacttgtagcagaattcgctgcaggaataaactgcactgtggtttggtgttggtaccatcgagaaaattgggtgagggtgtgtagtattttatatgagtaagattgtcatcaagtggatccatctgttgcaatgggtgtcgaggctgattatcttattttctctctcttattcttgctcttttctctctcttattcttcctctttttttctctctcttcatcttctttcttcctttcccttccccttcttctttcttcctcttctttcc

SEQ ID NO: 67345 - DNA, 3263 bp, Zea Mays
ccggccatcagccgtaacatagcggcgagatgtccttcttgttccgtaaaagcgcgcccgtagccgcaggagatcgcgcgctccgtcaaggacccccctcgtcgccctcgacaccatgaccggcgcggcggcgcgaagttataaagttaatcatgacagtgagatgacacttggtcttacttgttcaccacatgtataagttagcagttgtgatctttttgcaacatatcattgatctttgacatacaacaactgcaagagccagatcacttccgaatctgcacttctctcatgttcttttcaacactgttcgcatggaaatagataattagatatgtatgttgagccagctttaagtgagaacctgtttacttatttaatttacagttttagttgttctctggttgatgtgtagcccctgtatagatttcttgtgcactgagcagtgaacaccatggtacaaaaaacatgttgctcatgaatttgtgcatgctcctgttaggctcttgaggatgctgagaaaaacatacttacgtttaggcatacacttgctggtgaagtggaaccaaatcaagagcaggttctgcagatagcccttgagatttgcaaggagggtgttatttccttctttgttcagaatcttccttccttgggttgggaggtatgtttttttcttcttctgaaattcaggaggactgcatatcattgcattaatagaagaaagaaagggttgggaggtatgtatattcacaaattgagtgtgacaacctttttcactgtgttattagccttattggtgccccaacggatttcttccgtgtcttgtctccacgagaatagctatattcaacgttggctcgccaagcctatcacaacccttctcttcctttactagggcttcgaacctgctatgttgagacaacgtaggcggagttatgttgctccagtatattgaaaatcattttgatcttctggatttccttgttgtttggtaaggcctgtttctgaagttatgaattggattggaacacagggaattggagcatgctgattcgtttcttggctggaaatgggaatgcaattgcagaaatatatagataactgattgcttcctatggctatttatttttaccacttatatttgcatagttgtattattttgtgtgtttgtttgtgaaatgcatttgtagtatatgcaatagttttaccacttctacttgcattattttttttcctcaaacgcacaagagagttgcacatcattatattaagagaggagaaaaggtctaaagtggaccagagtacaaagcccggagtgcagaaaaaactggacgtaagcagtaagcaccatgaacctaacacccatgcctcctctccaacaacacaagagaagaaacataagcaaaggataaggcagacccgactagtctaaactgtagcactagaagtagccaagaccctatttaaggcaactgcaagcccaagactctcaagatgcttagcacccgccttatcccagcagatcaattaatctaaaaacagtcttttgacagtgctaatggaaggattcactccatcaaaaacaaccttgttacgaagaagccataagcaccaagcccctagaattatgacactattgaagccttttatcctgctcttatgcacttttttaagagcctttccccaccgcacagcaaaagagatctcatcaatatcaaaagtgagatcacccagtcccatgagcgacaaaatatgatgcaaaaactgtctagcaaaactgcaagtgcaaaggagatattgggttgtttcttgctcttgatcacataggggacacaccaggtattgcaatcctctcatttgaagtctatcaacagtccaacacttattccttattgacaaccaaaggaaaaacttgcattttgagggagcccaagtcttccacaatcttttcgatggctcaaatgaaatggaacccatgaagaaggctgtatagcaggacttgcattatttttgtgtgtttgtctatgaactgctcctgtagtatatgccattgtaatactcctgcgcctgactgatttaactatgttttaccagctacaagaacttggaagtaaggtttggaatatttgttcaactatattttcttttcttagtggatctgcaatagcatacagtttccagcatatatgccttcgcctgacatctgtttttttagaacctctggccctttgtagttgcatgcatggacagatatagtacataatgcattcgctaaaacaagcagtcatggaaatgtactctgtagtatgcagatgttagattttgcaaaaaaaactaaagcaaacaaacaaataaatgagttagttaattttgcaaatgattatgttttcatacatttgattttatactgctctttcagatatatattggagtcaagtagcttcgagttgtttttccagtaagttgaattgccaaacttcgatattgcttctgatgctctgaacaccttcaaggatttgctaaccaaacatgaagatcaagtctctgaattcctgagctcaaattatgaacaggtatttgttgccaatccaaacaaacctcgagagattatctcaggttttggctgacaatcacagagaactgttgaagctactccacaatctccccactagcaaaggtattactactgtattgcctaattctaacttaaccctaaccctattctgtgtccaagcaatcgatgctagtaatagagtaacagaatatgatgattggaactcgatgttaagatttctgagtgatgtgcattgaagcgctaataatgtgccccattttaattatcaaagaaatcgagaagcttgcgcggatgtcagtataaaccctcaggaaattcgaacatagctccttgatgttgatgttcaggaaccctttctcacctcaaagttctgaagacatcctgtgtaatgtgctgccctgtatggagcttgtttttcatatatggaaaagaattcgctgcaggaataaactgcactgtggtttggtgttggtaccatcgagaaaattgggtgagggtgtgtagtattttatatgagtaagattgtcatcaagtggatccatctgttgcaatgggtgtcgaggctgattatcttattttctctctcttattcttgctcttttctctctcttattcttcctctttttttctctctcttcatcttctttcttcctttcccttccccttcttctttcttcctcttctttcc

SEQ ID NO: 67346 - DNA, 4189 bp, Zea Mays
ccggccatcagccgtaacatagcggcgagatgtccttcttgttccgtaaaagcgcgcccgtagccgcaggagatcgcgcgctccgtcaaggacccccctcgtcgccctcgacaccatgaccggcgcggcggcgcgaagttataaagttaatcatgacagtgagatgacacttggtcttacttgttcaccacatgtataagttagcagttgtgatctttttgcaacatatcattgatctttgacatacaacaactgcaagagccagatcacttccgaatctgcacttctctcatgttcttttcaacactgttcgcatggaaatagataattagatatgtatgttgagccagctttaagtgagaacctgtttacttatttaatttacagttttagttgttctctggttgatgtgtagcccctgtatagatttcttgtgcactgagcagtgaacaccatggtacaaaaaacatgttgctcatgaatttgtgcatgctcctgttaggctcttgaggatgctgagaaaaacatacttacgtttaggcatacacttgctggtgaagtggaaccaaatcaagagcaggttctgcagatagcccttgagatttgcaaggagggtgttatttccttctttgttcagaatcttccttccttgggttgggaggtatgtttttttcttcttctgaaattcaggaggactgcatatcattgcattaatagaagaaagaaagggttgggaggtatgtatattcacaaattgagtgtgacaacctttttcactgtgttattagccttattggtgccccaacggatttcttccgtgtcttgtctccacgagaatagctatattcaacgttggctcgccaagcctatcacaacccttctcttcctttactagggcttcgaacctgctatgttgagacaacgtaggcggagttatgttgctccagtatattgaaaatcattttgatcttctggatttccttgttgtttggtaaggcctgtttctgaagttatgaattggattggaacacagggaattggagcatgctgattcgtttcttggctggaaatgggaatgcaattgcagaaatatatagataactgattgcttcctatggctatttatttttaccacttatatttgcatagttgtattattttgtgtgtttgtttgtgaaatgcatttgtagtatatgcaatagttttaccacttctacttgcattattttttttcctcaaacgcacaagagagttgcacatcattatattaagagaggagaaaaggtctaaagtggaccagagtacaaagcccggagtgcagaaaaaactggacgtaagcagtaagcaccatgaacctaacacccatgcctcctctccaacaacacaagagaagaaacataagcaaaggataaggcagacccgactagtctaaactgtagcactagaagtagccaagaccctatttaaggcaactgcaagcccaagactctcaagatgcttagcacccgccttatcccagcagatcaattaatctaaaaacagtcttttgacagtgctaatggaaggattcactccatcaaaaacaaccttgttacgaagaagccataagcaccaagcccctagaattatgacactattgaagccttttatcctgctcttatgcacttttttaagagcctttccccaccgcacagcaaaagagatctcatcaatatcaaaagtgagatcacccagtcccatgagcgacaaaatatgatgcaaaaactgtctagcaaaactgcaagtgcaaaggagatattgggttgtttcttgctcttgatcacataggggacacaccaggtattgcaatcctctcatttgaagtctatcaacagtccaacacttattccttattgacaaccaaaggaaaaacttgcattttgagggagcccaagtcttccacaatcttttcgatggctcaaatgaaatggaacccatgaagaaggctgtatagcaggacttgcattatttttgtgtgtttgtctatgaactgctcctgtagtatatgccattgtaatactcctgcgcctgactgatttaactatgttttaccagctacaagaacttggaagtaaggtttggaatatttgttcaactatattttcttttcttagtggatctgcaatagcatacagtttccagcatatatgccttcgcctgacatctgtttttttagaacctctggccctttgtagttgcatgcatggacagatatagtacataatgcattcgctaaaacaagcagtcatggaaatgtactctgtagtatgcagatgttagattttgcaaaaaaaactaaagcaaacaaacaaataaatgagttagttaattttgcaaatgattatgttttcatacatttgattttatactgctctttcagatatatattggagtcaagtagcttcgagttgtttttccagtaagttgaattgccaaacttcgatattgcttctgatgctctgaacaccttcaagggatttgctaaccaaacatgaagatcaagtctctgaattcctgagctcaaattatgaacagggtacaaaaatgcgatgctttaaggcacttcgctgcatgccagtttcgttcagagtttctgttagaggccccaaatgctcaatagtgaagagtttcattttcgaagttcgttacttaaacattatggtgggtcttctgaaggtattagagtataagttccctgcttatatttaaagaatcagcaatgatattgatcacccttctcatttcctctgtttcttgatttttcacttaagtagttatgacattttagtgccattatcttgtgaaaaatggcggttgttattagcacaatagatgagagatcctgctttggcttttggatatcttgccaagcaaaggtcatcctcagagactaagatatacgtgcagaactatactcttgcaattgttctttagtgactgccagagatccggccattcagatctaaatggctttctgtttatagctaaattgcatagcaccattgttcatgttgaatactaccattttatttctctgggctatttatgtattgcttgggtaccccagtcatcttgtatctaacagtgagtattcgagcagttctcatagtttctaatacaaaagtagttcaaatattccttcttaaatgaaatgacacgcaaatctcctgcgttgtttgagagaaaaaaagtagtccaaatatacacacttgccaactagccagtgctacaaattttcttcttttaagacaaatgatgaaaacaacacaggttagtcatagatagtttgttttcatcttcataactagtggccatctttttcatgctatacacattctttttttaatgcctctactaagtactacctccgttctcgaatatttgtcgtccgctagtttatttttgacctaaaacgtgacaaataaaaaagaacggagggagtactagccagtgtcttttgtaggattcaaccaaaaatatcaggatatgttccttgcacattttgaaggtatacgtttaccctttcggttttacgttggatagctgttggtttgaattaatcatagctttgcgtgagcactatgttgttgccattttttggaaggttcattttcactacgcggatgcaggtatttgttgccaatccaaacaaacctcgagagattatctcaggttttggctgacaatcacagagaactgttgaagctactccacaatctccccactagcaaagaaatcgagaagcttgcgcggatgtcagtataaaccctcaggaaattcgaacatagctccttgatgttgatgttcaggaaccctttctcacctcaaagttctgaagacatcctgtgtaatgtgctgccctgtatggagcttgtttttcatatatggaaaagaattcgctgcaggaataaactgcactgtggtttggtgttggtaccatcgagaaaattgggtgagggtgtgtagtattttatatgagtaagattgtcatcaagtggatccatctgttgcaatgggtgtcgaggctgattatcttattttctctctcttattcttgctcttttctctctcttattcttcctctttttttctctctcttcatcttctttcttcctttcccttccccttcttctttcttcctcttctttcc

SEQ ID NO: 67347 - DNA, 2630 bp, Zea Mays
ccggccatcagccgtaacatagcggcgagatgtccttcttgttccgtaaaagcgcgcccgtagccgcaggagatcgcgcgctccgtcaaggacccccctcgtcgccctcgacaccatgaccggcgcggcggcgcgaagttataaagttaatcatgacagtgagatgacacttggtcttacttgttcaccacatgctcttgaggatgctgagaaaaacatacttacgtttaggcatacacttgctggtgaagtggaaccaaatcaagagcaggttctgcagatagcccttgagatttgcaaggagggtgttatttccttctttgttcagaatcttccttccttgggttgggagggcttcgaacctgctatgttgagacaacgtaggcggagttatgttgctccagtatattgaaaatcattttgatcttctggatttccttgttgtttggtaaggcctgtttctgaagttatgaattggattggaacacagggaattggagcatgctgattcgtttcttggctggaaatgggaatgcaattgcagaaatatatagataactgattgcttcctatggctatttatttttaccacttatatttgcatagttgtattattttgtgtgtttgtttgtgaaatgcatttgtagtatatgcaatagttttaccacttctacttgcattattttttttcctcaaacgcacaagagagttgcacatcattatattaagagaggagaaaaggtctaaagtggaccagagtacaaagcccggagtgcagaaaaaactggacgtaagcagtaagcaccatgaacctaacacccatgcctcctctccaacaacacaagagaagaaacataagcaaaggataaggcagacccgactagtctaaactgtagcactagaagtagccaagaccctatttaaggcaactgcaagcccaagactctcaagatgcttagcacccgccttatcccagcagatcaattaatctaaaaacagtcttttgacagtgctaatggaaggattcactccatcaaaaacaaccttgttacgaagaagccataagcaccaagcccctagaattatgacactattgaagccttttatcctgctcttatgcacttttttaagagcctttccccaccgcacagcaaaagagatctcatcaatatcaaaagtgagatcacccagtcccatgagcgacaaaatatgatgcaaaaactgtctagcaaaactgcaagtgcaaaggagatattgggttgtttcttgctcttgatcacataggggacacaccaggtattgcaatcctctcatttgaagtctatcaacagtccaacacttattccttattgacaaccaaaggaaaaacttgcattttgagggagcccaagtcttccacaatcttttcgatggctcaaatgaaatggaacccatgaagaaggctgtatagcaggacttgcattatttttgtgtgtttgtctatgaactgctcctgtagtatatgccattgtaatactcctgcgcctgactgatttaactatgttttaccagctacaagaacttggaagtaaggtttggaatatttgttcaactatattttcttttcttagtggatctgcaatagcatacagtttccagcatatatgccttcgcctgacatctgtttttttagaacctctggccctttgtagttgcatgcatggacagatatagtacataatgcattcgctaaaacaagcagtcatggaaatgtactctgtagtatgcagatgttagattttgcaaaaaaaactaaagcaaacaaacaaataaatgagttagttaattttgcaaatgattatgttttcatacatttgattttatactgctctttcagatatatattggagtcaagtagcttcgagttgtttttccagtaagttgaattgccaaacttcgatattgcttctgatgctctgaacaccttcaaggatttgctaaccaaacatgaagatcaagtctctgaattcctgagctcaaattatgaacaggtatttgttgccaatccaaacaaacctcgagagattatctcaggttttggctgacaatcacagagaactgttgaagctactccacaatctccccactagcaaagaaatcgagaagcttgcgcggatgtcagtataaaccctcaggaaattcgaacatagctccttgatgttgatgttcaggaaccctttctcacctcaaagttctgaagacatcctgtgtaatgtgctgccctgtatggagcttgtttttcatatatggaaaaggtttggccacaaactgcattctccgtgtgaaacacttagcattcgtatcggaattcattgatttatgcacttgtagcagaattcgctgcaggaataaactgcactgtggtttggtgttggtaccatcgagaaaattgggtgagggtgtgtagtattttatatgagtaagattgtcatcaagtggatccatctgttgcaatgggtgtcgaggctgattatcttattttctctctcttattcttgctcttttctctctcttattcttcctctttttttctctctcttcatcttctttcttcctttcccttccccttcttctttcttcctcttctttcc

SEQ ID NO: 67348 - DNA, 867 bp, Zea Mays
ccggccatcagccgtaacatagcggcgagatgtccttcttgttccgtaaaagcgcgcccgtagccgcaggagatcgcgcgctccgtcaaggacccccctcgtcgccctcgacaccatgaccggcgcggcggcgcgaagttataaagttaatcatgacagtgagatgacacttggtcttacttgttcaccacatgctcttgaggatgctgagaaaaacatacttacgtttaggcatacacttgctggtgaagtggaaccaaatcaagagcaggttctgcagatagcccttgagatttgcaaggagggtgttatttccttctttgttcagaatcttccttccttgggttgggaggatttgctaaccaaacatgaagatcaagtctctgaattcctgagctcaaattatgaacaggtatttgttgccaatccaaacaaacctcgagagattatctcaggttttggctgacaatcacagagaactgttgaagctactccacaatctccccactagcaaagaaatctataagaaggattacatacttcagatgctcagtggtggacaatgtatccaatattcagccggttagtttgtattcagcatgatagtagtcggctagatatttgtaaacagttagtagtgtaatgtgttacgattattttcacttccttcgatgtggtcctttccaagtgtaatgtgttttcgattttagattagatgtggtatatatatccgcatgtgcaatgttagaaaccagcacgtatatttattttgggaatattatacaatgtagaggctaagttgttttgaagactttattctattctaattatattcaaaggtgattagaattgaaataaattttagtt

SEQ ID NO: 67349 - DNA, 954 bp, Zea Mays
cggggtcatcagctgctcttgcctcttggcccgatcatttcatttccccacctctctaaaaccctcgctcttgcccgctgttttacacctaaaagaaaggtcctcgccgtcgagccgccggctcccatctcccgcgccgtcgccgacgaggacacaccagacgcctcgctgatggccttggctcgcctcggacggtctcttgccggccgcctccaccgttctatctaccgtccaccggcgcccacagactaccatgcctccgtttcccgacccttcgctccgacccacacaggcgtatgcgtacgaggttttgcaagcttgacgtacaatgccagcagcatgattggccacaatctcgaggggccgttgccagtccacattgtgaaggttctggatctcgtagtacatatgaatcatgctagaccgatgtcaacagcagcagcatcaaaggtgcctgttggagcccggaagatggtttacactaagtggctggagaaggacaaaggaggacatcattttggagatgaagaacgcatatgctgtttcaaggctgaggaagaaaactgggtataccaaaaatcaattctacgatcaagcattaaaaatatacaaggaggttaacactttgatggcacatggagacacatcatcgcttcggaaaattctgacagagaggatgcattctactataaaaaatgaactaaagagaagacagtccatgtggaattctgtacactgggaactggtggagcctgctgttagtatcagaactttgagggctcgcatgattggcctcgataagaatgacctggataaagcttttatacagcttacacttgagtttgttaccaaacagaaatttgaagcctataattcaaagggtgcagttgtgtctggagacaagtcgaaggagggtgctttggggccactggccacagtagctgtaacagggct

SEQ ID NO: 67350 - DNA, 1092 bp, Zea Mays
tggtagcacaatgctccatcactgctgaaatcaacctagtatgaagaacgcatatgctgtttcaaggctgaggaagaaaactgggtataccaaaaatcaattctacgatcaagcattaaaaatatacaaggaggttaacactttgatggcacatggagacacatcatcgcttcggaaaattctgacagagaggatgcattctactataaaaaatgaactaaagagaagacagtccatgtggaattctgtacactgggaactggtggagcctgctgttagtatcagaactttgagggctcgcatgattggcctcgataagaatgacctggataaagcttttatacagcttacacttgagtttgttaccaaacagaaatttgaagcctataattcaaagggtgcagttgtgtctggagacaagtcgaaggaggtacttgtgaaagacatttgggtgtttgagaggtccctttttcaccccggagcatattggcgtgtatgcggaagaattacactgtaaccatatctgttttggtgtccacgttcaatttctcaccctggagctgaacaagagctagttcaataaaattttgccctgaactcctttttttttcatccggttctaactgatgcctaacagggtctatgcagtgatgtagtatttatgcctttcttctttgtgttttttattagcagaaaatacaggttttctatttatgcttttgttagagaactagctcttggagagggggcatattgaccccatttggaagggtttgcatctcagcagcagcaggtatcagaattgagaatactgcctaatgtgctcgacaagtaaaagctggatctcttttgtctatggcactttcatgctattcatacgcggtcttctcctgcattggcattgcaaatctccgtttaattaaatttctggtggttatagtaaggctacaggaaaccttccatggccaggcacctctgtgtaactgtcacgtgacctggctctcactattctgaacattcatcttgtgctgactgctgaacgcctgggctctgttcagcgactgatgtaacacatcgtattttggagaaggc

SEQ ID NO: 67351 - DNA, 1175 bp, Zea Mays
cgagctcggatatgtaacagcaaagtatgtctagctcagtcggtagagtgcaagacttttaactttgaggttgtgggttcaagctccatcgtggacgtatttttttatcactaatttgtttttttgttgtctatatttttcgtttatgtcgctgatttgtccgtctagatttatttttcatctagtttttttgtttttgtgaccgatttatttattcatctagatattttttttgtttttgtttttgtttattcaaactgcgtgacgcaagtaccatgcacataagtaacccaccctatggaagtacaaagtactttataaaatcatcaagtcactgtttatttataccggactctaattataatctttttgtttattaagtatatttatattttggactctaaaactccaataatctaatgtattcgaaattatactttttaatattaattaaaatttatcattgtacatcactactaatgtaagattaacacaatcatttgtttatgatataaatatttttaacattttaaatggtgtacttctgtttttagtatattatttaatgtttaaaatcacttgtaattagcgagaggacggaatcaagcttaagcatgtggggtttacaatgcaccaagggccagacggattattcagtactattaaacaaaatgtaataaataaatcagtcgcaaaagcaaaaacaaatcaagatgagaaataaatttggacggacaaatcagcggcataaacgaaaaaaccacgatgcaccatagctaaaccggtggccgctaaccaatgtaagtacgtttccttaagcttaataaacgaaaaaaatatgcacggataaataaatcagtcacaaaaacaaaaaatctggataagaaataaatctagacggacaaatcagcgacataaacgaaaaatctggacaacaaaaaaatcagtgtcaaagacaaaaaaaaaagtatgaaaacatgcctatcatggggcttgaacccacaaccacaaggttaaaagccttgagctctaccaactgagctagacaagttttgtgtacataatagagctcggcgccaagatctatggcgccgagctcggttccatgtcggtgccacgtcggtgccacgatgtccgtttgtgccagcgtaacacgcacctcggcgccatagcct

SEQ ID NO: 67352 - DNA, 2201 bp, Zea Mays
gattttctcagccgggaccatgtttcggtctcttcttaatataataccgggagggcggtctttccctccccggctgagtttttttttcctttggaaggggcggaaatgcgttcaaggagggcactgcagggttagttgggagcgagtctgcaggcccttggagctcggtggacttggtgttcataatttggaagcgctaggctggtctttgaatatgcgttggttatggtacaagacaaggacggagggaccatggagagaattgcagatttctatatattaaagcagggctcgtcgctccccagacaaggtggccacgtagtgcagatttcaagagccgttagatgaatatcctaccgtagagttggccgagtctctcaaaagtgctccagtctggtagaagcgccagtaagtttgagaggagacagtcagatggcggcaggtggccttggcatcatgatcgctttacctggagcgttgaaggcactcactagcagatgcgtggaggcagctgcaccgaaattcctagggacgtggatgagcttccttctgctatccgttcttccatcccctacgatgtcagctataaggatacacagctgcaccgaaattcctagggacgtggatgagcttccttctgctatccgttcttccatcccctacgatgtcacctatgaggaggaagaatgttggtcaaagatctatgactagaaatgatggagaggccactattgttgcatcgtcagtgcgtggtcagagaggggaagattttggcatggtggatcgtcatcgtctccaactgcaagtttaggaatcatgagaaaaactgaaagtagtgtagctatatgtacttagttatatacaaggattgagggaggtcgtgccttaagtgctccagatcaaattgatgttgcctcccctttcacaacaagccaccaaacgatgatggctttcttggtccgggcgttgccttaagtgctccagatcaattttttggttgttcctttgttccttagtaattatattcttctcttttctattacagtgtgcttatttgcaaactaggtatacaaagaaagtaaaaacatgcatgtatcaggtaattactacagaaaatttatcaaccccaactgttacaactttaaattaaatagatttatgttcctgtcaatccacaacatatgctgcagaaaatgtacatgtttatcatctattctattcagcttattttctcttaaaaatatatctagaatactgctattatattatgcgcgcggtggcgagcgcaagtgactagttaatgttcatccaaatgcagcagctctctttgctgcctcggtggtgacaactattgaagatggcgctaatactttttttctggacatacttatggctgcatggagccatggacagtccctctccatccttgctcctactctggttggagcagttcccaaacgtttggttagaaagagaacagtccaggaggctctgcaacattcactttggattggtgacatccaaggacagttgtcggtcttaagcgattttctctggctttgggatgtgctacatggcttttaacttcaaccaggagtggcggatcaccactcctggagtctgactgcttcggggtcttattcctctagatcggcctaccaggcctttttcatgggggcgataagttttgacccggctagcgaattggcacagctgggcccctccgagatgtcgtttcttcatgtggttggctgctttagaaaggtgttagactgcagatagactagcccgtagaggattggatcatccagaatgttgtgtgttgtgcgatcaggaggaggaagatatcaaccatctgttaattaggtgtcttctcaaggacggtctggtttgaagtgcttaacctgattcatctcccacaattgagtcctgggccagaggatcacctgctgcaggattggtggcgagaggtggagagtagggtgccaaagattcaaaggaagggcataaactctttagttatcgtagtagcttggtgtatttgaaaagtgttcctgttgctgttcagaacataaaggatgaggctgaaatttggtgcagggctgatgccaagggacttgcggccatctggccaggctagagtggtgtgtctggtcgtgttttctctgtgtaacaagtgctcgctactgtgtctgtttctg

SEQ ID NO: 67353 - DNA, 1959 bp, Zea Mays
ctccatattcgcaaagcaacgttgcttcagtctcagatcagctagtaatttcgagcaacagatccagcaaggactagcagaaagcagcctgtaaattctagccaccgggaaactgggcaaacgctgccaatcattgaagccatcactggatatgtgtgtccatctccatcatcacaaacaagagccacgcagtcggcacacacacagagacaagtcactgtctcgaagtgtcggtttcgaactcgaacagggcaggtgctcgccgtccctcttttactagccttcggaaagcgcggcctgtgtctccggcctttgccacttccacagggagtccggggccatgcagagctccgtaaagctcgcggtgcttgctcttctgctagcggcagcagctcaccacggtctgctgccgctgccgacggcgcgatgctactggctcaacccggagatctacgacgccggcgggctgagccgccgcgcgttcccggacggcttcgtcttcgggacggccgcgtcggcgtaccaggtcgaggggatggccaagcacggcgggcggggccccagcatctgggacgccttcatagaggttcccgggaccatccctaacaatgccaccgctgacgtgacggtcgacgagtatcatcggtacaaggaagatgtgaacataatgaagaacatgggctttgatgcgtaccgattttcgatctcttggtcgaggattttcccagatggaactggcaaggtaaaccaggaaggagtggattactacaacaggctcatagattacatgctccagcaaggtatcgcgccgtatgcaaatctctaccattatgacctcccattggcactccatgaacagtacctgggctggcttagcccaaagattgtggaggcgtttgcagactacgccgagttctgcttccacgcgttcggagacagggtgaagaactggtttaccttcaacgagccgagctgctgtcaggcgataccgcgacaagtatcagcttcaccagaaggggaagattggaattctcctggatttcgtgtggtacgaacctttcagcgacagcaatgcggaccaggctgcagcacagcgagccagggacttccacctaggctggttccttgaccccattgtacatggacggtacccgtactcgatgcaagagattgccaaagacaggctaccgttgttcagcgatgaagaagccaggatggtgaaaggctctatagactatgttggcatcaaccactacacttctttctacatgaaggaccctgggacatggaacctgacaccagtcagctaccaggatgattggcatgttggttttgtctacgaacgaaatggagttcctattggcgctcacgcaaactcctactggctgtacattgtgccgtggggcatcaacaaggctgtcagctatgtcaaggaaacttacaaaaatcctacaatgatccttgctgaaaacggaatggaccaacctggtgatgtcagtattactcagggtgtgcatgacacagtaagaatccgttattacagagactacataactgagctcaagaaggcaatagatgatggtgccagagtcattgggtactttgcgtggtcgctgcttgacaacttcgagtggaggcttgggtacacttcgcggtttggcttggtgtacgtggactacaagactctgaagaggtaccccaaggattcagctttctggttcaagcatatgctgtccaagaaaaggagctagagaattgcagacaagaggaccactggcttcacgtgtcatacaaaagttcactctgcaaatcctcttagtatgtcagatttagcttaaggaaccgtgcagacaattgagtctcaaggctcgacatctctagcttcgttaattgttgcaaggcaataaattggtatcttcgaaaaccttgagtctccataatagaacaagtagaagcaca

SEQ ID NO: 67354 - DNA, 2404 bp, Zea Mays
caacacaaagcagtcaaacaatttcaccggcgggcggcggcggccaccagcgcgtcgccgcgacgttagcgcttgatccggcggcggtgactcagcccctttctctcccccaacgctcaaatgccaccgcgcgccttgcccactacctcaacacccgcatctaggcgcgtcgtctacgtcctcctcgcggcgctcgccacagcgccgttcctgctcctcctcctctacggtggcgcctccccgtctgcgctctgccccacctcctaccgcactccccgccgcctcccgtacccgtccgtgctctggtccaaggtgcccccgctcccggcgctctccacctcgccgcacccggacctccgcggctctcgctggatcgtcttcaccgcgtcgccgcacgccccgcggcaccgcccgctgcgcgcggtccccgggtggcaggtcctcgccgtcgccgacgaggctacccccgcggactggtcccacccaggcgccgtgctgctcacgctcaccgaccagggccgccttggattccgctccgtcgctttccttccggcccggggcccggcgcgcaaggcagcggcgtacctcttcgccgtacagcgcggggcgcgggtcatctacgacgccgacgcgcgcaacgccgtcctgggcgggaacctcaccaggcacttcgatgtggatctggaccagcgccacggaggcgccgtgctgctgcagtacagccacgccaatcctaaccggacgatcgtgaacccgttcgtgcactttgggcagccatcgatctggccgcgtgggctgccgctggagaaggccggggagctggatgctgaggagttctacactgagatattcagtggtggccaattcatgcagcaagggatgtgtaatggccttccagatgttgattcggtgttctacttcactcggaagtcattggagatggaggcatttgatttccagtttgacgcggatgcacccaaggtcgcgctgccgcagggcatgatgacaccagtcaactctgttaacacattgttccactcgccggcgttctgggggcttgcgttgccagtgtcagtgagcccaatggcatcagatgtcatacgcggatactgggctcagaggatactatgggagattggtggctacctagttgtctacccaccaactgtacaccgcatagataacgtgcgtggtcacccatttgatgaagagaaggatctccatgtcaatgtagggaagctgataaagttcctaatggagtggcgatccagtaagctgacactattcgagcggattcttgatctaagctatgcgatgacagaggagggattctggagtgagaaggatttgcatttcatgactgcttggctgcaagatctggttgctatcgggtatcgacagccacggttgatgtcattggagattgaccggcccagagcaaccattggacatggtgacaagaaggggtttggtcccaagaagctgccttcagtgcatcttggggttgaagagattggggaagtaagcactgatattggcaatctaataaaatggaggaagcattttggtgatattgtgctcatagtgcattgcaccgaacttgtggaccgaactgcattagagtggaggctgctttatggtcggatatttcgagcagttgttgttctttcagagcaaagcaattctgatcttgctgtggaattcagcaacttgacacaagcctacaagtacttgccgaaggtgtttgatcggtttggaggtgcccaaggatttctgttccttcaagatcgtatggtcttcaattactggaacctcttgaatgctgataaggctaagctctggataaccaaccaggtgaaggaatcttggtcggatgtgcctctacatggtaacaacattgagtggtttgtgaaccaaggggatatgattaaaaaggcggtcagcaattttccatctcaatatcaagataactacaggagaagtgtaggtgaaaataatctgattcgttgcagcagtgagatattttacgtacctcaacgggcagatcttccatcagatacaactctttcaacaatttatactactgaagcacatgcagtgtaccctgtgaaggttcagaacgagatggattttgtaaaactgataagggctatggctttaggagatccatttcttatggaattggtctgatctaggattgcctttttttttaattcgtcaggttggcgatagaaaacaaaacaacgagataatgtttggttcgtctttgtcctcccttcttccatatgaggatgaggataatctagtgttactcgatctcagtttacatgtacaatcagataatacaggcttactttgttgagctaaaaaacgaaattccgaaattcatggtgttattttgttg

SEQ ID NO: 67355 - DNA, 2561 bp, Zea Mays
caacacaaagcagtcaaacaatttcaccggcgggcggcggcggccaccagcgcgtcgccgcgacgttagcgcttgatccggcggcggtgactcagcccctttctctcccccaacgctcaaatgccaccgcgcgccttgcccactacctcaacacccgcatctaggcgcgtcgtctacgtcctcctcgcggcgctcgccacagcgccgttcctgctcctcctcctctacggtggcgcctccccgtctgcgctctgccccacctcctaccgcactccccgccgcctcccgtacccgtccgtgctctggtccaaggtgcccccgctcccggcgctctccacctcgccgcacccggacctccgcggctctcgctggatcgtcttcaccgcgtcgccgcacgccccgcggcaccgcccgctgcgcgcggtccccgggtggcaggtcctcgccgtcgccgacgaggctacccccgcggactggtcccacccaggcgccgtgctgctcacgctcaccgaccagggccgccttggattccgctccgtcgctttccttccggcccggggcccggcgcgcaaggcagcggcgtacctcttcgccgtacagcgcggggcgcgggtcatctacgacgccgacgcgcgcaacgccgtcctgggcgggaacctcaccaggcacttcgatgtggatctggaccagcgccacggaggcgccgtgctgctgcagtacagccacgccaatcctaaccggacgatcgtgaacccgttcgtgcactttgggcagccatcgatctggccgcgtgggctgccgctggagaaggccggggagctggatgctgaggagttctacactgagatattcagtggtggccaattcatgcagcaagggatgtgtaatggccttccagatgttgattcggtgttctacttcactcggaagtcattggagatggaggcatttgatttccagtttgacgcggatgcacccaaggtcgcgctgccgcagggcatgatgacaccagtcaactctgttaacacattgttccactcgccggcgttctgggggcttgcgttgccagtgtcagtgagcccaatggcatcagatgtcatacgcggatactgggctcagaggatactatgggagattggtggctacctagttgtctacccaccaactgtacaccgcatagataacgtgcgtggtcacccatttgatgaagagaaggatctccatgtcaatgtagggaagctgataaagttcctaatggagtggcgatccagtaagctgacactattcgagcggattcttgatctaagctatgcgatgacagaggagggattctggagtgagaaggatttgcatttcatgactgcttggctgcaagatctggttgctatcgggtatcgacagccacggttgatgtcattggagattgaccggcccagagcaaccattggacatggtgacaagaaggggtttggtcccaagaagctgccttcagtgcatcttggggttgaagagattggggaagtaagcactgatattggcaatctaataaaatggaggaagcattttggtgatattgtgctcatagtgcattgcaccgaacttgtggaccgaactgcattagagtggaggctgctttatggtcggatatttcgagcagttgttgttctttcagagcaaagcaattctgatcttgctgtggaattcagcaacttgacacaagcctacaaccattttgcgttgcaggtacttgccgaaggtgtttgatcggtttggaggtgcccaaggatttctgttccttcaagatcgtatggtcttcaattactggaacctcttgaatgctgataaggctaagctctggataaccaaccaggtgaaggaatcttggtcggatgtgcctctacatggtaacaacattgagtggtttgtgaaccaaggggatatgattaaaaaggcggtcagcaattttccatctcaatatcaagataactacaggagaagtgtaggtgaaaataatctgattcgttgcagcagtgagatattttacgtacctcaacggtacacccgtgatttctcagatcttgtaaaagttattgggagcttagacattcatcacagttttgcagtccccatgttattccttgcgatcgattcaccgagcaactttgagtccaaagctttgacaaaacttgtctacagggcagatcttccatcagatacaactctttcaacaatttatactactgaagcacatgcagtgtaccctgtgaaggttcagaacgagatggattttgtaaaactgataagggctatggctttaggagatccatttcttatggaattggtctgatctaggattgcctttttttttaattcgtcaggttggcgatagaaaacaaaacaacgagataatgtttggttcgtctttgtcctcccttcttccatatgaggatgaggataatctagtgttactcgatctcagtttacatgtacaatcagataatacaggcttactttgttgagctaaaaaacgaaattccgaaattcatggtgttattttgttg

SEQ ID NO: 67356 - DNA, 2539 bp, Zea Mays
caacacaaagcagtcaaacaatttcaccggcgggcggcggcggccaccagcgcgtcgccgcgacgttagcgcttgatccggcggcggtgactcagcccctttctctcccccaacgctcaaatgccaccgcgcgccttgcccactacctcaacacccgcatctaggcgcgtcgtctacgtcctcctcgcggcgctcgccacagcgccgttcctgctcctcctcctctacggtggcgcctccccgtctgcgctctgccccacctcctaccgcactccccgccgcctcccgtacccgtccgtgctctggtccaaggtgcccccgctcccggcgctctccacctcgccgcacccggacctccgcggctctcgctggatcgtcttcaccgcgtcgccgcacgccccgcggcaccgcccgctgcgcgcggtccccgggtggcaggtcctcgccgtcgccgacgaggctacccccgcggactggtcccacccaggcgccgtgctgctcacgctcaccgaccagggccgccttggattccgctccgtcgctttccttccggcccggggcccggcgcgcaaggcagcggcgtacctcttcgccgtacagcgcggggcgcgggtcatctacgacgccgacgcgcgcaacgccgtcctgggcgggaacctcaccaggcacttcgatgtggatctggaccagcgccacggaggcgccgtgctgctgcagtacagccacgccaatcctaaccggacgatcgtgaacccgttcgtgcactttgggcagccatcgatctggccgcgtgggctgccgctggagaaggccggggagctggatgctgaggagttctacactgagatattcagtggtggccaattcatgcagcaagggatgtgtaatggccttccagatgttgattcggtgttctacttcactcggaagtcattggagatggaggcatttgatttccagtttgacgcggatgcacccaaggtcgcgctgccgcagggcatgatgacaccagtcaactctgttaacacattgttccactcgccggcgttctgggggcttgcgttgccagtgtcagtgagcccaatggcatcagatgtcatacgcggatactgggctcagaggatactatgggagattggtggctacctagttgtctacccaccaactgtacaccgcatagataacgtgcgtggtcacccatttgatgaagagaaggatctccatgtcaatgtagggaagctgataaagttcctaatggagtggcgatccagtaagctgacactattcgagcggattcttgatctaagctatgcgatgacagaggagggattctggagtgagaaggatttgcatttcatgactgcttggctgcaagatctggttgctatcgggtatcgacagccacggttgatgtcattggagattgaccggcccagagcaaccattggacatggtgacaagaaggggtttggtcccaagaagctgccttcagtgcatcttggggttgaagagattggggaagtaagcactgatattggcaatctaataaaatggaggaagcattttggtgatattgtgctcatagtgcattgcaccgaacttgtggaccgaactgcattagagtggaggctgctttatggtcggatatttcgagcagttgttgttctttcagagcaaagcaattctgatcttgctgtggaattcagcaacttgacacaagcctacaagtacttgccgaaggtgtttgatcggtttggaggtgcccaaggatttctgttccttcaagatcgtatggtcttcaattactggaacctcttgaatgctgataaggctaagctctggataaccaaccaggaatcttggtcggatgtgcctctacatggtaacaacattgagtggtttgtgaaccaaggggatatgattaaaaaggcggtcagcaattttccatctcaatatcaagataactacaggagaagtgtaggtgaaaataatctgattcgttgcagcagtgagatattttacgtacctcaacggtacacccgtgatttctcagatcttgtaaaagttattgggagcttagacattcatcacagttttgcagtccccatgttattccttgcgatcgattcaccgagcaactttgagtccaaagctttgacaaaacttgtctacagggcagatcttccatcagatacaactctttcaacaatttatactactgaagcacatgcagtgtaccctgtgaaggttcagaacgagatggattttgtaaaactgataagggctatggctttaggagatccatttcttatggaattggtctgatctaggattgcctttttttttaattcgtcaggttggcgatagaaaacaaaacaacgagataatgtttggttcgtctttgtcctcccttcttccatatgaggatgaggataatctagtgttactcgatctcagtttacatgtacaatcagataatacaggcttactttgttgagctaaaaaacgaaattccgaaattcatggtgttattttgttg

SEQ ID NO: 67357 - DNA, 2429 bp, Zea Mays
caacacaaagcagtcaaacaatttcaccggcgggcggcggcggccaccagcgcgtcgccgcgacgttagcgcttgatccggcggcggtgactcagcccctttctctcccccaacgctcaaatgccaccgcgcgccttgcccactacctcaacacccgcatctaggcgcgtcgtctacgtcctcctcgcggcgctcgccacagcgccgttcctgctcctcctcctctacggtggcgcctccccgtctgcgctctgccccacctcctaccgcactccccgccgcctcccgtacccgtccgtgctctggtccaaggtgcccccgctcccggcgctctccacctcgccgcacccggacctccgcggctctcgctggatcgtcttcaccgcgtcgccgcacgccccgcggcaccgcccgctgcgcgcggtccccgggtggcaggtcctcgccgtcgccgacgaggctacccccgcggactggtcccacccaggcgccgtgctgctcacgctcaccgaccagggccgccttggattccgctccgtcgctttccttccggcccggggcccggcgcgcaaggcagcggcgtacctcttcgccgtacagcgcggggcgcgggtcatctacgacgccgacgcgcgcaacgccgtcctgggcgggaacctcaccaggcacttcgatgtggatctggaccagcgccacggaggcgccgtgctgctgcagtacagccacgccaatcctaaccggacgatcgtgaacccgttcgtgcactttgggcagccatcgatctggccgcgtgggctgccgctggagaaggccggggagctggatgctgaggagttctacactgagatattcagtggtggccaattcatgcagcaagggatgtgtaatggccttccagatgttgattcggtgttctacttcactcggaagtcattggagatggaggcatttgatttccagtttgacgcggatgcacccaaggtcgcgctgccgcagggcatgatgacaccagtcaactctgttaacacattgttccactcgccggcgttctgggggcttgcgttgccagtgtcagtgagcccaatggcatcagatgtcatacgcggatactgggctcagaggatactatgggagattggtggctacctagttgtctacccaccaactgtacaccgcatagataacgtgcgtggtcacccatttgatgaagagaaggatctccatgtcaatgtagggaagctgataaagttcctaatggagtggcgatccagtaagctgacactattcgagcggattcttgatctaagctatgcgatgacagaggagggattctggagtgagaaggatttgcatttcatgactgcttggctgcaagatctggttgctatcgggtatcgacagccacggttgatgtcattggagattgaccggcccagagcaaccattggacatggtgacaagaaggggtttggtcccaagaagctgccttcagtgcatcttggggttgaagagattggggaagtaagcactgatattggcaatctaataaaatggaggaagcattttggtgatattgtgctcatagtgcattgcaccgaacttgtggaccgaactgcattagagtggaggctgctttatggtcggatatttcgagcagttgttgttctttcagagcaaagcaattctgatcttgctgtggaattcagcaacttgacacaagcctacaagtacttgccgaaggtgtttgatcggtttggaggtgcccaaggatttctgttccttcaagatcgtatggtcttcaattactggaacctcttgaatgctgataaggctaagctctggataaccaaccaggtgaaggaatcttggtcggatgtgcctctacatggtaacaacattgagtggtttgtgaaccaaggggatatgattaaaaaggcggtcagcaattttccatctcaatatcaagataactacaggagaagtttttgcagtccccatgttattccttgcgatcgattcaccgagcaactttgagtccaaagctttgacaaaacttgtctacagggcagatcttccatcagatacaactctttcaacaatttatactactgaagcacatgcagtgtaccctgtgaaggttcagaacgagatggattttgtaaaactgataagggctatggctttaggagatccatttcttatggaattggtctgatctaggattgcctttttttttaattcgtcaggttggcgatagaaaacaaaacaacgagataatgtttggttcgtctttgtcctcccttcttccatatgaggatgaggataatctagtgttactcgatctcagtttacatgtacaatcagataatacaggcttactttgttgagctaaaaaacgaaattccgaaattcatggtgttattttgttg

SEQ ID NO: 67358 - DNA, 1735 bp, Zea Mays
aaaaatactaatacagtatgaaagtgaaaatgagccggagaccaagactggggagacagcacagtcacggaatcaaaacacaaaaacgatttttacaaacaaaataaaaaagactttcctaaagagagagaaatgacgacaaaaacaaaagagagacttcaactgggcaggcgccgacggcgacgtgtgggtggtggcggctggtcccaagctcggggcgggcgcgacgcgcgagcaccgcaccgatgccgatgctcctcccaccccctcccctcccctcctcctcatcacccaactactacctcccatcccatccgcgccctccttcggtcctctcccatccgctccgctcgcagcccctccccttgccccccgcgatgtcgtcgtcgtcaccgccgccgcggcccgacgacgacgacggtgcgcaggaggtgggcgccagcgatgggaggtcgctgggctacggcgaggcggagtactgggacgcgcggtacgtggaggagggcggcgcgccgtacgactggtatcaacgctacgacgcgctccgccccttcgtccgctgcttcgcgccgccggcgtcccggatcctcatggttggctgcggctccgcactcatgtcggaggatatggtcactgacggctatgtggagatagtgaacattgacatttcgtcggttgtgattgagatgatgagaaagaaatacttcgatgttcctcagctgcaatagatatgagtatgtttccggacgaatcgttcgattgtgcaatcgataaagggactctggactcattgatgtgtggtgtggatgctcccctcagtgcagctcagatgattttggaagtggacaggcttcttaaaccaggaggaacctttattttgataacatatggtgatccatcggtacgaatgcctcatttgaatcaatcagcatgtgactggaaagttgtactttatattctaccaagacctgtgttcactggaaagataacgaggcgtgtactggatcctgttccactgaccgagaggggtagactccctgatggatttgtcccagaggatcctgactcccattatgtctatgtctgcaagaagatgcagggattaacaggcacaggttccccaactgtaaaccacatagagaggcaaggggaagaataaacaaataggctgatttcacctcccacaagattagtggattgttatgatttatatacaagatcagatacgtttccaccattgttgtggccatccaaatgtagaagcgtgccattgcatatctaactgatcttgtaaaagttgcaagaatccgggagtcaatgctttgcgcaagagctgtcctttttctttctttcttttctgtatcatcttgggaagcacaacggaattgtttggtacattcgaggaagagatttatttttattacgccccgtttggatcactggaattgaattccattctaataatagtaatttaggcatatatcaattaagctaattcacttttatacaaaatatatttgcatactattattagcaagatgtcttagatatttatgtgctacatttttattatagaggagtagaacgaagagtgtcatgtaagttacagattagaaacaaattctaatcatgcataaaatcatttcctatcctccaccctatgaatttgagataaccttatatctgaactttggaaagtggtggaatgccaaattccaaactaaataagttactt

SEQ ID NO: 67359 - DNA, 1365 bp, Zea Mays
aaaaatactaatacagtatgaaagtgaaaatgagccggagaccaagactggggagacagcacagtcacggaatcaaaacacaaaaacgatttttacaaacaaaataaaaaagactttcctaaagagagagaaatgacgacaaaaacaaaagagagacttcaactgggcaggcgccgacggcgacgtgtgggtggtggcggctggtcccaagctcggggcgggcgcgacgcgcgagcaccgcaccgatgccgatgctcctcccaccccctcccctcccctcctcctcatcacccaactactacctcccatcccatccgcgccctccttcggtcctctcccatccgctccgctcgcagcccctccccttgccccccgcgatgtcgtcgtcgtcaccgccgccgcggcccgacgacgacgacggtgcgcaggaggtgggcgccagcgatgggaggtcgctgggctacggcgaggcggagtactgggacgcgcggtacgtggaggagggcggcgcgccgtacgactggtatcaacgctacgacgcgctccgccccttcgtccgctgcttcgcgccgccggcgtcccggatcctcatggttggctgcggctccgcactcatgtcggaggatatggtcactgacggctatgtggagatagtgaacattgacatttcgtcggttgtgattgagatgatgagaaagaaatacttcgatgttcctcagctgcaatgtatcctttgactgtttttatcatttcccccaatctattgtccattgatacccttatgaactgcagacttgcgcatggatgttagagatatgagtatgtttccggacgaatcgttcgattgtgcaatcgataaaggtacacttttcctgctatgatgttctgtttgtggccattgctgacacgcatttgaagtaatttcactcacttaactttgttaaattcttagggactctggactcattgatggtaagtaggagtaggtaacattaagtcaccatgtctttttccttatttctggacttcttcagcaatgccgtcttgctgctttcatagtgtggtgtggatgctcccctcagtgcagctcagatgattttggaagtggacaggttttttagtgtcttgctgcctttctgaagtatcactctgcagtgtcatctgggccaagatatcttgtaaatttcaacagccctgcagccttatcagttatacttttttattgcaggcttcttaaaccaggaggaacctttattttgataacatatggtgatccatcggtacgaatgcctcatttgaatcaatcagcatgtgactggaaagttgtactttatattctacatttctctgcctgtgactatgact

SEQ ID NO: 67360 - DNA, 1640 bp, Zea Mays
cttccttctagtaaccagtaactctacccatcgtactatcagcaacagtaatagcggacgagcggagttttccttgttgcggcgttgcttcgctttcttccaataatccctcgatgttcccgaaaatagaaagctcagtcatgtcggaggatatggtcactgacggctatgtggagatagtgaacattgacatttcgtcggttgtgattgagatgatgagaaagaaatacttcgatgttcctcagctgcaatgtatcctttgactgtttttatcatttcccccaatctattgtccattgatacccttatgaactgcagacttgcgcatggatgttagagatatgagtatgtttccggacgaatcgttcgattgtgcaatcgataaaggtacacttttcctgctatgatgttctgtttgtggccattgctgacacgcatttgaagtaatttcactcacttaactttgttaaattcttagggactctggactcattgatggtaagtaggagtaggtaacattaagtcaccatgtctttttccttatttctggacttcttcagcaatgccgtcttgctgctttcatagtgtggtgtggatgctcccctcagtgcagctcagatgattttggaagtggacaggttttttagtgtcttgctgcctttctgaagtatcactctgcagtgtcatctgggccaagatatcttgtaaatttcaacagccctgcagccttatcagttatacttttttattgcaggcttcttaaaccaggaggaacctttattttgataacatatggtgatccatcggtacgaatgcctcatttgaatcaatcagcatgtgactggaaagttgtactttatattctaccaagacctgtgttcactggaaagataacgaggcgtgtactggatcctgttccactgaccgagaggggtagactccctgatggatttgtcccagaggatcctgactcccattatgtctatgtctgcaagaagatgcagggattaacaggcacaggttccccaactgtaaaccacatagagaggcaaggggaagaataaacaaataggctgatttcacctcccacaagattagtggattgttatgatttatatacaagatcagatacgtttccaccattgttgtggccatccaaatgtagaagcgtgccattgcatatctaactgatcttgtaaaagttgcaagaatccgggagtcaatgctttgcgcaagagctgtcctttttctttctttcttttctgtatcatcttgggaagcacaacggaattgtttggtacattcgaggaagagatttatttttattacgccccgtttggatcactggaattgaattccattctaataatagtaatttaggcatatatcaattaagctaattcacttttatacaaaatatatttgcatactattattagcaagatgtcttagatatttatgtgctacatttttattatagaggagtagaacgaagagtgtcatgtaagttacagattagaaacaaattctaatcatgcataaaatcatttcctatcctccaccctatgaatttgagataaccttatatctgaactttggaaagtggtggaatgccaaattccaaactaaataagttactt

SEQ ID NO: 67361 - DNA, 1315 bp, Zea Mays
gtttgctttttgttcttgtcagtcatgtcggaggatatggtcactgacggctatgtggagatagtgaacattgacatttcgtcgacttgcgcatggatgttagagatatgagtatgtttccggacgaatcgttcgattgtgcaatcgataaagggactctggactcattgatggtaagtaggagtaggtaacattaagtcaccatgtctttttccttatttctggacttcttcagcaatgccgtcttgctgctttcatagtgtggtgtggatgctcccctcagtgcagctcagatgattttggaagtggacaggttttttagtgtcttgctgcctttctgaagtatcactctgcagtgtcatctgggccaagatatcttgtaaatttcaacagccctgcagccttatcagttatacttttttattgcaggcttcttaaaccaggaggaacctttattttgataacatatggtgatccatcggtacgaatgcctcatttgaatcaatcagcatgtgactggaaagttgtactttatattctaccaagacctgtgttcactggaaagataacgaggcgtgtactggatcctgttccactgaccgagaggggtagactccctgatggatttgtcccagaggatcctgactcccattatgtctatgtctgcaagaagatgcagggattaacaggcacaggttccccaactgtaaaccacatagagaggcaaggggaagaataaacaaataggctgatttcacctcccacaagattagtggattgttatgatttatatacaagatcagatacgtttccaccattgttgtggccatccaaatgtagaagcgtgccattgcatatctaactgatcttgtaaaagttgcaagaatccgggagtcaatgctttgcgcaagagctgtcctttttctttctttcttttctgtatcatcttgggaagcacaacggaattgtttggtacattcgaggaagagatttatttttattacgccccgtttggatcactggaattgaattccattctaataatagtaatttaggcatatatcaattaagctaattcacttttatacaaaatatatttgcatactattattagcaagatgtcttagatatttatgtgctacatttttattatagaggagtagaacgaagagtgtcatgtaagttacagattagaaacaaattctaatcatgcataaaatcatttcctatcctccaccctatgaatttgagataaccttatatctgaactttggaaagtggtggaatgccaaattccaaactaaataagttactt

SEQ ID NO: 67362 - DNA, 736 bp, Zea Mays
aagatgctcatggcagtttctggcgcagctagccaaacgcaattatccgcactcgctttctgtgcactagtggtggtggcggccgtgtccttgtcggctcgctcggcagtccgtcgtccccgctcaaattggaagctttccggtggttacgcggtacgggcggggcggcggcgtcatatctcttttcgaggcacgacgaggcggttggaggcttggagcgtgtgatttgcaagaggacaggacaggacaggagaacgcccaagttgaggtttgagcggcacacgtcgatgagattttctagaaattctgttgaggcagttagctgctggtgtccaatgcaggatggctggcggtcgagactgaaaccacgacggcggagtgaaccagcgagctctccgtccggtgggtgggtgccgatgcctgtactccccgggcttcatgtcgattcaggcgcttgagcttgctttcccgaacacaaatgttcagtttgctaattacctggttcgttgtttctgtacaaatagagtttgggtgaagtctgttcaccatgacactcagttatggtatttgtgccttttgactattggtttgtttggtgtgagagttgtattatgatgaatacacaatgtgaagttacatatttgattctgagaagctttaatgttgtaaatagcaagtatgtcctttttaccatttttgccagtattcaaggaaccatcagatcagtgtgaatgag

SEQ ID NO: 67363 - DNA, 4439 bp, Zea Mays
cagcacgccaggcagggtaagccgtaagcgcaaacccccgcccgatcagatccgcagcgattcggccaagtcccgaacggccgaacccctctcccgctgcatcaccaccacctctcttctctttcctcttcgatctcgatcgccctcgcaattcctccgtaaagcgcccctgccctgggcgagctatagcgcgcgcgcccagatctgcgcggtctcgccggcgatggcgtgcatcaagagcgcgcagcgggcggcgctgacggcgttggcgccggacgcgccgtacctcgccgcgggcaccatgaccggcgccgtcgacttgagcttctccgcctccgccaacatcgagatcttccgcctcgacttccagtccgactccccggacctcccgctcctcgccgccgcgccctccccggaccgcttcaaccgcctctcctggtcgcgcccgggcgccgtcgagggcgactccttttcgcttggactcctcgccggtggcctcagcgacggttccgtcgccgtgtggaacccgctgagcttgatcagctccgaggggaaagcggaggacgccatggtcgcgcgtctggagaagcacaccggaccggtttgtggactggagttcagtgagctgacaccgaatcggctcgcttctggggctgagcagggggagctttgcatctgggatctcaagaaccccgttgagccaattgtgtaccctccactcaagagtgttgggtcccatgctcaagctgaaatctcttgtttatcctggaatcccaagtttcaacatatagttgcctcaacttcgagtaatgggatgacagttgtttgggatttaaggaaccagaaaccactgactagtttttcagattcaaatcgaaggaaatgctctgttctccagtggaatccagatatgtccacccagttgattgttgcatcagatgatgacagttctccctcactgagagtttgggatgtgaggaagaccatttcaccagtaagagaatttgttggccattcaaaaggtgtaattgctatgtcgtggtgtccttatgatagttcattcttgcttacatgttcaaaagacaacagaacaatttgctgggatactgttagtggagagattattagtgagctacctgcaagtgctaattggaactttgaccttcactggtaccggaaaataccaggtgtcattgcagcatcctcatttgatgggaagatcggcatatacaacctagagttctctggtatttatgcggctggcgatgctgttggtgccccagcgcgtcaaagggctccggttccaaaatggttgaaatgctccactggtgcatcttttggctttggtggtaaacttgtttctttccatccggtggcacccacccaaggtgcacaagcatctacatctgaggtgcatgtgcacaatttggtgattgagcaaagtctggtgagccgatcagctgagtttgaagatgctattctgaatggcgacaaaagttcgctgcgtgctctgtgtgaaaaaaaatcacaagaatctttatctgatgaggagagagaaacatggggcttcttgatgattatgtttgaggacggggattttgtaaggacaaaattgcttgctcatcttggcttcgaaccacctcaggcaccacctgcaagttcacctgatgaattgagccaaacattggcagatacacttaatcttgatcacgccacaataaccgattatgcagatgcccaatttcttactgataacggggatgattttttcaacaatcctcaaccttcagaggctagtttggctgaagatttagtttctacaaatggtcaacagacagagcaggaaatgtctggagatgttgtgccgtcagatccatcaattgacaaaagtattcagcatgcattggtggttggagactacaaaggggcggttaaccagtgtctttctgctaatcgtatagctgatgctttggttatagcccatgccggtggttctgctctctgggaaagcacaagaaatcattatcttaaaaacagtatctcaccttacttaaaggttgtctccgctatggtgggcaatgatttaatgagttttgtaagtacctggccactaagttcatggaaggaaactcttgctctgctttgcacgtttgcacagaaagaggagtggcatgttttgtgtgacacgcttgcgtctagacttctaaatatcggagatacactagctgcaaccctctgttatatttgtgctggaaatattgataaagctgttgaaatatggtcccgcaccttgaaatctgaagatggtgggaagatttatgttgatcttctccaggatttgatggaaaaaaccattactctcgcccttgctacgggccacaagagatttagctcatcactgtctaagcttgttgagaactacgctgaattgctggctagtcaaggtcttcttaaaactgcaatggagtatttaaaactgttgggatcagatgaacattcaaatgagctggcaattttgagagatcgaattgcatgttctatggaagagaatgataatgctaggagttatgtttctgaaagcaccgccactccttccctttatggcacaaatcaatcttatacagccccagaccattctcagaatgtttaccagcaggtacctcagccatacaatgtaccaagtaatacatattcagaagcttacccacaacaacctactggcgcctatggatacaacaacacatatcaacctcaacaaccaacccatatgtttgttccacctagcgcccctgccagctctcagccaggcccttcacctgtaccagtgcctcagcaaacagtgaaggcatttactcctgcgaacccagctggtctaaaaaatccgggacaatatcagcaacctaataccctaggttcccagctttacacgggcactgcaaatcaacagtatccttctggaccatctgcttcttatccaagcggacctccaacaacatttcatcagcctgtatcacctgttcaataccagcctgttgctccaccagtatcttcttttggtccgagcgctcctgtaccagcaacagtccctaaccagatgtttccccattctgctgctgctaactcaacttcaaggttcatgccatcgaacaatcaaagctttgctccgaggccaggtctaagtcccgcacagccctcaagtccaacacaggtgcaggcacagccagctcctcctgcaccgcccccgactgtgcagacagctgatacgacaaaagtgtctgctgagttgagacctgttattggtacactaactagactattcgatgagacgtccaaagctctgggaggatcacaagctactcaagcaaaaaagcgtgaaattgaggacaattcaaggaaaataggggcattgttttcaaaactaaatagtgatgacatatctccaaacgttgcatcaaaactcaggcagttgtgcagtgcaattgatgctagcgattttgccactgcgatgcacctccaggtactcttaacaacaagtgactgggacgagtgcaacttctggctcgcggcattgaagcggatgatcaagacaaggcagaatttcagaatgtaaaccttgtggcctttttctgcagccagttctgtacacaccttttttctgctgcttgccagaaatgatagctgtagcagttcagagagtttgcctgcacaggggtgttatcatgctgctttgttctcggcccttgattctgcctaagcgctttggtacctcagtgctgttatacattttgataatagttttttgttttcgacatctgctataaggtgacctgcggctgggttgttcgttatgaatgttaattgtaagaggacacttagtctgttatagctggtggatcacctgtttcaattcttcctcttagatttcgtcagtttggacattccaagaactctagatggttaatacaagtgacagtggcttgttttttttttttttggtaatgccaacagaaatcaataaacttctggaatcctgaggtctgtgtttcttgctggacttcccagtcccggttttgctcttcgtgtatagctgctctgatctttatcgttgtataaatgtaagtccgcggcggttttactgatatggatggttattcagttccgcggcaggtgcagcttgccgaactggcgaatcgaatcgtgcgtgtttgagtctggtaatcatctcagcagccattgaccactcccaccccacatcgcagccgttgactttcagcggcgggagtagatgaccgttaaaacttgcgaatccggccgggttcgggaatgattgcgaatgtgctccggtcagcttccgacagtacgaggcacttctcttctcggccgccacgcgtccaccactgcccgtttctccacggccggcctcggcgtggcgtgcgcgc

SEQ ID NO: 67364 - DNA, 3989 bp, Zea Mays
gtaagcgcaaacccccgcccgatcagatccgcagcgattcggccaagtcccgaacggccgaacccctctcccgctgcatcaccaccacctctcttctctttcctcttcgatctcgatcgccctcgcaattcctccgtaaagcgcccctgccctgggcgagctatagcgcgcgcgcccagatctgcgcggtctcgccggcgatggcgtgcatcaagagcgcgcagcgggcggcgctgacggcgttggcgccggacgcgccgtacctcgccgcgggcaccatgaccggcgccgtcgacttgagcttctccgcctccgccaacatcgagatcttccgcctcgacttccagtccgactccccggacctcccgctcctcgccgccgcgccctccccggaccgcttcaaccgcctctcctggtcgcgcccgggcgccgtcgagggcgactccttttcgcttggactcctcgccggtggcctcagcgacggttccgtcgccgtgtggaacccgctgagcttgatcagctccgaggggaaagcggaggacgccatggtcgcgcgtctggagaagcacaccggaccggtttgtggactggagttcagtgagctgacaccgaatcggctcgcttctggggctgagcagggggagctttgcatctgggatctcaagaaccccgttgagccaattgtgtaccctccactcaagagtgttgggtcccatgctcaagctgaaatctcttgtttatcctggaatcccaagtttcaacatatagttgcctcaacttcgagtaatgggatgacagttgtttgggatttaaggaaccagaaaccactgactagtttttcagattcaaatcgaaggaaatgctctgttctccagtggaatccagatatgtccacccagttgattgttgcatcagatgatgacagttctccctcactgagagtttgggatgtgaggaagaccatttcaccagtaagagaatttgttggccattcaaaaggtgtaattgctatgtcgtggtgtccttatgatagttcattcttgcttacatgttcaaaagacaacagaacaatttgctgggatactgttagtggagagattattagtgagctacctgcaagtgctaattggaactttgaccttcactggtaccggaaaataccaggtgtcattgcagcatcctcatttgatgggaagatcggcatatacaacctagagttctctggtatttatgcggctggcgatgctgttggtgccccagcgcgtcaaagggctccggttccaaaatggttgaaatgctccactggtgcatcttttggctttggtggtaaacttgtttctttccatccggtggcacccacccaaggtgcacaagcatctacatctgaggtgcatgtgcacaatttggtgattgagcaaagtctggtgagccgatcagctgagtttgaagatgctattctgaatggcgacaaaagttcgctgcgtgctctgtgtgaaaaaaaatcacaagaatctttatctgatgaggagagagaaacatggggcttcttgatgattatgtttgaggacggggattttgtaaggacaaaattgcttgctcatcttggcttcgaaccacctcaggcaccacctgcaagttcacctgatgaattgagccaaacattggcagatacacttaatcttgatcacgccacaataaccgattatgcagatgcccaatttcttactgataacggggatgattttttcaacaatcctcaaccttcagaggctagtttggctgaagatttagtttctacaaatggtcaacagacagagcaggaaatgtctggagatgttgtgccgtcagatccatcaattgacaaaagtattcagcatgcattggtggttggagactacaaaggggcggttaaccagtgtctttctgctaatcgtatagctgatgctttggttatagcccatgccggtggttctgctctctgggaaagcacaagaaatcattatcttaaaaacagtatctcaccttacttaaaggttgtctccgctatggtgggcaatgatttaatgagttttgtaagtacctggccactaagttcatggaaggaaactcttgctctgctttgcacgtttgcacagaaagaggagtggcatgttttgtgtgacacgcttgcgtctagacttctaaatatcggagatacactagctgcaaccctctgttatatttgtgctggaaatattgataaagctgttgaaatatggtcccgcaccttgaaatctgaagatggtgggaagatttatgttgatcttctccaggatttgatggaaaaaaccattactctcgcccttgctacgggccacaagagatttagctcatcactgtctaagcttgttgagaactacgctgaattgctggctagtcaaggtcttcttaaaactgcaatggagtatttaaaactgttgggatcagatgaacattcaaatgagctggcaattttgagagatcgaattgcatgttctatggaagagaatgataatgctaggagttatgtttctgaaagcaccgccactccttccctttatggcacaaatcaatcttatacagccccagaccattctcagaatgtttaccagcaggtacctcagccatacaatgtaccaagtaatacatattcagaagcttacccacaacaacctactggcgcctatggatacaacaacacatatcaacctcaacaaccaacccatatgtttgttccacctagcgcccctgccagctctcagcaacagccaggcccttcacctgtaccagtgcctcagcaaacagtgaaggcatttactcctgcgaacccagctggtctaaaaaatccgggacaatatcagcaacctaataccctaggttcccagctttacacgggcactgcaaatcaacagtatccttctggaccatctgcttcttatccaagcggacctccaacaacatttcatcagcctgtatcacctgttcaataccagcctgttgctccaccagtatcttcttttggtccgagcgctcctgtaccagcaacagtccctaaccagatgtttccccattctgctgctgctaactcaacttcaaggttcatgccatcgaacaatcaaagctttgctccgaggccaggtctaagtcccgcacagccctcaagtccaacacaggtgcaggcacagccagctcctcctgcaccgcccccgactgtgcagacagctgatacgacaaaagtgtctgctgagttgagacctgttattggtacactaactagactattcgatgagacgtccaaagctctgggaggatcacaagctactcaagcaaaaaagcgtgaaattgaggacaattcaaggaaaataggggcattgttttcaaaactaaatagtgatgacatatctccaaacgttgcatcaaaactcaggcagttgtgcagtgcaattgatgctagcgattttgccactgcgatgcacctccaggtactcttaacaacaagtgactgggacgagtgcaacttctggctcgcggcattgaagcggatgatcaagacaaggcagaatttcagaatgtaaaccttgtggcctttttctgcagccagttctgtacacaccttttttctgctgcttgccagaaatgatagctgtagcagttcagagagtttgcctgcacaggggtgttatcatgctgctttgttctcggcccttgattctgcctaagcgctttggtacctcagtgctgttatacattttgataatagttttttgttttcgacatctgctataaggtgacctgcggctgggttgttcgttatgaatgttaattgtaagaggacacttagtctgttatagctggtggatcacctgtttcaattcttcctcttagatttcgtcagtttggacattccaagaactctagatggttaatacaagtgacagtggcttgttttttttttttttggcttgctaata

SEQ ID NO: 67365 - DNA, 3322 bp, Zea Mays
ctcattcaccagtggagcagtcaaaagggttcgtgaatgtgtgtgcacgcggaaggaatgaggcggacatagtgggttagagctacatattcttttgaatgtagatcgcatagtaagttctctggtatttatgcggctggcgatgctgttggtgccccagcgcgtcaaagggctccggttccaaaatggttgaaatgctccactggtgcatcttttggctttggtggtaaacttgtttctttccatccggtggcacccacccaaggtgcacaagcatctacatctgaggtgcatgtgcacaatttggtgattgagcaaagtctggtgagccgatcagctgagtttgaagatgctattctgaatggcgacaaaagttcgctgcgtgctctgtgtgaaaaaaaatcacaagaatctttatctgatgaggagagagaaacatggggcttcttgatgattatgtttgaggacggggattttgtaaggacaaaattgcttgctcatcttggcttcgaaccacctcaggcaccacctgcaagttcacctgatgaattgagccaaacattggcagatacacttaatcttgatcacgccacaataaccgattatgcagatgcccaatttcttactgataacggggatgattttttcaacaatcctcaaccttcagaggctagtttggctgaagatttagtttctacaaatggtcaacagacagagcaggaaatgtctggagatgttgtgccgtcagatccatcaattgacaaaagtattcagcatgcattggtggttggagactacaaaggggcggttaaccagtgtctttctgctaatcgtatagctgatgctttggttatagcccatgccggtggttctgctctctgggaaagcacaagaaatcattatcttaaaaacagtatctcaccttacttaaaggttgtctccgctatggtgggcaatgatttaatgagttttgtaagtacctggccactaagttcatggaaggaaactcttgctctgctttgcacgtttgcacagaaagaggagtggcatgttttgtgtgacacgcttgcgtctagacttctaaatatcggagatacactagctgcaaccctctgttatatttgtgctggaaatattgataaagctgttgaaatatggtcccgcaccttgaaatctgaagatggtgggaagatttatgttgatcttctccaggatttgatggaaaaaaccattactctcgcccttgctacgggccacaagagatttagctcatcactgtctaagcttgttgagaactacgctgaattgctggctagtcaaggtcttcttaaaactgcaatggagtatttaaaactgttgggatcagatgaacattcaaatgagctggcaattttgagagatcgaattgcatgttctatggaagagaatgataatgctaggagttatgtttctgaaagcaccgccactccttccctttatggcacaaatcaatcttatacagccccagaccattctcagaatgtttaccagcaggtacctcagccatacaatgtaccaagtaatacatattcagaagcttacccacaacaacctactggcgcctatggatacaacaacacatatcaacctcaacaaccaacccatatgtttgttccacctagcgcccctgccagctctcagcaacagccaggcccttcacctgtaccagtgcctcagcaaacagtgaaggcatttactcctgcgaacccagctggtctaaaaaatccgggacaatatcagcaacctaataccctaggttcccagctttacacgggcactgcaaatcaacagtatccttctggaccatctgcttcttatccaagcggacctccaacaacatttcatcagcctgtatcacctgttcaataccagcctgttgctccaccagtatcttcttttggtccgagcgctcctgtaccagcaacagtccctaaccagatgtttccccattctgctgctgctaactcaacttcaaggttcatgccatcgaacaatcaaagctttgctccgaggccaggtctaagtcccgcacagccctcaagtccaacacaggtgcaggcacagccagctcctcctgcaccgcccccgactgtgcagacagctgatacgacaaaagtgtctgctgagttgagacctgttattggtacactaactagactattcgatgagacgtccaaagctctgggaggatcacaagctactcaagcaaaaaagcgtgaaattgaggacaattcaaggaaaataggggcattgttttcaaaactaaatagtgatgacatatctccaaacgttgcatcaaaactcaggcagttgtgcagtgcaattgatgctagcgattttgccactgcgatgcacctccaggtactcttaacaacaagtgactgggacgagtgcaacttctggctcgcggcattgaagcggatgatcaagacaaggcagaatttcagaatgtaaaccttgtggcctttttctgcagccagttctgtacacaccttttttctgctgcttgccagaaatgatagctgtagcagttcagagagtttgcctgcacaggggtgttatcatgctgctttgttctcggcccttgattctgcctaagcgctttggtacctcagtgctgttatacattttgataatagttttttgttttcgacatctgctataaggtgacctgcggctgggttgttcgttatgaatgttaattgtaagaggacacttagtctgttatagctggtggatcacctgtttcaattcttcctcttagatttcgtcagtttggacattccaagaactctagatggttaatacaagtgacagtggcttgttttttttttttttggtaatgccaacagaaatcaataaacttctggaatcctgaggtctgtgtttcttgctggacttcccagtcccggttttgctcttcgtgtatagctgctctgatctttatcgttgtataaatgtaagtccgcggcggttttactgatatggatggttattcagttccgcggcaggtgcagcttgccgaactggcgaatcgaatcgtgcgtgtttgagtctggtaatcatctcagcagccattgaccactcccaccccacatcgcagccgttgactttcagcggcgggagtagatgaccgttaaaacttgcgaatccggccgggttcgggaatgattgcgaatgtgctccggtcagcttccgacagtacgaggcacttctcttctcggccgccacgcgtccaccactgcccgtttctccacggccggcctcggcgtggcgtgcgcgc

SEQ ID NO: 67366 - DNA, 3241 bp, Zea Mays
aggcggacatagtgggttagagctacatattcttttgaatgtagatcgcatagtaagttctctggtatttatgcggctggcgatgctgttggtgccccagcgcgtcaaagggctccggttccaaaatggttgaaatgctccactggtgcatcttttggctttggtggtaaacttgtttctttccatccggtggcacccacccaaggtgcacaagcatctacatctgaggtgcatgtgcacaatttggtgattgagcaaagtctggtgagccgatcagctgagtttgaagatgctattctgaatggcgacaaaagttcgctgcgtgctctgtgtgaaaaaaaatcacaagaatctttatctgatgaggagagagaaacatggggcttcttgatgattatgtttgaggacggggattttgtaaggacaaaattgcttgctcatcttggcttcgaaccacctcaggcaccacctgcaagttcacctgatgaattgagccaaacattggcagatacacttaatcttgatcacgccacaataaccgattatgcagatgcccaatttcttactgataacggggatgattttttcaacaatcctcaaccttcagaggctagtttggctgaagatttagtttctacaaatggtcaacagacagagcaggaaatgtctggagatgttgtgccgtcagatccatcaattgacaaaagtattcagcatgcattggtggttggagactacaaaggggcggttaaccagtgtctttctgctaatcgtatagctgatgctttggttatagcccatgccggtggttctgctctctgggaaagcacaagaaatcattatcttaaaaacagtatctcaccttacttaaaggttgtctccgctatggtgggcaatgatttaatgagttttgtaagtacctggccactaagttcatggaaggaaactcttgctctgctttgcacgaaagaggagtggcatgttttgtgtgacacgcttgcgtctagacttctaaatatcggagatacactagctgcaaccctctgttatatttgtgctggaaatattgataaagctgttgaaatatggtcccgcaccttgaaatctgaagatggtgggaagatttatgttgatcttctccaggatttgatggaaaaaaccattactctcgcccttgctacgggccacaagagatttagctcatcactgtctaagcttgttgagaactacgctgaattgctggctagtcaaggtcttcttaaaactgcaatggagtatttaaaactgttgggatcagatgaacattcaaatgagctggcaattttgagagatcgaattgcatgttctatggaagagaatgataatgctaggagttatgtttctgaaagcaccgccactccttccctttatggcacaaatcaatcttatacagccccagaccattctcagaatgtttaccagccatacaatgtaccaagtaatacatattcagaagcttacccacaacaacctactggcgcctatggatacaacaacacatatcaacctcaacaaccaacccatatgtttgttccacctagcgcccctgccagctctcagcaacagccaggcccttcacctgtaccagtgcctcagcaaacagtgaaggcatttactcctgcgaacccagctggtctaaaaaatccgggacaatatcagcaacctaataccctaggttcccagctttacacgggcactgcaaatcaacagtatccttctggaccatctgcttcttatccaagcggacctccaacaacatttcatcagcctgtatcacctgttcaataccagcctgttgctccaccagtatcttcttttggtccgagcgctcctgtaccagcaacagtccctaaccagatgtttccccattctgctgctgctaactcaacttcaaggttcatgccatcgaacaatcaaagctttgctccgaggccaggtctaagtcccgcacagccctcaagtccaacacaggtgcaggcacagccagctcctcctgcaccgcccccgactgtgcagacagctgatacgacaaaagtgtctgctgagttgagacctgttattggtacactaactagactattcgatgagacgtccaaagctctgggaggatcacaagctactcaagcaaaaaagcgtgaaattgaggacaattcaaggaaaataggggcattgttttcaaaactaaatagtgatgacatatctccaaacgttgcatcaaaactcaggcagttgtgcagtgcaattgatgctagcgattttgccactgcgatgcacctccaggtactcttaacaacaagtgactgggacgagtgcaacttctggctcgcggcattgaagcggatgatcaagacaaggcagaatttcagaatgtaaaccttgtggcctttttctgcagccagttctgtacacaccttttttctgctgcttgccagaaatgatagctgtagcagttcagagagtttgcctgcacaggggtgttatcatgctgctttgttctcggcccttgattctgcctaagcgctttggtacctcagtgctgttatacattttgataatagttttttgttttcgacatctgctataaggtgacctgcggctgggttgttcgttatgaatgttaattgtaagaggacacttagtctgttatagctggtggatcacctgtttcaattcttcctcttagatttcgtcagtttggacattccaagaactctagatggttaatacaagtgacagtggcttgttttttttttttttggtaatgccaacagaaatcaataaacttctggaatcctgaggtctgtgtttcttgctggacttcccagtcccggttttgctcttcgtgtatagctgctctgatctttatcgttgtataaatgtaagtccgcggcggttttactgatatggatggttattcagttccgcggcaggtgcagcttgccgaactggcgaatcgaatcgtgcgtgtttgagtctggtaatcatctcagcagccattgaccactcccaccccacatcgcagccgttgactttcagcggcgggagtagatgaccgttaaaacttgcgaatccggccgggttcgggaatgattgcgaatgtgctccggtcagcttccgacagtacgaggcacttctcttctcggccgccacgcgtccaccactgcccgtttctccacggccggcctcggcgtggcgtgcgcgc

SEQ ID NO: 67367 - DNA, 3335 bp, Zea Mays
ctgttaactggtctagatactattttgcctttatttggtgaactgctttagttgcggtgaccatttgattaaaattgctgtttatatctatacgagactacaactaagctgtaggcaccaaatcaaaaatctatttcttcactcgacagagtaccaattgaacagccttaccacgcgtcaaagggctccggttccaaaatggttgaaatgctccactggtgcatcttttggctttggtggtaaacttgtttctttccatccggtggcacccacccaaggtgcacaagcatctacatctgaggtgcatgtgcacaatttggtgattgagcaaagtctggtgagccgatcagctgagtttgaagatgctattctgaatggcgacaaaagttcgctgcgtgctctgtgtgaaaaaaaatcacaagaatctttatctgatgaggagagagaaacatggggcttcttgatgattatgtttgaggacggggattttgtaaggacaaaattgcttgctcatcttggcttcgaaccacctcaggcaccacctgcaagttcacctgatgaattgagccaaacattggcagatacacttaatcttgatcacgccacaataaccgattatgcagatgcccaatttcttactgataacggggatgattttttcaacaatcctcaaccttcagaggctagtttggctgaagatttagtttctacaaatggtcaacagacagagcaggaaatgtctggagatgttgtgccgtcagatccatcaattgacaaaagtattcagcatgcattggtggttggagactacaaaggggcggttaaccagtgtctttctgctaatcgtatagctgatgctttggttatagcccatgccggtggttctgctctctgggaaagcacaagaaatcattatcttaaaaacagtatctcaccttacttaaaggttgtctccgctatggtgggcaatgatttaatgagttttgtaagtacctggccactaagttcatggaaggaaactcttgctctgctttgcacgtttgcacagaaagaggagtggcatgttttgtgtgacacgcttgcgtctagacttctaaatatcggagatacactagctgcaaccctctgttatatttgtgctggaaatattgataaagctgttgaaatatggtcccgcaccttgaaatctgaagatggtgggaagatttatgttgatcttctccaggatttgatggaaaaaaccattactctcgcccttgctacgggccacaagagatttagctcatcactgtctaagcttgttgagaactacgctgaattgctggctagtcaaggtcttcttaaaactgcaatggagtatttaaaactgttgggatcagatgaacattcaaatgagctggcaattttgagagatcgaattgcatgttctatggaagagaatgataatgctaggagttatgtttctgaaagcaccgccactccttccctttatggcacaaatcaatcttatacagccccagaccattctcagaatgtttaccagcaggtacctcagccatacaatgtaccaagtaatacatattcagaagcttacccacaacaacctactggcgcctatggatacaacaacacatatcaacctcaacaaccaacccatatgtttgttccacctagcgcccctgccagctctcagcaacagccaggcccttcacctgtaccagtgcctcagcaaacagtgaaggcatttactcctgcgaacccagctggtctaaaaaatccgggacaatatcagcaacctaataccctaggttcccagctttacacgggcactgcaaatcaacagtatccttctggaccatctgcttcttatccaagcggacctccaacaacatttcatcagcctgtatcacctgttcaataccagcctgttgctccaccagtatcttcttttggtccgagcgctcctgtaccagcaacagtccctaaccagatgtttccccattctgctgctgctaactcaacttcaaggttcatgccatcgaacaatcaaagctttgctccgaggccaggtctaagtcccgcacagccctcaagtccaacacaggtgcaggcacagccagctcctcctgcaccgcccccgactgtgcagacagctgatacgacaaaagtgtctgctgagttgagacctgttattggtacactaactagactattcgatgagacgtccaaagctctgggaggatcacaagctactcaagcaaaaaagcgtgaaattgaggacaattcaaggaaaataggggcattgttttcaaaactaaatagtgatgacatatctccaaacgttgcatcaaaactcaggcagttgtgcagtgcaattgatgctagcgattttgccactgcgatgcacctccaggtactcttaacaacaagtgactgggacgagtgcaacttctggctcgcggcattgaagcggatgatcaagacaaggcagaatttcagaatgtaaaccttgtggcctttttctgcagccagttctgtacacaccttttttctgctgcttgccagaaatgatagctgtagcagttcagagagtttgcctgcacaggggtgttatcatgctgctttgttctcggcccttgattctgcctaagcgctttggtacctcagtgctgttatacattttgataatagttttttgttttcgacatctgctataaggtgacctgcggctgggttgttcgttatgaatgttaattgtaagaggacacttagtctgttatagctggtggatcacctgtttcaattcttcctcttagatttcgtcagtttggacattccaagaactctagatggttaatacaagtgacagtggcttgttttttttttttttggtaatgccaacagaaatcaataaacttctggaatcctgaggtctgtgtttcttgctggacttcccagtcccggttttgctcttcgtgtatagctgctctgatctttatcgttgtataaatgtaagtccgcggcggttttactgatatggatggttattcagttccgcggcaggtgcagcttgccgaactggcgaatcgaatcgtgcgtgtttgagtctggtaatcatctcagcagccattgaccactcccaccccacatcgcagccgttgactttcagcggcgggagtagatgaccgttaaaacttgcgaatccggccgggttcgggaatgattgcgaatgtgctccggtcagcttccgacagtacgaggcacttctcttctcggccgccacgcgtccaccactgcccgtttctccacggccggcctcggcgtggcgtgcgcgc

SEQ ID NO: 67368 - DNA, 1956 bp, Zea Mays
gtgaatattcatatttgaacttgcggcaactgtcttttgtttcgcctttttgaatccatgagaatgataatgctaggagttatgtttctgaaagcaccgccactccttccctttatggcacaaatcaatcttatacagccccagaccattctcagaatgtttaccaggtacctcagccatacaatgtaccaagtaatacatattcagaagcttacccacaacaacctactggcgcctatggatacaacaacacatatcaacctcaacaaccaacccatatgtttgttccacctagcgcccctgccagctctcagcaacagccaggcccttcacctgtaccagtgcctcagcaaacagtgaaggcatttactcctgcgaacccagctggtctaaaaaatccgggacaatatcagcaacctaataccctaggttcccagctttacacgggcactgcaaatcaacagtatccttctggaccatctgcttcttatccaagcggacctccaacaacatttcatcagcctgtatcacctgttcaataccagcctgttgctccaccagtatcttcttttggtccgagcgctcctgtaccagcaacagtccctaaccagatgtttccccattctgctgctgctaactcaacttcaaggttcatgccatcgaacaatcaaagctttgctccgaggccaggtctaagtcccgcacagccctcaagtccaacacaggtgcaggcacagccagctcctcctgcaccgcccccgactgtgcagacagctgatacgacaaaagtgtctgctgagttgagacctgttattggtacactaactagactattcgatgagacgtccaaagctctgggaggatcacaagctactcaagcaaaaaagcgtgaaattgaggacaattcaaggaaaataggggcattgttttcaaaactaaatagtgatgacatatctccaaacgttgcatcaaaactcaggcagttgtgcagtgcaattgatgctagcgattttgccactgcgatgcacctccaggtactcttaacaacaagtgactgggacgagtgcaacttctggctcgcggcattgaagcggatgatcaagacaaggcagaatttcagaatgtaaaccttgtggcctttttctgcagccagttctgtacacaccttttttctgctgcttgccagaaatgatagctgtagcagttcagagagtttgcctgcacaggggtgttatcatgctgctttgttctcggcccttgattctgcctaagcgctttggtacctcagtgctgttatacattttgataatagttttttgttttcgacatctgctataaggtgacctgcggctgggttgttcgttatgaatgttaattgtaagaggacacttagtctgttatagctggtggatcacctgtttcaattcttcctcttagatttcgtcagtttggacattccaagaactctagatggttaatacaagtgacagtggcttgttttttttttttttggtaatgccaacagaaatcaataaacttctggaatcctgaggtctgtgtttcttgctggacttcccagtcccggttttgctcttcgtgtatagctgctctgatctttatcgttgtataaatgtaagtccgcggcggttttactgatatggatggttattcagttccgcggcaggtgcagcttgccgaactggcgaatcgaatcgtgcgtgtttgagtctggtaatcatctcagcagccattgaccactcccaccccacatcgcagccgttgactttcagcggcgggagtagatgaccgttaaaacttgcgaatccggccgggttcgggaatgattgcgaatgtgctccggtcagcttccgacagtacgaggcacttctcttctcggccgccacgcgtccaccactgcccgtttctccacggccggcctcggcgtggcgtgcgcgc

SEQ ID NO: 67369 - DNA, 1928 bp, Zea Mays
cttgcggcaactgtcttttgtttcgcctttttgaatccatgagaatgataatgctaggagttatgtttctgaaagcaccgccactccttccctttatggcacaaatcaatcttatacagccccagaccattctcagaatgtttaccagccatacaatgtaccaagtaatacatattcagaagcttacccacaacaacctactggcgcctatggatacaacaacacatatcaacctcaacaaccaacccatatgtttgttccacctagcgcccctgccagctctcagcaacagccaggcccttcacctgtaccagtgcctcagcaaacagtgaaggcatttactcctgcgaacccagctggtctaaaaaatccgggacaatatcagcaacctaataccctaggttcccagctttacacgggcactgcaaatcaacagtatccttctggaccatctgcttcttatccaagcggacctccaacaacatttcatcagcctgtatcacctgttcaataccagcctgttgctccaccagtatcttcttttggtccgagcgctcctgtaccagcaacagtccctaaccagatgtttccccattctgctgctgctaactcaacttcaaggttcatgccatcgaacaatcaaagctttgctccgaggccaggtctaagtcccgcacagccctcaagtccaacacaggtgcaggcacagccagctcctcctgcaccgcccccgactgtgcagacagctgatacgacaaaagtgtctgctgagttgagacctgttattggtacactaactagactattcgatgagacgtccaaagctctgggaggatcacaagctactcaagcaaaaaagcgtgaaattgaggacaattcaaggaaaataggggcattgttttcaaaactaaatagtgatgacatatctccaaacgttgcatcaaaactcaggcagttgtgcagtgcaattgatgctagcgattttgccactgcgatgcacctccaggtactcttaacaacaagtgactgggacgagtgcaacttctggctcgcggcattgaagcggatgatcaagacaaggcagaatttcagaatgtaaaccttgtggcctttttctgcagccagttctgtacacaccttttttctgctgcttgccagaaatgatagctgtagcagttcagagagtttgcctgcacaggggtgttatcatgctgctttgttctcggcccttgattctgcctaagcgctttggtacctcagtgctgttatacattttgataatagttttttgttttcgacatctgctataaggtgacctgcggctgggttgttcgttatgaatgttaattgtaagaggacacttagtctgttatagctggtggatcacctgtttcaattcttcctcttagatttcgtcagtttggacattccaagaactctagatggttaatacaagtgacagtggcttgttttttttttttttggtaatgccaacagaaatcaataaacttctggaatcctgaggtctgtgtttcttgctggacttcccagtcccggttttgctcttcgtgtatagctgctctgatctttatcgttgtataaatgtaagtccgcggcggttttactgatatggatggttattcagttccgcggcaggtgcagcttgccgaactggcgaatcgaatcgtgcgtgtttgagtctggtaatcatctcagcagccattgaccactcccaccccacatcgcagccgttgactttcagcggcgggagtagatgaccgttaaaacttgcgaatccggccgggttcgggaatgattgcgaatgtgctccggtcagcttccgacagtacgaggcacttctcttctcggccgccacgcgtccaccactgcccgtttctccacggccggcctcggcgtggcgtgcgcgc

SEQ ID NO: 67370 - DNA, 1775 bp, Zea Mays
ttttgtttcgcctttttgaatccatgagaatgataatgctaggagttatgtttctgaaagcaccgccactccttccctttatggcacaaatcaatcttatacagccccagaccattctcagaatgtttaccagcaacagccaggcccttcacctgtaccagtgcctcagcaaacagtgaaggcatttactcctgcgaacccagctggtctaaaaaatccgggacaatatcagcaacctaataccctaggttcccagctttacacgggcactgcaaatcaacagtatccttctggaccatctgcttcttatccaagcggacctccaacaacatttcatcagcctgtatcacctgttcaataccagcctgttgctccaccagtatcttcttttggtccgagcgctcctgtaccagcaacagtccctaaccagatgtttccccattctgctgctgctaactcaacttcaaggttcatgccatcgaacaatcaaagctttgctccgaggccaggtctaagtcccgcacagccctcaagtccaacacaggtgcaggcacagccagctcctcctgcaccgcccccgactgtgcagacagctgatacgacaaaagtgtctgctgagttgagacctgttattggtacactaactagactattcgatgagacgtccaaagctctgggaggatcacaagctactcaagcaaaaaagcgtgaaattgaggacaattcaaggaaaataggggcattgttttcaaaactaaatagtgatgacatatctccaaacgttgcatcaaaactcaggcagttgtgcagtgcaattgatgctagcgattttgccactgcgatgcacctccaggtactcttaacaacaagtgactgggacgagtgcaacttctggctcgcggcattgaagcggatgatcaagacaaggcagaatttcagaatgtaaaccttgtggcctttttctgcagccagttctgtacacaccttttttctgctgcttgccagaaatgatagctgtagcagttcagagagtttgcctgcacaggggtgttatcatgctgctttgttctcggcccttgattctgcctaagcgctttggtacctcagtgctgttatacattttgataatagttttttgttttcgacatctgctataaggtgacctgcggctgggttgttcgttatgaatgttaattgtaagaggacacttagtctgttatagctggtggatcacctgtttcaattcttcctcttagatttcgtcagtttggacattccaagaactctagatggttaatacaagtgacagtggcttgttttttttttttttggtaatgccaacagaaatcaataaacttctggaatcctgaggtctgtgtttcttgctggacttcccagtcccggttttgctcttcgtgtatagctgctctgatctttatcgttgtataaatgtaagtccgcggcggttttactgatatggatggttattcagttccgcggcaggtgcagcttgccgaactggcgaatcgaatcgtgcgtgtttgagtctggtaatcatctcagcagccattgaccactcccaccccacatcgcagccgttgactttcagcggcgggagtagatgaccgttaaaacttgcgaatccggccgggttcgggaatgattgcgaatgtgctccggtcagcttccgacagtacgaggcacttctcttctcggccgccacgcgtccaccactgcccgtttctccacggccggcctcggcgtggcgtgcgcgc

SEQ ID NO: 67371 - DNA, 926 bp, Zea Mays
ctcacctcaatcataaaaatcgcctctatctaaccagctccaacctgtacagcactagtctatcatctcggcttctgctcaaccaccggtcccggcataccataccacctggggctctcagctcagatcatcagcagctggtaacgaacgaacacccaacagtgatgcttagctgcagctgatcggagtcggagcaggagtaggagcagacgatgccgaccgatggccatgcaaggcagtaccagtaccacacggtggtgtactagccgggcatgtggcccggggagaatattttagcgcaccaactcggttgcttgcaccaaaagtgctcccaggcctccacccatccagtacgtgacgcggagtcctggatcccaaagcaacgcaaggcaaggcaagcaagagcggcagttttgacttgttaacaatctttgaggaattctctgtgctggttaacacggtgtcaggctgtcagcgagatcgtattatatattatgttatatgcagtcgcgcgcacacaggcagcagcagttcttgcagttgcagacgcacagcggatggcatggcatgcacatgaaggccacatgcagcagctagctagcttggaggaaacggctactgtattattggaatcccccccagggtccattctagctagccagccatctgatgaatatctagtctagctacgaatctcactggctcaagaaggtcaagcagttccattagtacctagagagagagagagagatagatagacagggagatcgaggtagacgtttgaggaacagatcaagatgagaatgggtcaaacaggacgaccagaaacagcgaaggcatgtactccgtttcagaacaataataataattccgtgcagggaatggaactgcactgaacattgtcaaatgccaaatctctttattta

SEQ ID NO: 67372 - DNA, 3584 bp, Zea Mays
aaaatcgtggtggtcgtcgtcgtcatcggtcgtggcacgtactagatagatagggcgtaagcgctcaaaagaaacgcgcgcacgcggacgaggagaggaccataaaaggtcgaggagtgagtggagatctcgccatccatttccatccgactatccgaggaggatcggtgacggtgggcggcgcgtcagcttcccccgacgcgtgcgtgcgtgcggccgtgcgcccgcgcgttcgccgtctgcccgtctccggccgtcgtcgtccggcggaagattcgcacgcacgccatgccgttcggttgaatttctcgggaaggagaagctgcccgttcgatgtcgacgtcggcgtcgacgccggggagagggcatcggatatggattcgggcgcacgcgcatcccgacgtgtggtggcttcgttcgtctccaagcccgagtcagcgggagattccatcttcaaacattgcattgcacagcgcgcactacgctaggaaccttcaaaagtgcgaacattgcggaaatatagttccgaggaagcttgtggatcaacactacgatgaaaaccatgctccggcatctttgtttccaaactccaagcttctcttagatgctgtcaattcataattgtagtattgttcaagtcaagcgttacattgagatgttgtttgatttacatattttgtaatgtgatgggtaattgataacatgtcaaattgtaattgtataccatactaggaattgatactagcatattcaaacttgttaccactaattctcgagtgcaaattattattgttgccatttatattacattttgtgaaccaagcagcatctaagaagcacagaagcctgcactattgtttttttcctaagttcttatcttactctgaagaagctgcaacattacatgaatgcatgtttacaatcattatgcctgcaaaatgtacagttgctttaaacagttatgaaagttttttttttatgtttgtggcaggcaacataatttattgtaaccactaagggtgtgtttgtttacctcttagattatataagttaaattatgatgaaagggtaaaagtgtaaaatattactttggggtcacaaataaaccgaaataagctattattctgtagcttatgttagcttatttatgattataaaatgatattttaccaccctatcctttcacagtaatttagcttatataatgtaggaaacaaacatggcctaagtaaacaaatgaaagtgtctttgtcagccactaagttaatgtagactgtagaaaaattaaagagatgacaatagatgtatactttactttttatttattattaccacctcttaatttattagttcatctgcatcactaatcttattgcgtatacagatgatttgctcactctgcaaacacacagtagaatgtgggtttgggatcttcatacaggcgtacaatgcccccaaaggatgctcgagtgccaatactgtcagtttgaactgcctgaagtcgatctttttgaacatcaggatgtgtggaaatcgaacagaatattgtcaaagttgcaggaagtatatcagacttcgtgaatggattggacatgaactccagttccatacgattttaaatgctgcatcacaactaagatgctagcaagggggtggagaacctggtgatcatcggctctggaccagccggttacaccgctgccatctacgccgcccgggcgaacctgaagcctgtcgtgtttgaagggtgccagatggggggtgtccccggcgggcagctgatgaccaccaccgaggtggagaatttccctggcttcccggacggtataaccgggcctgatctcatggacagaatgcgcaagcaagcggaacgctggggcgcagagctttaccaagaggatgttgagtttgtgaatgtaaagagcagcccgtttgttattcgtagcagcgaccgtgaggtgaaatgtcatagtctaattattgcaactggagctacggctaagcgcctccgtctgcctcgtgaagatgaattttggagtagaggcatcagcgcatgtgcaatatgtgatggagcttcaccacttttcaagggccaggttcttgcagttgttgggggtggtgatgtagctacagaggaagcagtatatttgacaaaatatgctcgacatgttcatttactagttagaaaggatcagctacgggcttccaaagctatgcaggacaggttgattatggcgaatgtttcagagtactcaacaaccccaacataacagtacatttcaatacagaagccatggatgttgttagcaatgacaaagggcagatgtctggcgttcatctgaagagaagagatacaggagaagaatcagttcttactgtgaaaggtttattttatggcataggacatactccaaacagtcagctgttgcagggccaaatcgaacttgatagtgctggctatattttagttaaagagggctcagccaaaacttcagttgatggtgtattcgctgctggtgatgttcaggatcatgaatggagacaagctattactgcagctggatctggatgcatagctgctttgtcagttgaaagatacttagttgccaatgatcttcttgtcgaatttcaccagcctgttcaagaagaaacaaagaaggatattacagataaagatgttcaaatgggctttgacatttctcacagaaaacacaagggacagtatgcactccgcaaactgtaccatgagagtccacgactcatttgtgttctatacacttctcccacatgtggtccttgcagaaccttaaaaccaattttgagcaaggtcatagacgagtacggcgagtttgttcatcttgttgaaattgacatcgaggaggatcctgaaatagcagaagctgcaggcatcatgggaacaccttgtgttcaattttttaagaacaaagaaatgctcaggactgtatcgggtgtgaaaaggaagaaggaatatcgggagtttatcgaggcgaacaaatgagttgagcacgcagtggaccccctcaaggttttttgaagtcagtagttcttttggcgctattttgacgccaccccgtcccccggtggccaatttttcatcagattttaagacgagcctggtctagtgccatgccaaaggaaactagccgatccctcatattggattatacagctcaaaatatattctttgctgtgtgtgtacaacatacatggagttgaccccccaccccctgctgatcaatcatcattgcggcattgccttgacactgccaatgtgcaaactatttccacggattagcatacattaatctgaagtatatatatactcggcaatgctgaatccattttgatcaaggaagcgactggaaatttgtttgtatgcgtgtggaagcctccgctcactgcagaactaccagtcaccaacgctccatcacacaccagcctcctgctgctgtggcgaaggtttcgccttgttatcgccaccgctctgtccccggcgaacccgtcacctgcgctgcccgcccgccgccgcgaggggaaactctcggccgcttctggaaaccacc

SEQ ID NO: 67373 - DNA, 2311 bp, Zea Mays
gtcgtggcacgtactagatagatagggcgtaagcgctcaaaagaaacgcgcgcacgcggacgaggagaggaccataaaaggtcgaggagtgagtggagatctcgccatccatttccatccgactatccgaggaggatcggtgacggtgggcggcgcgtcagcttcccccgacgcgtgcgtgcgtgcggccgtgcgcccgcgcgttcgccgtctgcccgtctccggccgtcgtcgtccggcggaagattcgcacgcacgccatgccgttcggttgaatttctcgggaaggagaagctgcccgttcgatgtcgacgtcggcgtcgacgccggggagagggcatcggatatggattcgggcgcacgcgcatcccgacgtgtggtggcttcgttcgtctccaagcccgagtcagcgggagattccatcttcaaacattgcattgcacagcgcgcactacgctaggaaccttcaaaagtgcgaacattgcggaaatatagttccgaggaagcttgtggatcaacactacgatgaaaaccatgctccggcatctttgtttccaaactccaagcttctcttagatgctgtcaattcataattgtagtattgttcaagtcaagcgttacattgagatgttgtttgatttacatattttgtaatgtgatgggtaattgataacatgtcaaattgtaattgtataccatactaggaattgatactagcatattcaaacttgttaccactaattctcgagtgcaaattattattgttgccatttatattacattttgtgaaccaagcagcatctaagaagcacagaagcctgcactattgtttttttcctaagttcttatcttactctgaagaagctgcaacattacatgaatgcatgtttacaatcattatgcctgcaaaatgtacagttgctttaaacagttatgaaagttttttttttatgtttgtggcaggcaacataatttattgtaaccactaagggtgtgtttgtttacctcttagattatataagttaaattatgatgaaagggtaaaagtgtaaaatattactttggggtcacaaataaaccgaaataagctattattctgtagcttatgttagcttatttatgattataaaatgatattttaccaccctatcctttcacagtaatttagcttatataatgtaggaaacaaacatggcctaagtaaacaaatgaaagtgtctttgtcagccactaagttaatgtagactgtagaaaaattaaagagatgacaatagatgtatactttactttttatttattattaccacctcttaatttattagttcatctgcatcactaatcttattgcgtatacagatgatttgctcactctgcaaacacacagtagaatgtgggtttgggatcttcatacaggcgtacaatgcccccaaaggatgctcgagtgccaatactgtcagtttgaactgcctgaagtcgatctttttgaacatcaggatgtgtggaaatcgaacagaatattgtcaaagttgcaggaagtatatcagacttcgtgaatggattggacatgaactccagttccatacgattttaaatgctgcatcacaactaagtgataggactccaccagtagagcagtcagtaccaaaaccagcgcgacctgccagtgcggcagtgccagtggttcacttcacaaacaactgctcttgacggttgcaataactggagttgcagttttgattggatcaatactgtaccaaaggggaagtagttctaggggatagtaatttgaagccccttgatgtataaattccttcataaccaagagtacagtttagtccccagttgaggaaaacgaaaaaaaagaagagaaacgtagagtacaactgaaattacaatatttatgaaaggaccgacctgaaatatcatatggattcacgcaaaaaactgtgacgtacagtcagtcaaaataacttaccctaatacgtttgtcacccaaaggttctcatcacttccgttttgttttttgaagctctttctttcattttcttcttcaagaatgtaaagctgacagcagaactttagatgcagctaggaactcgtctccgtctgaaagtttttactactagtttcagaaactttcaggacacttgtcaacgtatgtcaatctagcaaggactctgttgccccaataaataaaccacaaatccacaatcacaaaagcatctatgattttgtccttgtggcatttgcaaaataaaagacgcgacatcctcttgcattgctaactatccacggactccttcataagttc

SEQ ID NO: 67374 - DNA, 2399 bp, Zea Mays
gtcgtggcacgtactagatagatagggcgtaagcgctcaaaagaaacgcgcgcacgcggacgaggagaggaccataaaaggtcgaggagtgagtggagatctcgccatccatttccatccgactatccgaggaggatcggtgacggtgggcggcgcgtcagcttcccccgacgcgtgcgtgcgtgcggccgtgcgcccgcgcgttcgccgtctgcccgtctccggccgtcgtcgtccggcggaagattcgcacgcacgccatgccgttcggttgaatttctcgggaaggagaagctgcccgttcgatgtcgacgtcggcgtcgacgccggggagagggcatcggatatggattcgggcgcacgcgcatcccgacgtgtggtggcttcgttcgtctccaagcccgagtcagcgggagattccatcttcaaacattgcattgcacagcgcgcactacgctaggaaccttcaaaagtgcgaacattgcggaaatatagttccgaggaagcttgtggatcaacactacgatgaaaaccatgctccgatgatttgctcactctgcaaacacacagtagaatgtgggtttgggatcttcatacaggcgtacaatgcccccaaaggatgctcgagtgccaatactgtcagtttgaactgcctgaagtcgatctttttgaacatcaggatgtgtggaaatcgaacagaatattgtcaaagttgcaggaagtatatcagacttcgtgaatggattggacatgaactccagttccatacgattttaaatgctgcatcacaactaaggtgaaatgtcatagtctaattattgcaactggagctacggctaagcgcctccgtctgcctcgtgaagatgaattttggagtagaggcatcagcgcatgtgcaatatgtgatggagcttcaccacttttcaagggccaggttcttgcagttgttgggggtggtgatgtagctacagaggaagcagtatatttgacaaaatatgctcgacatgttcatttactagttagaaaggatcagctacgggcttccaaagctatgcaggacagagtactcaacaaccccaacataacagtacatttcaatacagaagccatggatgttgttagcaatgacaaagggcagatgtctggcgttcatctgaagagaagagatacaggagaagaatcagttcttactgtgaaaggtttattttatggcataggacatactccaaacagtcagctgttgcagggccaaatcgaacttgatagtgctggctatattttagttaaagagggctcagccaaaacttcagttgatggtgtattcgctgctggtgatgttcaggatcatgaatggagacaagctattactgcagctggatctggatgcatagctgctttgtcagttgaaagatacttagttgccaatgatcttcttgtcgaatttcaccagcctgttcaagaagaaacaaagaaggatattacagataaagatgttcaaatgggctttgacatttctcacagaaaacacaagggacagtatgcactccgcaaactgtaccatgagagtccacgactcatttgtgttctatacacttctcccacatgtggtccttgcagaaccttaaaaccaattttgagcaaggtcatagacgagtacggcgagtttgttcatcttgttgaaattgacatcgaggaggatcctgaaatagcagaagctgcaggcatcatgggaacaccttgtgttcaattttttaagaacaaagaaatgctcaggactgtatcgggtgtgaaaaggaagaaggaatatcgggagtttatcgaggcgaacaaatgagttgagcacgcagtggaccccctcaaggttttttgaagtcagtagttcttttggcgctattttgacgccaccccgtcccccggtggccaatttttcatcagattttaagacgagcctggtctagtgccatgccaaaggaaactagccgatccctcatattggattatacagctcaaaatatattctttgctgtgtgtgtacaacatacatggagttgaccccccaccccctgctgatcaatcatcattgcggcattgccttgacactgccaatgtgcaaactatttccacggattagcatacattaatctgaagtatatatatactcggcaatgctgaatccattttgatcaaggaagcgactggaaatttgtttgtatgcgtgtggaagcctccgctcactgcagaactaccagtcaccaacgctccatcacacaccagcctcctgctgctgtggcgaaggtttcgccttgttatcgccaccgctctgtccccggcgaacccgtcacctgcgctgcccgcccgccgccgcgaggggaaactctcggccgcttctggaaaccacc

SEQ ID NO: 67375 - DNA, 3567 bp, Zea Mays
gtcgtggcacgtactagatagatagggcgtaagcgctcaaaagaaacgcgcgcacgcggacgaggagaggaccataaaaggtcgaggagtgagtggagatctcgccatccatttccatccgactatccgaggaggatcggtgacggtgggcggcgcgtcagcttcccccgacgcgtgcgtgcgtgcggccgtgcgcccgcgcgttcgccgtctgcccgtctccggccgtcgtcgtccggcggaagattcgcacgcacgccatgccgttcggttgaatttctcgggaaggagaagctgcccgttcgatgtcgacgtcggcgtcgacgccggggagagggcatcggatatggattcgggcgcacgcgcatcccgacgtgtggtggcttcgttcgtctccaagcccgagtcagcgggagattccatcttcaaacattgcattgcacagcgcgcactacgctaggaaccttcaaaagtgcgaacattgcggaaatatagttccgaggaagcttgtggatcaacactacgatgaaaaccatgctccggcatctttgtttccaaactccaagcttctcttagatgctgtcaattcataattgtagtattgttcaagtcaagcgttacattgagatgttgtttgatttacatattttgtaatgtgatgggtaattgataacatgtcaaattgtaattgtataccatactaggaattgatactagcatattcaaacttgttaccactaattctcgagtgcaaattattattgttgccatttatattacattttgtgaaccaagcagcatctaagaagcacagaagcctgcactattgtttttttcctaagttcttatcttactctgaagaagctgcaacattacatgaatgcatgtttacaatcattatgcctgcaaaatgtacagttgctttaaacagttatgaaagttttttttttatgtttgtggcaggcaacataatttattgtaaccactaagggtgtgtttgtttacctcttagattatataagttaaattatgatgaaagggtaaaagtgtaaaatattactttggggtcacaaataaaccgaaataagctattattctgtagcttatgttagcttatttatgattataaaatgatattttaccaccctatcctttcacagtaatttagcttatataatgtaggaaacaaacatggcctaagtaaacaaatgaaagtgtctttgtcagccactaagttaatgtagactgtagaaaaattaaagagatgacaatagatgtatactttactttttatttattattaccacctcttaatttattagttcatctgcatcactaatcttattgcgtatacagatgatttgctcactctgcaaacacacagtagaatgtgggtttgggatcttcatacaggcgtacaatgcccccaaaggatgctcgagtgccaatactgtcagtttgaactgcctgaagtcgatctttttgaacatcaggatgtgtggaaatcgaacagaatattgtcaaagttgcaggaagtatatcagacttcgtgaatggattggacatgaactccagttccatacgattttaaatgctgcatcacaactaagatgctagcaagggggtggagaacctggtgatcatcggctctggaccagccggttacaccgctgccatctacgccgcccgggcgaacctgaagcctgtcgtgtttgaagggtgccagatggggggtgtccccggcgggcagctgatgaccaccaccgaggtggagaatttccctggcttcccggacggtataaccgggcctgatctcatggacagaatgcgcaagcaagcggaacgctggggcgcagagctttaccaagaggatgttgagtttgtgaatgtaaagagcagcccgtttgttattcgtagcagcgaccgtgagggcatatgtaggtgaaatgtcatagtctaattattgcaactggagctacggctaagcgcctccgtctgcctcgtgaagatgaattttggagtagaggcatcagcgcatgtgcaatatgtgatggagcttcaccacttttcaagggccaggttcttgcagttgttgggggtggtgatgtagctacagaggaagcagtatatttgacaaaatatgctcgacatgttcatttactagttagaaaggatcagctacgggcttccaaagctatgcaggacaggttgattatggcgaatgtttcagagtactcaacaaccccaacataacagtacatttcaatacagaagccatggatgttgttagcaatgacaaagggcagatgtctggcgttcatctgaagagaagagatacaggagaagaatcagttcttactgtgaaaggtttattttatggcataggacatactccaaacagtcagctgttgcagggccaaatcgaacttgatagtgctggctatattttagttaaagagggctcagccaaaacttcagttgatggtgtattcgctgctggtgatgttcaggatcatgaatggagacaagctattactgcagctggatctggatgcatagctgctttgtcagttgaaagatacttagttgccaatgatcttcttgtcgaatttcaccagcctgttcaagaagaaacaaagaaggatattacagataaagatgttcaaatgggctttgacatttctcacagaaaacacaagggacagtatgcactccgcaaactgtaccatgagagtccacgactcatttgtgttctatacacttctcccacatgtggtccttgcagaaccttaaaaccaattttgagcaaggtcatagacgagtacggcgagtttgttcatcttgttgaaattgacatcgaggaggatcctgaaatagcagaagctgcaggcatcatgggaacaccttgtgttcaattttttaagaacaaagaaatgctcaggactgtatcgggtgtgaaaaggaagaaggaatatcgggagtttatcgaggcgaacaaatgagttgagcacgcagtggaccccctcaaggttttttgaagtcagtagttcttttggcgctattttgacgccaccccgtcccccggtggccaatttttcatcagattttaagacgagcctggtctagtgccatgccaaaggaaactagccgatccctcatattggattatacagctcaaaatatattctttgctgtgtgtgtacaacatacatggagttgaccccccaccccctgctgatcaatcatcattgcggcattgccttgacactgccaatgtgcaaactatttccacggattagcatacattaatctgaagtatatatatactcggcaatgctgaatccattttgatcaaggaagcgactggaaatttgtttgtatgcgtgtggaagcctccgctcactgcagaactaccagtcaccaacgctccatcacacaccagcctcctgctgctgtggcgaaggtttcgccttgttatcgccaccgctctgtccccggcgaacccgtcacctgcgctgcccgcccgccgccgcgaggggaaactctcggccgcttctggaaaccacc

SEQ ID NO: 67376 - DNA, 3213 bp, Zea Mays
gtcgtggcacgtactagatagatagggcgtaagcgctcaaaagaaacgcgcgcacgcggacgaggagaggaccataaaaggtcgaggagtgagtggagatctcgccatccatttccatccgactatccgaggaggatcggtgacggtgggcggcgcgtcagcttcccccgacgcgtgcgtgcgtgcggccgtgcgcccgcgcgttcgccgtctgcccgtctccggccgtcgtcgtccggcggaagattcgcacgcacgccatgccgttcggttgaatttctcgggaaggagaagctgcccgttcgatgtcgacgtcggcgtcgacgccggggagagggcatcggatatggattcgggcgcacgcgcatcccgacgtgtggtggcttcgttcgtctccaagcccgagtcagcgggagattccatcttcaaacattgcattgcacagcgcgcactacgctaggaaccttcaaaagtgcgaacattgcggaaatatagttccgaggaagcttgtggatcaacactacgatgaaaaccatgctccggcatctttgtttccaaactccaagcttctcttagatgctgtcaattcataattgtagtattgttcaagtcaagcgttacattgagatgttgtttgatttacatattttgtaatgtgatgggtaattgataacatgtcaaattgtaattgtataccatactaggaattgatactagcatattcaaacttgttaccactaattctcgagtgcaaattattattgttgccatttatattacattttgtgaaccaagcagcatctaagaagcacagaagcctgcactattgtttttttcctaagttcttatcttactctgaagaagctgcaacattacatgaatgcatgtttacaatcattatgcctgcaaaatgtacagttgctttaaacagttatgaaagttttttttttatgtttgtggcaggcaacataatttattgtaaccactaagggtgtgtttgtttacctcttagattatataagttaaattatgatgaaagggtaaaagtgtaaaatattactttggggtcacaaataaaccgaaataagctattattctgtagcttatgttagcttatttatgattataaaatgatattttaccaccctatcctttcacagtaatttagcttatataatgtaggaaacaaacatggcctaagtaaacaaatgaaagtgtctttgtcagccactaagttaatgtagactgtagaaaaattaaagagatgacaatagatgtatactttactttttatttattattaccacctcttaatttattagttcatctgcatcactaatcttattgcgtatacagatgatttgctcactctgcaaacacacagtagaatgtgggtttgggatcttcatacaggcgtacaatgcccccaaaggatgctcgagtgccaatactgtcagtttgaactgcctgaagtcgatctttttgaacatcaggatgtgtggaaatcgaacagaatattgtcaaagttgcaggaagtatatcagacttcgtgaatggattggacatgaactccagttccatacgattttaaatgctgcatcacaactaaggtgaaatgtcatagtctaattattgcaactggagctacggctaagcgcctccgtctgcctcgtgaagatgaattttggagtagaggcatcagcgcatgtgcaatatgtgatggagcttcaccacttttcaagggccaggttcttgcagttgttgggggtggtgatgtagctacagaggaagcagtatatttgacaaaatatgctcgacatgttcatttactagttagaaaggatcagctacgggcttccaaagctatgcaggacagagtactcaacaaccccaacataacagtacatttcaatacagaagccatggatgttgttagcaatgacaaagggcagatgtctggcgttcatctgaagagaagagatacaggagaagaatcagttcttactgtgaaaggtttattttatggcataggacatactccaaacagtcagctgttgcagggccaaatcgaacttgatagtgctggctatattttagttaaagagggctcagccaaaacttcagttgatggtgtattcgctgctggtgatgttcaggatcatgaatggagacaagctattactgcagctggatctggatgcatagctgctttgtcagttgaaagatacttagttgccaatgatcttcttgtcgaatttcaccagcctgttcaagaagaaacaaagaaggatattacagataaagatgttcaaatgggctttgacatttctcacagaaaacacaagggacagtatgcactccgcaaactgtaccatgagagtccacgactcatttgtgttctatacacttctcccacatgtggtccttgcagaaccttaaaaccaattttgagcaaggtcatagacgagtacggcgagtttgttcatcttgttgaaattgacatcgaggaggatcctgaaatagcagaagctgcaggcatcatgggaacaccttgtgttcaattttttaagaacaaagaaatgctcaggactgtatcgggtgtgaaaaggaagaaggaatatcgggagtttatcgaggcgaacaaatgagttgagcacgcagtggaccccctcaaggttttttgaagtcagtagttcttttggcgctattttgacgccaccccgtcccccggtggccaatttttcatcagattttaagacgagcctggtctagtgccatgccaaaggaaactagccgatccctcatattggattatacagctcaaaatatattctttgctgtgtgtgtacaacatacatggagttgaccccccaccccctgctgatcaatcatcattgcggcattgccttgacactgccaatgtgcaaactatttccacggattagcatacattaatctgaagtatatatatactcggcaatgctgaatccattttgatcaaggaagcgactggaaatttgtttgtatgcgtgtggaagcctccgctcactgcagaactaccagtcaccaacgctccatcacacaccagcctcctgctgctgtggcgaaggtttcgccttgttatcgccaccgctctgtccccggcgaacccgtcacctgcgctgcccgcccgccgccgcgaggggaaactctcggccgcttctggaaaccacc

SEQ ID NO: 67377 - DNA, 2422 bp, Zea Mays
gtcgtggcacgtactagatagatagggcgtaagcgctcaaaagaaacgcgcgcacgcggacgaggagaggaccataaaaggtcgaggagtgagtggagatctcgccatccatttccatccgactatccgaggaggatcggtgacggtgggcggcgcgtcagcttcccccgacgcgtgcgtgcgtgcggccgtgcgcccgcgcgttcgccgtctgcccgtctccggccgtcgtcgtccggcggaagattcgcacgcacgccatgccgttcggttgaatttctcgggaaggagaagctgcccgttcgatgtcgacgtcggcgtcgacgccggggagagggcatcggatatggattcgggcgcacgcgcatcccgacgtgtggtggcttcgttcgtctccaagcccgagtcagcgggagattccatcttcaaacattgcattgcacagcgcgcactacgctaggaaccttcaaaagtgcgaacattgcggaaatatagttccgaggaagcttgtggatcaacactacgatgaaaaccatgctccgatgatttgctcactctgcaaacacacagtagaatgtgggtttgggatcttcatacaggcgtacaatgcccccaaaggatgctcgagtgccaatactgtcagtttgaactgcctgaagtcgatctttttgaacatcaggatgtgtggaaatcgaacagaatattgtcaaagttgcaggaagtatatcagacttcgtgaatggattggacatgaactccagttccatacgattttaaatgctgcatcacaactaaggtgaaatgtcatagtctaattattgcaactggagctacggctaagcgcctccgtctgcctcgtgaagatgaattttggagtagaggcatcagcgcatgtgcaatatgtgatggagcttcaccacttttcaagggccaggttcttgcagttgttgggggtggtgatgtagctacagaggaagcagtatatttgacaaaatatgctcgacatgttcatttactagttagaaaggatcagctacgggcttccaaagctatgcaggacaggttgattatggcgaatgtttcagagtactcaacaaccccaacataacagtacatttcaatacagaagccatggatgttgttagcaatgacaaagggcagatgtctggcgttcatctgaagagaagagatacaggagaagaatcagttcttactgtgaaaggtttattttatggcataggacatactccaaacagtcagctgttgcagggccaaatcgaacttgatagtgctggctatattttagttaaagagggctcagccaaaacttcagttgatggtgtattcgctgctggtgatgttcaggatcatgaatggagacaagctattactgcagctggatctggatgcatagctgctttgtcagttgaaagatacttagttgccaatgatcttcttgtcgaatttcaccagcctgttcaagaagaaacaaagaaggatattacagataaagatgttcaaatgggctttgacatttctcacagaaaacacaagggacagtatgcactccgcaaactgtaccatgagagtccacgactcatttgtgttctatacacttctcccacatgtggtccttgcagaaccttaaaaccaattttgagcaaggtcatagacgagtacggcgagtttgttcatcttgttgaaattgacatcgaggaggatcctgaaatagcagaagctgcaggcatcatgggaacaccttgtgttcaattttttaagaacaaagaaatgctcaggactgtatcgggtgtgaaaaggaagaaggaatatcgggagtttatcgaggcgaacaaatgagttgagcacgcagtggaccccctcaaggttttttgaagtcagtagttcttttggcgctattttgacgccaccccgtcccccggtggccaatttttcatcagattttaagacgagcctggtctagtgccatgccaaaggaaactagccgatccctcatattggattatacagctcaaaatatattctttgctgtgtgtgtacaacatacatggagttgaccccccaccccctgctgatcaatcatcattgcggcattgccttgacactgccaatgtgcaaactatttccacggattagcatacattaatctgaagtatatatatactcggcaatgctgaatccattttgatcaaggaagcgactggaaatttgtttgtatgcgtgtggaagcctccgctcactgcagaactaccagtcaccaacgctccatcacacaccagcctcctgctgctgtggcgaaggtttcgccttgttatcgccaccgctctgtccccggcgaacccgtcacctgcgctgcccgcccgccgccgcgaggggaaactctcggccgcttctggaaaccacc

SEQ ID NO: 67378 - DNA, 2207 bp, Zea Mays
tgggcctcgtctccgagcctcccccgacagtccgacacgaacaggagagagggcccctttctctctctctcctcggcctcctagtaaatcgtcctattccgtttctagcgcctccaggctccaagtctccaacctctctccccttgccccccgtcctctgctccgctccgcaccatcgccgccccgaaattgctcgactcggcacaggcgagacgtggatctccgcggaggacctccgatcaccgatccatggcggccgcggactccgaccccgccatctccatctccacctgcccgcactgtcagcgggagattccatcttcaaacattgcattgcacagcgcgcactacgctaggaaccttcaaaagtgcgaacattgcggaaatatagttccgaggaagcttgtggatcaacactacgatgaaaaccatgctccggcatctttgtttccaaactccaagcttctcttagatgctgtcaattcataattgtagtattgttcaagtcaagcgttacattgagatgttgtttgatttacatattttgtaatgtgatgggtaattgataacatgtcaaattgtaattgtataccatactaggaattgatactagcatattcaaacttgttaccactaattctcgagtgcaaattattattgttgccatttatattacattttgtgaaccaagcagcatctaagaagcacagaagcctgcactattgtttttttcctaagttcttatcttactctgaagaagctgcaacattacatgaatgcatgtttacaatcattatgcctgcaaaatgtacagttgctttaaacagttatgaaagttttttttttatgtttgtggcaggcaacataatttattgtaaccactaagggtgtgtttgtttacctcttagattatataagttaaattatgatgaaagggtaaaagtgtaaaatattactttggggtcacaaataaaccgaaataagctattattctgtagcttatgttagcttatttatgattataaaatgatattttaccaccctatcctttcacagtaatttagcttatataatgtaggaaacaaacatggcctaagtaaacaaatgaaagtgtctttgtcagccactaagttaatgtagactgtagaaaaattaaagagatgacaatagatgtatactttactttttatttattattaccacctcttaatttattagttcatctgcatcactaatcttattgcgtatacagatgatttgctcactctgcaaacacacagtagaatgtgggtttgggatcttcatacaggcgtacaatgcccccaaaggatgctcgagtgccaatactgtcagtttgaactgcctgaagtcgatctttttgaacatcaggatgtgtggaaatcgaacagaatattgtcaaagttgcaggaagtatatcagacttcgtgaatggattggacatgaactccagttccatacgattttaaatgctgcatcacaactaagtgataggactccaccagtagagcagtcagtaccaaaaccagcgcgacctgccagtgcggcagtgccagtggttcacttcacaaacaactgctcttgacggttgcaataactggagttgcagttttgattggatcaatactgtaccaaaggggaagtagttctaggggatagtaatttgaagccccttgatgtataaattccttcataaccaagagtacagtttagtccccagttgaggaaaacgaaaaaaaagaagagaaacgtagagtacaactgaaattacaatatttatgaaaggaccgacctgaaatatcatatggattcacgcaaaaaactgtgacgtacagtcagtcaaaataacttaccctaatacgtttgtcacccaaaggttctcatcacttccgttttgttttttgaagctctttctttcattttcttcttcaagaatgtaaagctgacagcagaactttagatgcagctaggaactcgtctccgtctgaaagtttttactactagtttcagaaactttcaggacacttgtcaacgtatgtcaatctagcaaggactctgttgccccaataaataaaccacaaatccacaatcacaaaagcatctatgattttgtccttgtggcatttgcaaaataaaagacgcgacatcctcttgcattgctaactatccacggactccttcataagttc

SEQ ID NO: 67379 - DNA, 1282 bp, Zea Mays
ctccaggctccaagtctccaacctctctccccttgccccccgtcctctgctccgctccgcaccatcgccgccccgaaattgctcgactcggcacaggcgagacgtggatctccgcggaggacctccgatcaccgatccatggcggccgcggactccgaccccgccatctccatctccacctgcccgcactgtcagcgggagattccatcttcaaacattgcattgcacagcgcgcactacgctaggaaccttcaaaagtgcgaacattgcggaaatatagttccgaggaagcttgtggatcaacactacgatgaaaaccatgctccgatgatttgctcactctgcaaacacacagtagaatgtgggtttgggatcttcatacaggcgtacaatgcccccaaaggatgctcgagtgccaatactgtcagtttgaactgcctgaagtcgatctttttgaacatcaggatgtgtggaaatcgaacagaatattgtcaaagttgcaggaagtatatcagacttcgtgaatggattggacatgaactccagttccatacgattttaaatgctgcatcacaactaagtgataggactccaccagtagagcagtcagtaccaaaaccagcgcgacctgccagtgcggcagtgccagtggttcacttcacaaacaactgctcttgacggttgcaataactggagttgcagttttgattggatcaatactgtaccaaaggggaagtagttctaggggatagtaatttgaagccccttgatgtataaattccttcataaccaagagtacagtttagtccccagttgaggaaaacgaaaaaaaagaagagaaacgtagagtacaactgaaattacaatatttatgaaaggaccgacctgaaatatcatatggattcacgcaaaaaactgtgacgtacagtcagtcaaaataacttaccctaatacgtttgtcacccaaaggttctcatcacttccgttttgttttttgaagctctttctttcattttcttcttcaagaatgtaaagctgacagcagaactttagatgcagctaggaactcgtctccgtctgaaagtttttactactagtttcagaaactttcaggacacttgtcaacgtatgtcaatctagcaaggactctgttgccccaataaataaaccacaaatccacaatcacaaaagcatctatgattttgtccttgtggcatttgcaaaataaaagacgcgacatcctcttgcattgctaactatccacggactccttcataagttc

SEQ ID NO: 67380 - DNA, 2988 bp, Zea Mays
caagtctccaacctctctccccttgccccccgtcctctgctccgctccgcaccatcgccgccccgaaattgctcgactcggcacaggcgagacgtggatctccgcggaggacctccgatcaccgatccatggcggccgcggactccgaccccgccatctccatctccacctgcccgcactgtcagcgggagattccatcttcaaacattgcattgcacagcgcgcactacgctaggaaccttcaaaagtgcgaacattgcggaaatatagttccgaggaagcttgtggatcaacactacgatgaaaaccatgctccggcatctttgtttccaaactccaagcttctcttagatgctgtcaattcataattgtagtattgttcaagtcaagcgttacattgagatgttgtttgatttacatattttgtaatgtgatgggtaattgataacatgtcaaattgtaattgtataccatactaggaattgatactagcatattcaaacttgttaccactaattctcgagtgcaaattattattgttgccatttatattacattttgtgaaccaagcagcatctaagaagcacagaagcctgcactattgtttttttcctaagttcttatcttactctgaagaagctgcaacattacatgaatgcatgtttacaatcattatgcctgcaaaatgtacagttgctttaaacagttatgaaagttttttttttatgtttgtggcaggcaacataatttattgtaaccactaagggtgtgtttgtttacctcttagattatataagttaaattatgatgaaagggtaaaagtgtaaaatattactttggggtcacaaataaaccgaaataagctattattctgtagcttatgttagcttatttatgattataaaatgatattttaccaccctatcctttcacagtaatttagcttatataatgtaggaaacaaacatggcctaagtaaacaaatgaaagtgtctttgtcagccactaagttaatgtagactgtagaaaaattaaagagatgacaatagatgtatactttactttttatttattattaccacctcttaatttattagttcatctgcatcactaatcttattgcgtatacagatgatttgctcactctgcaaacacacagtagaatgtgggtttgggatcttcatacaggcgtacaatgcccccaaaggatgctcgagtgccaatactgtcagtttgaactgcctgaagtcgatctttttgaacatcaggatgtgtggaaatcgaacagaatattgtcaaagttgcaggaagtatatcagacttcgtgaatggattggacatgaactccagttccatacgattttaaatgctgcatcacaactaaggtgaaatgtcatagtctaattattgcaactggagctacggctaagcgcctccgtctgcctcgtgaagatgaattttggagtagaggcatcagcgcatgtgcaatatgtgatggagcttcaccacttttcaagggccaggttcttgcagttgttgggggtggtgatgtagctacagaggaagcagtatatttgacaaaatatgctcgacatgttcatttactagttagaaaggatcagctacgggcttccaaagctatgcaggacagagtactcaacaaccccaacataacagtacatttcaatacagaagccatggatgttgttagcaatgacaaagggcagatgtctggcgttcatctgaagagaagagatacaggagaagaatcagttcttactgtgaaaggtttattttatggcataggacatactccaaacagtcagctgttgcagggccaaatcgaacttgatagtgctggctatattttagttaaagagggctcagccaaaacttcagttgatggtgtattcgctgctggtgatgttcaggatcatgaatggagacaagctattactgcagctggatctggatgcatagctgctttgtcagttgaaagatacttagttgccaatgatcttcttgtcgaatttcaccagcctgttcaagaagaaacaaagaaggatattacagataaagatgttcaaatgggctttgacatttctcacagaaaacacaagggacagtatgcactccgcaaactgtaccatgagagtccacgactcatttgtgttctatacacttctcccacatgtggtccttgcagaaccttaaaaccaattttgagcaaggtcatagacgagtacggcgagtttgttcatcttgttgaaattgacatcgaggaggatcctgaaatagcagaagctgcaggcatcatgggaacaccttgtgttcaattttttaagaacaaagaaatgctcaggactgtatcgggtgtgaaaaggaagaaggaatatcgggagtttatcgaggcgaacaaatgagttgagcacgcagtggaccccctcaaggttttttgaagtcagtagttcttttggcgctattttgacgccaccccgtcccccggtggccaatttttcatcagattttaagacgagcctggtctagtgccatgccaaaggaaactagccgatccctcatattggattatacagctcaaaatatattctttgctgtgtgtgtacaacatacatggagttgaccccccaccccctgctgatcaatcatcattgcggcattgccttgacactgccaatgtgcaaactatttccacggattagcatacattaatctgaagtatatatatactcggcaatgctgaatccattttgatcaaggaagcgactggaaatttgtttgtatgcgtgtggaagcctccgctcactgcagaactaccagtcaccaacgctccatcacacaccagcctcctgctgctgtggcgaaggtttcgccttgttatcgccaccgctctgtccccggcgaacccgtcacctgcgctgcccgcccgccgccgcgaggggaaactctcggccgcttctggaaaccacc

SEQ ID NO: 67381 - DNA, 3331 bp, Zea Mays
caagtctccaacctctctccccttgccccccgtcctctgctccgctccgcaccatcgccgccccgaaattgctcgactcggcacaggcgagacgtggatctccgcggaggacctccgatcaccgatccatggcggccgcggactccgaccccgccatctccatctccacctgcccgcactgtcagcgggagattccatcttcaaacattgcattgcacagcgcgcactacgctaggaaccttcaaaagtgcgaacattgcggaaatatagttccgaggaagcttgtggatcaacactacgatgaaaaccatgctccggcatctttgtttccaaactccaagcttctcttagatgctgtcaattcataattgtagtattgttcaagtcaagcgttacattgagatgttgtttgatttacatattttgtaatgtgatgggtaattgataacatgtcaaattgtaattgtataccatactaggaattgatactagcatattcaaacttgttaccactaattctcgagtgcaaattattattgttgccatttatattacattttgtgaaccaagcagcatctaagaagcacagaagcctgcactattgtttttttcctaagttcttatcttactctgaagaagctgcaacattacatgaatgcatgtttacaatcattatgcctgcaaaatgtacagttgctttaaacagttatgaaagttttttttttatgtttgtggcaggcaacataatttattgtaaccactaagggtgtgtttgtttacctcttagattatataagttaaattatgatgaaagggtaaaagtgtaaaatattactttggggtcacaaataaaccgaaataagctattattctgtagcttatgttagcttatttatgattataaaatgatattttaccaccctatcctttcacagtaatttagcttatataatgtaggaaacaaacatggcctaagtaaacaaatgaaagtgtctttgtcagccactaagttaatgtagactgtagaaaaattaaagagatgacaatagatgtatactttactttttatttattattaccacctcttaatttattagttcatctgcatcactaatcttattgcgtatacagatgatttgctcactctgcaaacacacagtagaatgtgggtttgggatcttcatacaggcgtacaatgcccccaaaggatgctcgagtgccaatactgtcagtttgaactgcctgaagtcgatctttttgaacatcaggatgtgtggaaatcgaacagaatattgtcaaagttgcaggaagtatatcagacttcgtgaatggattggacatgaactccagttccatacgattttaaatgctgcatcacaactaagatgctagcaagggggtggagaacctggtgatcatcggctctggaccagccggttacaccgctgccatctacgccgcccgggcgaacctgaagcctgtcgtgtttgaagggtgccagatggggggtgtccccggcgggcagctgatgaccaccaccgaggtggagaatttccctggcttcccggacggtataaccgggcctgatctcatggacagaatgcgcaagcaagcggaacgctggggcgcagagctttaccaagaggatgttgagtttgtgaatgtaaagagcagcccgtttgttattcgtagcagcgaccgtgaggtgaaatgtcatagtctaattattgcaactggagctacggctaagcgcctccgtctgcctcgtgaagatgaattttggagtagaggcatcagcgcatgtgcaatatgtgatggagcttcaccacttttcaagggccaggttcttgcagttgttgggggtggtgatgtagctacagaggaagcagtatatttgacaaaatatgctcgacatgttcatttactagttagaaaggatcagctacgggcttccaaagctatgcaggacaggttgattatggcgaatgtttcagagtactcaacaaccccaacataacagtacatttcaatacagaagccatggatgttgttagcaatgacaaagggcagatgtctggcgttcatctgaagagaagagatacaggagaagaatcagttcttactgtgaaaggtttattttatggcataggacatactccaaacagtcagctgttgcagggccaaatcgaacttgatagtgctggctatattttagttaaagagggctcagccaaaacttcagttgatggtgtattcgctgctggtgatgttcaggatcatgaatggagacaagctattactgcagctggatctggatgcatagctgctttgtcagttgaaagatacttagttgccaatgatcttcttgtcgaatttcaccagcctgttcaagaagaaacaaagaaggatattacagataaagatgttcaaatgggctttgacatttctcacagaaaacacaagggacagtatgcactccgcaaactgtaccatgagagtccacgactcatttgtgttctatacacttctcccacatgtggtccttgcagaaccttaaaaccaattttgagcaaggtcatagacgagtacggcgagtttgttcatcttgttgaaattgacatcgaggaggatcctgaaatagcagaagctgcaggcatcatgggaacaccttgtgttcaattttttaagaacaaagaaatgctcaggactgtatcgggtgtgaaaaggaagaaggaatatcgggagtttatcgaggcgaacaaatgagttgagcacgcagtggaccccctcaaggttttttgaagtcagtagttcttttggcgctattttgacgccaccccgtcccccggtggccaatttttcatcagattttaagacgagcctggtctagtgccatgccaaaggaaactagccgatccctcatattggattatacagctcaaaatatattctttgctgtgtgtgtacaacatacatggagttgaccccccaccccctgctgatcaatcatcattgcggcattgccttgacactgccaatgtgcaaactatttccacggattagcatacattaatctgaagtatatatatactcggcaatgctgaatccattttgatcaaggaagcgactggaaatttgtttgtatgcgtgtggaagcctccgctcactgcagaactaccagtcaccaacgctccatcacacaccagcctcctgctgctgtggcgaaggtttcgccttgttatcgccaccgctctgtccccggcgaacccgtcacctgcgctgcccgcccgccgccgcgaggggaaactctcggccgcttctggaaaccacc

SEQ ID NO: 67382 - DNA, 3011 bp, Zea Mays
caagtctccaacctctctccccttgccccccgtcctctgctccgctccgcaccatcgccgccccgaaattgctcgactcggcacaggcgagacgtggatctccgcggaggacctccgatcaccgatccatggcggccgcggactccgaccccgccatctccatctccacctgcccgcactgtcagcgggagattccatcttcaaacattgcattgcacagcgcgcactacgctaggaaccttcaaaagtgcgaacattgcggaaatatagttccgaggaagcttgtggatcaacactacgatgaaaaccatgctccggcatctttgtttccaaactccaagcttctcttagatgctgtcaattcataattgtagtattgttcaagtcaagcgttacattgagatgttgtttgatttacatattttgtaatgtgatgggtaattgataacatgtcaaattgtaattgtataccatactaggaattgatactagcatattcaaacttgttaccactaattctcgagtgcaaattattattgttgccatttatattacattttgtgaaccaagcagcatctaagaagcacagaagcctgcactattgtttttttcctaagttcttatcttactctgaagaagctgcaacattacatgaatgcatgtttacaatcattatgcctgcaaaatgtacagttgctttaaacagttatgaaagttttttttttatgtttgtggcaggcaacataatttattgtaaccactaagggtgtgtttgtttacctcttagattatataagttaaattatgatgaaagggtaaaagtgtaaaatattactttggggtcacaaataaaccgaaataagctattattctgtagcttatgttagcttatttatgattataaaatgatattttaccaccctatcctttcacagtaatttagcttatataatgtaggaaacaaacatggcctaagtaaacaaatgaaagtgtctttgtcagccactaagttaatgtagactgtagaaaaattaaagagatgacaatagatgtatactttactttttatttattattaccacctcttaatttattagttcatctgcatcactaatcttattgcgtatacagatgatttgctcactctgcaaacacacagtagaatgtgggtttgggatcttcatacaggcgtacaatgcccccaaaggatgctcgagtgccaatactgtcagtttgaactgcctgaagtcgatctttttgaacatcaggatgtgtggaaatcgaacagaatattgtcaaagttgcaggaagtatatcagacttcgtgaatggattggacatgaactccagttccatacgattttaaatgctgcatcacaactaaggtgaaatgtcatagtctaattattgcaactggagctacggctaagcgcctccgtctgcctcgtgaagatgaattttggagtagaggcatcagcgcatgtgcaatatgtgatggagcttcaccacttttcaagggccaggttcttgcagttgttgggggtggtgatgtagctacagaggaagcagtatatttgacaaaatatgctcgacatgttcatttactagttagaaaggatcagctacgggcttccaaagctatgcaggacaggttgattatggcgaatgtttcagagtactcaacaaccccaacataacagtacatttcaatacagaagccatggatgttgttagcaatgacaaagggcagatgtctggcgttcatctgaagagaagagatacaggagaagaatcagttcttactgtgaaaggtttattttatggcataggacatactccaaacagtcagctgttgcagggccaaatcgaacttgatagtgctggctatattttagttaaagagggctcagccaaaacttcagttgatggtgtattcgctgctggtgatgttcaggatcatgaatggagacaagctattactgcagctggatctggatgcatagctgctttgtcagttgaaagatacttagttgccaatgatcttcttgtcgaatttcaccagcctgttcaagaagaaacaaagaaggatattacagataaagatgttcaaatgggctttgacatttctcacagaaaacacaagggacagtatgcactccgcaaactgtaccatgagagtccacgactcatttgtgttctatacacttctcccacatgtggtccttgcagaaccttaaaaccaattttgagcaaggtcatagacgagtacggcgagtttgttcatcttgttgaaattgacatcgaggaggatcctgaaatagcagaagctgcaggcatcatgggaacaccttgtgttcaattttttaagaacaaagaaatgctcaggactgtatcgggtgtgaaaaggaagaaggaatatcgggagtttatcgaggcgaacaaatgagttgagcacgcagtggaccccctcaaggttttttgaagtcagtagttcttttggcgctattttgacgccaccccgtcccccggtggccaatttttcatcagattttaagacgagcctggtctagtgccatgccaaaggaaactagccgatccctcatattggattatacagctcaaaatatattctttgctgtgtgtgtacaacatacatggagttgaccccccaccccctgctgatcaatcatcattgcggcattgccttgacactgccaatgtgcaaactatttccacggattagcatacattaatctgaagtatatatatactcggcaatgctgaatccattttgatcaaggaagcgactggaaatttgtttgtatgcgtgtggaagcctccgctcactgcagaactaccagtcaccaacgctccatcacacaccagcctcctgctgctgtggcgaaggtttcgccttgttatcgccaccgctctgtccccggcgaacccgtcacctgcgctgcccgcccgccgccgcgaggggaaactctcggccgcttctggaaaccacc

SEQ ID NO: 67383 - DNA, 950 bp, Zea Mays
ccccgagcaggagacatagtcacacctcgcccgaggccaacctcggccaggagacaatcgcggctcacgaggccaacctcggacgagagtcagtcacggctcgcgaggctaatctcgtgcgggagacgcagtcacgactcgaccgaggccaacctcgggtgggagacaatcatggcttgtgaggccaacctcgggcgggagacacggtcacgcctcacctgaggacaacctcgggacggtaactgctacaacctacgcgattgatttgccgtgtaattaccagaaggtcgtttgtgtttcgttgcaacgcacgggcatcatactagatagatctgctttacatcgtctagacatgtgcaggtaataagcatttaacgaatagtttgtttaaatgatgtaatcggtctaccacgtcgtaatctgcagtgggcaccatactagaaagtgggtgttgcagagattaataagtctgttcccaacagttacctcacatagatagatcttgtttaaatgaggtaacctgtctaccatgccacttcaaaaacatagatatgcacatgtaataaatttttaacaaatattgtgtgttccgttgtaacacacgacaaccatactagtataatacacctttagttccagtatataaggcgtaaccacatctggttcaaagacaaaaaaattcatttaattctctctatatcactgtaccaataatgtacgtgtgcatagagagcacgccttatattgtgggacaaaataaaaaatggttacgacttatattctaaaatggatgggtatataacaaacatatcaaagcacaaacataagtaattaataaaatgacaatggtgagttgggggcaggccggcagaaacaaaggagatgccttgagcccaatcaacggccgtctgctcgagccttcgtccttgggctgctgccgcgacgagcac

SEQ ID NO: 67384 - DNA, 3400 bp, Zea Mays
atgacccacccacccacagccacacaggccgagctgaagggagggggactgcctgcgggctgcggcttccggcgcaagatgccatgtggactccggatgactcgaaagtccatccatctcctctctatctctctatctatctatttcacgcctccacggctccacggctgctgccagcctgactagtgaggtgattgccgcagcggcggtcggccagagcgcgtgtgctcctccccagcataatcccaccaccatcgcgcacccgcccacctcaagcgagcggccccaattcccagccaccgcaagtggcttaaccctcgctcccgcacccccactcttccaccgcacgcacccgcgcgagcgagtgcggcagatcgcggccggccgctgggtccggtgcagttccgggctgcggcgccgggccacagttgatgcggacgatccgaggaggacgggacgggatggcggcttcggcggcgcctgggtcggctgggaggcaggcgcgcggagtcgcggcagcggcgaccggaaacgcggtatttaagagtggccctctcttcatatcatcgaaaggaattggatggaaaacgtggaaaaaacgctggttcatcctcacacgaacatcactggttttcttcaagagtgatcctagtacgttaccacagagaagtgaagtgaaccttacattgggaggaattgaccttaataattctgggagtgtagtagtcagggaagacaaaaggctactgactgtcctttttccagatggccgtgatggccgtgccttcaccttgaaggcagaaagttctgaagatttgtttgagtggaaaacagcgctggaagaagctcttgcacaagctccaaatgcagctcttgtgatggggcataatggaatatttcgcaatgacacaacagatggggaaagaagagacctatcaaatcaatagttgttggcaggccaatactgcttgcactggaagatatagatggcagtccttcttttctggaaaaagctttgtgtttccttgagaaacatggaatgaaggtggaaggaattttgcgtcaagctgcagatgtggaggaggttgacaggagattgcaagaatatgagcaaggaaggacagaatttgcaccagaagaggatgctcatgttgttggtgactgtgtaaagcatgttctccgtgagcttccatcttctcctgttccagcttcgtgctgtacagcattattggaagctttccgtctggaaaccaaggaatctcagatcaaatccatgcgtgcagcaatatctgaaacatttcctgagcctaataggcggctgctacagagacttttgaaaatgatgcataccattgcttctcatactgccgagaatagaatgactccatcagcagttgctgcatgtatggccccgctcttgttgcgtccccttcttgctggtgaatgcgagatggaagatgacttagacatgaatggtgacagtgctgctcagcttattgccgctgcaaatgctgctaacagtgctcaaggcattgtaactactctattagaggaatacaagagtatattcaatgatgagcactttaggtgctccttatcacctgattctcaaacaggagatagtggaagtgaagaatcaactgatgacgaaactgtggataccaagggtaatggatttcatgatgcggaaaatgatgtagatcaagaattagatgatgccgagcgaatgctgagtggaaaattcactgaaaccagtgcaagtgcttgtgctgacctctatgaccacaaggaagttaatggcaatagttcagacactgagctctttgttgaggatcacacatttgaatcaaatgtagatttaaatgatgctcccctaagtcgtttaacagaaaatggaaagggtccatcaaatctgatgtccgctcatgaaactccattatcagtgggagagattcttctgtctttggatgctggaattccattaccttgtcgtgcagctgaatattctagcaaacccaatggaactcagcagcatgtgaagcgtactaacttatggggatggagcaatgtgagaaagggccaacgatcggagttagttgatccatcaggtgaagaagagcttgctattcaacgacttgaggtaatgaagaatgacttgcagatcaggattgcaaaggaggctagaggcaatgcaatcctacaggcaagtttggaaagaagaaaacaagcactacacgagcgtcgtgtggctctggaacaggatgtgtcaaggttgcaagagcagctacaggctgaaagggatcttagagctgcactggaggttgggctaagcatgtcttcttcacaattttctagctcactctccatggactcgaagacaaagtcagagcttgaggaaattgctctcgcagaagctgatgttgcaagattaaaacagaaggttgcagagctgcatttccaactcaatcaacagcgccagcaccagtatggctcttccgtagatgcaaatgatcatcctcaacaccttctaaatcatctctcgcagaacattgtccaaacaggatttgataggagcgttgctttctgtaatcaagagaagcaaagaaatgaggagagcctgccgagcacatcccactggagaagcatcaaacagcatgtgctatctcatggttcttcaaggcctttctcccgaaagcattcctcggacacctccttgagtgattctacaagtgtgcctgcagagggcgggccaatgttggtgaacatccctagaacaacgaaaggtgtcgaatatgggagaccgccgtctgtgtcgtcatccactctggttgaactaacaaccaggctagatttcttcaaagaacggcggtcacaattgatggaacagctccacagcctcgatttagggcatggatccacgtcccatggtttcccatacaaaccttcatctccctggaacagcccaaagtaaagtaggggatgatcatttgctgcagtacgacgtctctgtatattcttggtatagaatctcctttatgtttcactccatctttgtagagcctggtagtgagaatgtatatcccttgccttcacttgttttgctagtgcttgcagcggatctttttttagcatgattttgttttactgtatatgtaatgagttgaggagattgtgacacggcttttatatgttttagcaattttgttctattgtgtatgtaatgagttaaggggattgtgacacggtttttatatgttttcgcaatatatagatgcgtcttttttcttggggatatatagtccactgcaggtggagctactgttgtcatttcgaaaacaatgtggctgatccttgtaggcagctaattctctcccccaaatggattggaggaaacgagtgg

SEQ ID NO: 67385 - DNA, 3386 bp, Zea Mays
atgacccacccacccacagccacacaggccgagctgaagggagggggactgcctgcgggctgcggcttccggcgcaagatgccatgtggactccggatgactcgaaagtccatccatctcctctctatctctctatctatctatttcacgcctccacggctccacggctgctgccagcctgactagtgaggtgattgccgcagcggcggtcggccagagcgcgtgtgctcctccccagcataatcccaccaccatcgcgcacccgcccacctcaagcgagcggccccaattcccagccaccgcaagtggcttaaccctcgctcccgcacccccactcttccaccgcacgcacccgcgcgagcgagtgcggcagatcgcggccggccgctgggtccggtgcagttccgggctgcggcgccgggccacagttgatgcggacgatccgaggaggacgggacgggatggcggcttcggcggcgcctgggtcggctgggaggcaggcgcgcggagtcgcggcagcggcgaccggaaacgcggtatttaagagtggccctctcttcatatcatcgaaaggaattggatggaaaacgtggaaaaaacgctggttcatcctcacacgaacatcactggttttcttcaagagtgatcctagtacgttaccacagagaagtgaagtgaaccttacattgggaggaattgaccttaataattctgggagtgtagtagtcagggaagacaaaaggctactgactgtcctttttccagatggccgtgatggccgtgccttcaccttgaaggcagaaagttctgaagatttgtttgagtggaaaacagcgctggaagaagctcttgcacaagctccaaatgcagctcttgtgatggggcataatggaatatttcgcaatgacacaacagatgtatatgaaggggctattccgaattggggaaagaagagacctatcaaatcaatagttgttggcaggccaatactgcttgcactggaagatatagatggcagtccttcttttctggaaaaagctttgtgtttccttgagaaacatggaatgaaggtggaaggaattttgcgtcaagctgcagatgtggaggaggttgacaggagattgcaagaatatgagcaaggaaggacagaatttgcaccagaagaggatgctcatgttgttggtgactgtgtaaagcatgttctccgtgagcttccatcttctcctgttccagcttcgtgctgtacagcattattggaagctttccgtctggaaaccaaggaatctcagatcaaatccatgcgtgcagcaatatctgaaacatttcctgagcctaataggcggctgctacagagacttttgaaaatgatgcataccattgcttctcatactgccgagaatagaatgactccatcagcagttgctgcatgtatggccccgctcttgttgcgtccccttcttgctggtgaatgcgagatggaagatgacttagacatgaatggtgacagtgctgctcagcttattgccgctgcaaatgctgctaacagtgctcaaggcattgtaactactctattagaggaatacaagagtatattcaatgatgagcactttaggtgctccttatcacctgattctcaaacaggagatagtggaagtgaagaatcaactgatgacgaaactgtggataccaagggtaatggatttcatgatgcggaaaatgatgtagatcaagaattagatgatgccgagcgaatgctgagtggaaaattcactgaaaccagtgcaagtgcttgtgctgacctctatgaccacaaggaagttaatggcaatagttcagacactgagctctttgttgaggatcacacatttgaatcaaatgtagatttaaatgatgctcccctaagtcgtttaacagaaaatggaaagggtccatcaaatctgatgtccgctcatgaaactccattatcagtgggagagattcttctgtctttggatgctggaattccattaccttgtcgtgcagctgaatattctagcaaacccaatggaactcagcagcatgtgaagcgtactaacttatggggatggagcaatgtgagaaagggccaacgatcggagttagttgatccatcaggtgaagaagagcttgctattcaacgacttgaggtaatgaagaatgacttgcagatcaggattgcaaaggaggctagaggcaatgcaatcctacaggcaagtttggaaagaagaaaacaagcactacacgagcgtcgtgtggctctggaacaggatgttgcaagagcagctacaggctgaaagggatcttagagctgcactggaggttgggctaagcatgtcttcttcacaattttctagctcactctccatggactcgaagaagctgatgttgcaagattaaaacagaaggttgcagagctgcatttccaactcaatcaacagcgccagcaccagtatggctcttccgtagatgcaaatgatcatcctcaacaccttctaaatcatctctcgcagaacattgtccaaacaggatttgataggagcgttgctttctgtaatcaagagaagcaaagaaatgaggagagcctgccgagcacatcccactggagaagcatcaaacagcatgtgctatctcatggttcttcaaggcctttctcccgaaagcattcctcggacacctccttgagtgattctacaagtgtgcctgcagagggcgggccaatgttggtgaacatccctagaacaacgaaacagggtgtcgaatatgggagaccgccgtctgtgtcgtcatccactctggttgaactaacaaccaggctagatttcttcaaagaacggcggtcacaattgatggaacagctccacagcctcgatttagggcatggatccacgtcccatggtttcccatacaaaccttcatctccctggaacagcccaaagtaaagtaggggatgatcatttgctgcagtacgacgtctctgtatattcttggtatagaatctcctttatgtttcactccatctttgtagagcctggtagtgagaatgtatatcccttgccttcacttgttttgctagtgcttgcagcggatctttttttagcatgattttgttttactgtatatgtaatgagttgaggagattgtgacacggcttttatatgttttagcaattttgttctattgtgtatgtaatgagttaaggggattgtgacacggtttttatatgttttcgcaatatatagatgcgtcttttttcttggggatatatagtccactgcaggtggagctactgttgtcatttcgaaaacaatgtggctgatccttgtaggcagctaattctctcccccaaatggattggaggaaacgagtgg

SEQ ID NO: 67386 - DNA, 3357 bp, Zea Mays
atgacccacccacccacagccacacaggccgagctgaagggagggggactgcctgcgggctgcggcttccggcgcaagatgccatgtggactccggatgactcgaaagtccatccatctcctctctatctctctatctatctatttcacgcctccacggctccacggctgctgccagcctgactagtgaggtgattgccgcagcggcggtcggccagagcgcgtgtgctcctccccagcataatcccaccaccatcgcgcacccgcccacctcaagcgagcggccccaattcccagccaccgcaagtggcttaaccctcgctcccgcacccccactcttccaccgcacgcacccgcgcgagcgagtgcggcagatcgcggccggccgctgggtccggtgcagttccgggctgcggcgccgggccacagttgatgcggacgatccgaggaggacgggacgggatggcggcttcggcggcgcctgggtcggctgggaggcaggcgcgcggagtcgcggcagcggcgaccggaaacgcggtatttaagagtggccctctcttcatatcatcgaaaggaattggatggaaaacgtggaaaaaacgctggttcatcctcacacgaacatcactggttttcttcaagagtgatcctagtacgttaccacagagaagtgaagtgaaccttacattgggaggaattgaccttaataattctgggagtgtagtagtcagggaagacaaaaggctactgactgtcctttttccagatggccgtgatggccgtgccttcaccttgaaggcagaaagttctgaagatttgtttgagtggaaaacagcgctggaagaagctcttgcacaagctccaaatgcagctcttgtgatggggcataatggaatatttcgcaatgacacaacagatggggaaagaagagacctatcaaatcaatagttgttggcaggccaatactgcttgcactggaagatatagatggcagtccttcttttctggaaaaagctttgtgtttccttgagaaacatggaatgaaggtggaaggaattttgcgtcaagctgcagatgtggaggaggttgacaggagattgcaagaatatgagcaaggaaggacagaatttgcaccagaagaggatgctcatgttgttggtgactgtgtaaagcatgttctccgtgagcttccatcttctcctgttccagcttcgtgctgtacagcattattggaagctttccgtctggaaaccaaggaatctcagatcaaatccatgcgtgcagcaatatctgaaacatttcctgagcctaataggcggctgctacagagacttttgaaaatgatgcataccattgcttctcatactgccgagaatagaatgactccatcagcagttgctgcatgtatggccccgctcttgttgcgtccccttcttgctggtgaatgcgagatggaagatgacttagacatgaatggtgacagtgctgctcagcttattgccgctgcaaatgctgctaacagtgctcaaggcattgtaactactctattagaggaatacaagagtatattcaatgagatagtggaagtgaagaatcaactgatgacgaaactgtggataccaagggtaatggatttcatgatgcggaaaatgatgtagatcaagaattagatgatgccgagcgaatgctgagtggaaaattcactgaaaccagtgcaagtgcttgtgctgacctctatgaccacaaggaagttaatggcaatagttcagacactgagctctttgttgaggatcacacatttgaatcaaatgtagatttaaatgatgctcccctaagtcgtttaacagaaaatggaaagggtccatcaaatctgatgtccgctcatgaaactccattatcagtgggagagattcttctgtctttggatgctggaattccattaccttgtcgtgcagctgaatattctagcaaacccaatggaactcagcagcatgtgaagcgtactaacttatggggatggagcaatgtgagaaagggccaacgatcggagttagttgatccatcaggtgaagaagagcttgctattcaacgacttgaggtaatgaagaatgacttgcagatcaggattgcaaaggaggctagaggcaatgcaatcctacaggcaagtttggaaagaagaaaacaagcactacacgagcgtcgtgtggctctggaacaggatgtgtcaaggttgcaagagcagctacaggctgaaagggatcttagagctgcactggaggttgggctaagcatgtcttcttcacaattttctagctcactctccatggactcgaagacaaagtcagagcttgaggaaattgctctcgcagaagctgatgttgcaagattaaaacagaaggttgcagagctgcatttccaactcaatcaacagcgccagcaccagtatggctcttccgtagatgcaaatgatcatcctcaacaccttctaaatcatctctcgcagaacattgtccaaacaggatttgataggagcgttgctttctgtaatcaagagaagcaaagaaatgaggagagcctgccgagcacatcccactggagaagcatcaaacagcatgtgctatctcatggttcttcaaggcctttctcccgaaagcattcctcggacacctccttgagtgattctacaagtgtgcctgcagagggcgggccaatgttggtgaacatccctagaacaacgaaaggtgtcgaatatgggagaccgccgtctgtgtcgtcatccactctggttgaactaacaaccaggctagatttcttcaaagaacggcggtcacaattgatggaacagctccacagcctcgatttagggcatggatccacgtcccatggtttcccatacaaaccttcatctccctggaacagcccaaagtaaagtaggggatgatcatttgctgcagtacgacgtctctgtatattcttggtatagaatctcctttatgtttcactccatctttgtagagcctggtagtgagaatgtatatcccttgccttcacttgttttgctagtgcttgcagcggatctttttttagcatgattttgttttactgtatatgtaatgagttgaggagattgtgacacggcttttatatgttttagcaattttgttctattgtgtatgtaatgagttaaggggattgtgacacggtttttatatgttttcgcaatatatagatgcgtcttttttcttggggatatatagtccactgcaggtggagctactgttgtcatttcgaaaacaatgtggctgatccttgtaggcagctaattctctcccccaaatggattggaggaaacgagtgg

SEQ ID NO: 67387 - DNA, 3381 bp, Zea Mays
atgacccacccacccacagccacacaggccgagctgaagggagggggactgcctgcgggctgcggcttccggcgcaagatgccatgtggactccggatgactcgaaagtccatccatctcctctctatctctctatctatctatttcacgcctccacggctccacggctgctgccagcctgactagtgaggtgattgccgcagcggcggtcggccagagcgcgtgtgctcctccccagcataatcccaccaccatcgcgcacccgcccacctcaagcgagcggccccaattcccagccaccgcaagtggcttaaccctcgctcccgcacccccactcttccaccgcacgcacccgcgcgagcgagtgcggcagatcgcggccggccgctgggtccggtgcagttccgggctgcggcgccgggccacagttgatgcggacgatccgaggaggacgggacgggatggcggcttcggcggcgcctgggtcggctgggaggcaggcgcgcggagtcgcggcagcggcgaccggaaacgcggtatttaagagtggccctctcttcatatcatcgaaaggaattggatggaaaacgtggaaaaaacgctggttcatcctcacacgaacatcactggttttcttcaagagtgatcctagtacgttaccacagagaagtgaagtgaaccttacattgggaggaattgaccttaataattctgggagatggccgtgatggccgtgccttcaccttgaaggcagaaagttctgaagatttgtttgagtggaaaacagcgctggaagaagctcttgcacaagctccaaatgcagctcttgtgatggggcataatggaatatttcgcaatgacacaacagatgtatatgaaggggctattccgaattggggaaagaagagacctatcaaatcaatagttgttggcaggccaatactgcttgcactggaagatatagatggcagtccttcttttctggaaaaagctttgtgtttccttgagaaacatggaatgaaggtggaaggaattttgcgtcaagctgcagatgtggaggaggttgacaggagattgcaagaatatgagcaaggaaggacagaatttgcaccagaagaggatgctcatgttgttggtgactgtgtaaagcatgttctccgtgagcttccatcttctcctgttccagcttcgtgctgtacagcattattggaagctttccgtctggaaaccaaggaatctcagatcaaatccatgcgtgcagcaatatctgaaacatttcctgagcctaataggcggctgctacagagacttttgaaaatgatgcataccattgcttctcatactgccgagaatagaatgactccatcagcagttgctgcatgtatggccccgctcttgttgcgtccccttcttgctggtgaatgcgagatggaagatgacttagacatgaatggtgacagtgctgctcagcttattgccgctgcaaatgctgctaacagtgctcaaggcattgtaactactctattagaggaatacaagagtatattcaatgatgagcactttaggtgctccttatcacctgattctcaaacaggagatagtggaagtgaagaatcaactgatgacgaaactgtggataccaagggtaatggatttcatgatgcggaaaatgatgtagatcaagaattagatgatgccgagcgaatgctgagtggaaaattcactgaaaccagtgcaagtgcttgtgctgacctctatgaccacaaggaagttaatggcaatagttcagacactgagctctttgttgaggatcacacatttgaatcaaatgtagatttaaatgatgctcccctaagtcgtttaacagaaaatggaaagggtccatcaaatctgatgtccgctcatgaaactccattatcagtgggagagattcttctgtctttggatgctggaattccattaccttgtcgtgcagctgaatattctagcaaacccaatggaactcagcagcatgtgaagcgtactaacttatggggatggagcaatgtgagaaagggccaacgatcggagttagttgatccatcaggtgaagaagagcttgctattcaacgacttgaggtaatgaagaatgacttgcagatcaggattgcaaaggaggctagaggcaatgcaatcctacaggcaagtttggaaagaagaaaacaagcactacacgagcgtcgtgtggctctggaacaggatgtgtcaaggttgcaagagcagctacaggctgaaagggatcttagagctgcactggaggttgggctaagcatgtcttcttcacaattttctagctcactctccatggactcgaagacaaagtcagagcttgaggaaattgctctcgcagaagctgatgttgcaagattaaaacagaaggttgcagagctgcatttccaactcaatcaacagcgccagcaccagtatggctcttccgtagatgcaaatgatcatcctcaacaccttctaaatcatctctcgcagaacattgtccaaacaggatttgataggagcgttgctttctgtaatcaagagaagcaaagaaatgaggagagcctgccgagcacatcccactggagaagcatcaaacagcatgtgctatctcatggttcttcaaggcctttctcccgaaagcattcctcggacacctccttgagtgattctacaagtgtgcctgcagagggcgggccaatgttggtgaacatccctagaacaacgaaacagggtgtcgaatatgggagaccgccgtctgtgtcgtcatccactctggttgaactaacaaccaggctagatttcttcaaagaacggcggtcacaattgatggaacagctccacagcctcgatttagggcatggatccacgtcccatggtttcccatacaaaccttcatctccctggaacagcccaaagtaaagtaggggatgatcatttgctgcagtacgacgtctctgtatattcttggtatagaatctcctttatgtttcactccatctttgtagagcctggtagtgagaatgtatatcccttgccttcacttgttttgctagtgcttgcagcggatctttttttagcatgattttgttttactgtatatgtaatgagttgaggagattgtgacacggcttttatatgttttagcaattttgttctattgtgtatgtaatgagttaaggggattgtgacacggtttttatatgttttcgcaatatatagatgcgtcttttttcttggggatatatagtccactgcaggtggagctactgttgtcatttcgaaaacaatgtggctgatccttgtaggcagctaattctctcccccaaatggattggaggaaacgagtgg

SEQ ID NO: 67388 - DNA, 3378 bp, Zea Mays
atgacccacccacccacagccacacaggccgagctgaagggagggggactgcctgcgggctgcggcttccggcgcaagatgccatgtggactccggatgactcgaaagtccatccatctcctctctatctctctatctatctatttcacgcctccacggctccacggctgctgccagcctgactagtgaggtgattgccgcagcggcggtcggccagagcgcgtgtgctcctccccagcataatcccaccaccatcgcgcacccgcccacctcaagcgagcggccccaattcccagccaccgcaagtggcttaaccctcgctcccgcacccccactcttccaccgcacgcacccgcgcgagcgagtgcggcagatcgcggccggccgctgggtccggtgcagttccgggctgcggcgccgggccacagttgatgcggacgatccgaggaggacgggacgggatggcggcttcggcggcgcctgggtcggctgggaggcaggcgcgcggagtcgcggcagcggcgaccggaaacgcggtatttaagagtggccctctcttcatatcatcgaaaggaattggatggaaaacgtggaaaaaacgctggttcatcctcacacgaacatcactggttttcttcaagagtgatcctagtacgttaccacagagaagtgaagtgaaccttacattgggaggaattgaccttaataattctgggagatggccgtgatggccgtgccttcaccttgaaggcagaaagttctgaagatttgtttgagtggaaaacagcgctggaagaagctcttgcacaagctccaaatgcagctcttgtgatggggcataatggaatatttcgcaatgacacaacagatgtatatgaaggggctattccgaattggggaaagaagagacctatcaaatcaatagttgttggcaggccaatactgcttgcactggaagatatagatggcagtccttcttttctggaaaaagctttgtgtttccttgagaaacatggaatgaaggtggaaggaattttgcgtcaagctgcagatgtggaggaggttgacaggagattgcaagaatatgagcaaggaaggacagaatttgcaccagaagaggatgctcatgttgttggtgactgtgtaaagcatgttctccgtgagcttccatcttctcctgttccagcttcgtgctgtacagcattattggaagctttccgtctggaaaccaaggaatctcagatcaaatccatgcgtgcagcaatatctgaaacatttcctgagcctaataggcggctgctacagagacttttgaaaatgatgcataccattgcttctcatactgccgagaatagaatgactccatcagcagttgctgcatgtatggccccgctcttgttgcgtccccttcttgctggtgaatgcgagatggaagatgacttagacatgaatggtgacagtgctgctcagcttattgccgctgcaaatgctgctaacagtgctcaaggcattgtaactactctattagaggaatacaagagtatattcaatgatgagcactttaggtgctccttatcacctgattctcaaacaggagatagtggaagtgaagaatcaactgatgacgaaactgtggataccaagggtaatggatttcatgatgcggaaaatgatgtagatcaagaattagatgatgccgagcgaatgctgagtggaaaattcactgaaaccagtgcaagtgcttgtgctgacctctatgaccacaaggaagttaatggcaatagttcagacactgagctctttgttgaggatcacacatttgaatcaaatgtagatttaaatgatgctcccctaagtcgtttaacagaaaatggaaagggtccatcaaatctgatgtccgctcatgaaactccattatcagtgggagagattcttctgtctttggatgctggaattccattaccttgtcgtgcagctgaatattctagcaaacccaatggaactcagcagcatgtgaagcgtactaacttatggggatggagcaatgtgagaaagggccaacgatcggagttagttgatccatcaggtgaagaagagcttgctattcaacgacttgaggtaatgaagaatgacttgcagatcaggattgcaaaggaggctagaggcaatgcaatcctacaggcaagtttggaaagaagaaaacaagcactacacgagcgtcgtgtggctctggaacaggatgtgtcaaggttgcaagagcagctacaggctgaaagggatcttagagctgcactggaggttgggctaagcatgtcttcttcacaattttctagctcactctccatggactcgaagacaaagtcagagcttgaggaaattgctctcgcagaagctgatgttgcaagattaaaacagaaggttgcagagctgcatttccaactcaatcaacagcgccagcaccagtatggctcttccgtagatgcaaatgatcatcctcaacaccttctaaatcatctctcgcagaacattgtccaaacaggatttgataggagcgttgctttctgtaatcaagagaagcaaagaaatgaggagagcctgccgagcacatcccactggagaagcatcaaacagcatgtgctatctcatggttcttcaaggcctttctcccgaaagcattcctcggacacctccttgagtgattctacaagtgtgcctgcagagggcgggccaatgttggtgaacatccctagaacaacgaaaggtgtcgaatatgggagaccgccgtctgtgtcgtcatccactctggttgaactaacaaccaggctagatttcttcaaagaacggcggtcacaattgatggaacagctccacagcctcgatttagggcatggatccacgtcccatggtttcccatacaaaccttcatctccctggaacagcccaaagtaaagtaggggatgatcatttgctgcagtacgacgtctctgtatattcttggtatagaatctcctttatgtttcactccatctttgtagagcctggtagtgagaatgtatatcccttgccttcacttgttttgctagtgcttgcagcggatctttttttagcatgattttgttttactgtatatgtaatgagttgaggagattgtgacacggcttttatatgttttagcaattttgttctattgtgtatgtaatgagttaaggggattgtgacacggtttttatatgttttcgcaatatatagatgcgtcttttttcttggggatatatagtccactgcaggtggagctactgttgtcatttcgaaaacaatgtggctgatccttgtaggcagctaattctctcccccaaatggattggaggaaacgagtgg

SEQ ID NO: 67389 - DNA, 3257 bp, Zea Mays
atgacccacccacccacagccacacaggccgagctgaagggagggggactgcctgcgggctgcggcttccggcgcaagatgccatgtggactccggatgactcgaaagtccatccatctcctctctatctctctatctatctatttcacgcctccacggctccacggctgctgccagcctgactagtgaggtgattgccgcagcggcggtcggccagagcgcgtgtgctcctccccagcataatcccaccaccatcgcgcacccgcccacctcaagcgagcggccccaattcccagccaccgcaagtggcttaaccctcgctcccgcacccccactcttccaccgcacgcacccgcgcgagcgagtgcggcagatcgcggccggccgctgggtccggtgcagttccgggctgcggcgccgggccacagttgatgcggacgatccgaggaggacgggacgggatggcggcttcggcggcgcctgggtcggctgggaggcaggcgcgcggagtcgcggcagcggcgaccggaaacgcggtatttaagagtggccctctcttcatatcatcgaaaggaattggatggaaaacgtggaaaaaacgctggttcatcctcacacgaacatcactggttttcttcaagagtgatcctagtacgttaccacagagaagtgaagtgaaccttacattgggaggaattgaccttaataattctgggagtgtagtagtcagggaagacaaaaggctactgactgtcctttttccagatggccgtgatggccgtgccttcaccttgaaggcagaaagttctgaagatttgtttgagtggaaaacagcgctggaagaagctcttgcacaagctccaaatgcagctcttgtgatggggcataatggaatatttcgcaatgacacaacagatgtatatgaaggggctattccgaattggggaaagaagagacctatcaaatcaatagttgttggcaggccaatactgcttgcactggaagatatagatggcagtccttcttttctggaaaaagctttgtgtttccttgagaaacatggaatgaaggtggaaggaattttgcgtcaagctgcagatgtggaggaggttgacaggagattgcaagaatatgagcaaggaaggacagaatttgcaccagaagaggatgctcatgttgttggtgactgtgtaaagcatgttctccgtgagcttccatcttctcctgttccagcttcgtgctgtacagcattattggaagctttccgtctggaaaccaaggaatctcagatcaaatccatgcgtgcagcaatatctgaaacatttcctgagcctaataggcggctgctacagagacttttgaaaatgatgcataccattgcttctcatactgccgagaatagaatgactccatcagcagttgctgcatgtatggccccgctcttgttgcgtccccttcttgctggtgaatgcgagatggaagatgacttagacatgaatggtgacagtgctgctcagcttattgccgctgcaaatgctgctaacagtgctcaaggcattgtaactactctattagaggaatacaagagtatattcaatgatgagcactttaggtgctccttatcacctgattctcaaacaggagatagtggaagtgaagaatcaactgatgacgaaactgtggataccaagggtaatggatttcatgatgcggaaaatgatgtagatcaagaattagatgatgccgagcgaatgctgagtggaaaattcactgaaaccagtgcaagtgcttgtgctgacctctatgaccacaaggaagttaatggcaatagttcagacactgagctctttgttgaggatcacacatttgaatcaaatgtagatttaaatgatgctcccctaagtcgtttaacagaaaatggaaagggtccatcaaatctgatgtccgctcatgaaactccattatcagtgggagagattcttctgtctttggatgctggaattccattaccttgtcgtgcagctgaatattctagcaaacccaatggaactcagcagcatgtgaagcgtactaacttatggggatggagcaatgtgagaaagggccaacgatcggagttagttgatccatcaggtgaagaagagcttgctattcaacgacttgaggtaatgaagaatgacttgcagatcaggattgcaaaggaggctagaggcaatgcaatcctacaggcaagtttggaaagaagaaaacaagcactacacgagcgtcgtgtggctctggaacaggatgtgtcaaggttgcaagagcagctacaggctgaaagggatcttagagctgcactggaggttgggctaagcatgtcttcttcacaattttctagctcactctccatggactcgaagacaaagtcagagcttgaggaaattgctctcgcagaagctgatgttgcaagattaaaacagaaggttgcagagctgcatttccaactcaatcaacagcgccagcaccagtatggctcttccgtagatgcaaatgatcatcctcaacaccttctaaatcatctctcgcagaacattgtccaaacaggatttgataggagcgttgctttctgtaatcaagagaagcaaagaaatgagcagggtgtcgaatatgggagaccgccgtctgtgtcgtcatccactctggttgaactaacaaccaggctagatttcttcaaagaacggcggtcacaattgatggaacagctccacagcctcgatttagggcatggatccacgtcccatggtttcccatacaaaccttcatctccctggaacagcccaaagtaaagtaggggatgatcatttgctgcagtacgacgtctctgtatattcttggtatagaatctcctttatgtttcactccatctttgtagagcctggtagtgagaatgtatatcccttgccttcacttgttttgctagtgcttgcagcggatctttttttagcatgattttgttttactgtatatgtaatgagttgaggagattgtgacacggcttttatatgttttagcaattttgttctattgtgtatgtaatgagttaaggggattgtgacacggtttttatatgttttcgcaatatatagatgcgtcttttttcttggggatatatagtccactgcaggtggagctactgttgtcatttcgaaaacaatgtggctgatccttgtaggcagctaattctctcccccaaatggattggaggaaacgagtgg

SEQ ID NO: 67390 - DNA, 3403 bp, Zea Mays
atgacccacccacccacagccacacaggccgagctgaagggagggggactgcctgcgggctgcggcttccggcgcaagatgccatgtggactccggatgactcgaaagtccatccatctcctctctatctctctatctatctatttcacgcctccacggctccacggctgctgccagcctgactagtgaggtgattgccgcagcggcggtcggccagagcgcgtgtgctcctccccagcataatcccaccaccatcgcgcacccgcccacctcaagcgagcggccccaattcccagccaccgcaagtggcttaaccctcgctcccgcacccccactcttccaccgcacgcacccgcgcgagcgagtgcggcagatcgcggccggccgctgggtccggtgcagttccgggctgcggcgccgggccacagttgatgcggacgatccgaggaggacgggacgggatggcggcttcggcggcgcctgggtcggctgggaggcaggcgcgcggagtcgcggcagcggcgaccggaaacgcggtatttaagagtggccctctcttcatatcatcgaaaggaattggatggaaaacgtggaaaaaacgctggttcatcctcacacgaacatcactggttttcttcaagagtgatcctagtacgttaccacagagaagtgaagtgaaccttacattgggaggaattgaccttaataattctgggagtgtagtagtcagggaagacaaaaggctactgactgtcctttttccagatggccgtgatggccgtgccttcaccttgaaggcagaaagttctgaagatttgtttgagtggaaaacagcgctggaagaagctcttgcacaagctccaaatgcagctcttgtgatggggcataatggaatatttcgcaatgacacaacagatggggaaagaagagacctatcaaatcaatagttgttggcaggccaatactgcttgcactggaagatatagatggcagtccttcttttctggaaaaagctttgtgtttccttgagaaacatggaatgaaggtggaaggaattttgcgtcaagctgcagatgtggaggaggttgacaggagattgcaagaatatgagcaaggaaggacagaatttgcaccagaagaggatgctcatgttgttggtgactgtgtaaagcatgttctccgtgagcttccatcttctcctgttccagcttcgtgctgtacagcattattggaagctttccgtctggaaaccaaggaatctcagatcaaatccatgcgtgcagcaatatctgaaacatttcctgagcctaataggcggctgctacagagacttttgaaaatgatgcataccattgcttctcatactgccgagaatagaatgactccatcagcagttgctgcatgtatggccccgctcttgttgcgtccccttcttgctggtgaatgcgagatggaagatgacttagacatgaatggtgacagtgctgctcagcttattgccgctgcaaatgctgctaacagtgctcaaggcattgtaactactctattagaggaatacaagagtatattcaatgatgagcactttaggtgctccttatcacctgattctcaaacaggagatagtggaagtgaagaatcaactgatgacgaaactgtggataccaagggtaatggatttcatgatgcggaaaatgatgtagatcaagaattagatgatgccgagcgaatgctgagtggaaaattcactgaaaccagtgcaagtgcttgtgctgacctctatgaccacaaggaagttaatggcaatagttcagacactgagctctttgttgaggatcacacatttgaatcaaatgtagatttaaatgatgctcccctaagtcgtttaacagaaaatggaaagggtccatcaaatctgatgtccgctcatgaaactccattatcagtgggagagattcttctgtctttggatgctggaattccattaccttgtcgtgcagctgaatattctagcaaacccaatggaactcagcagcatgtgaagcgtactaacttatggggatggagcaatgtgagaaagggccaacgatcggagttagttgatccatcaggtgaagaagagcttgctattcaacgacttgaggtaatgaagaatgacttgcagatcaggattgcaaaggaggctagaggcaatgcaatcctacaggcaagtttggaaagaagaaaacaagcactacacgagcgtcgtgtggctctggaacaggatgtgtcaaggttgcaagagcagctacaggctgaaagggatcttagagctgcactggaggttgggctaagcatgtcttcttcacaattttctagctcactctccatggactcgaagacaaagtcagagcttgaggaaattgctctcgcagaagctgatgttgcaagattaaaacagaaggttgcagagctgcatttccaactcaatcaacagcgccagcaccagtatggctcttccgtagatgcaaatgatcatcctcaacaccttctaaatcatctctcgcagaacattgtccaaacaggatttgataggagcgttgctttctgtaatcaagagaagcaaagaaatgaggagagcctgccgagcacatcccactggagaagcatcaaacagcatgtgctatctcatggttcttcaaggcctttctcccgaaagcattcctcggacacctccttgagtgattctacaagtgtgcctgcagagggcgggccaatgttggtgaacatccctagaacaacgaaacagggtgtcgaatatgggagaccgccgtctgtgtcgtcatccactctggttgaactaacaaccaggctagatttcttcaaagaacggcggtcacaattgatggaacagctccacagcctcgatttagggcatggatccacgtcccatggtttcccatacaaaccttcatctccctggaacagcccaaagtaaagtaggggatgatcatttgctgcagtacgacgtctctgtatattcttggtatagaatctcctttatgtttcactccatctttgtagagcctggtagtgagaatgtatatcccttgccttcacttgttttgctagtgcttgcagcggatctttttttagcatgattttgttttactgtatatgtaatgagttgaggagattgtgacacggcttttatatgttttagcaattttgttctattgtgtatgtaatgagttaaggggattgtgacacggtttttatatgttttcgcaatatatagatgcgtcttttttcttggggatatatagtccactgcaggtggagctactgttgtcatttcgaaaacaatgtggctgatccttgtaggcagctaattctctcccccaaatggattggaggaaacgagtgg

SEQ ID NO: 67391 - DNA, 3091 bp, Zea Mays
atgacccacccacccacagccacacaggccgagctgaagggagggggactgcctgcgggctgcggcttccggcgcaagatgccatgtggactccggatgactcgaaagtccatccatctcctctctatctctctatctatctatttcacgcctccacggctccacggctgctgccagcctgactagtgaggtgattgccgcagcggcggtcggccagagcgcgtgtgctcctccccagcataatcccaccaccatcgcgcacccgcccacctcaagcgagcggccccaattcccagccaccgcaagtggcttaaccctcgctcccgcacccccactcttccaccgcacgcacccgcgcgagcgagtgcggcagatcgcggccggccgctgggtccggtgcagttccgggctgcggcgccgggccacagttgatgcggacgatccgaggaggacgggacgggatggcggcttcggcggcgcctgggtcggctgggaggcaggcgcgcggagtcgcggcagcggcgaccggaaacgcggtatttaagagtggccctctcttcatatcatcgaaaggaattggatggaaaacgtggaaaaaacgctggttcatcctcacacgaacatcactggttttcttcaagagtgatcctagtacgttaccacagagaagtgaagtgaaccttacattgggaggaattgaccttaataattctgggagtgtagtagtcagggaagacaaaaggctactgactgtcctttttccagatggccgtgatggccgtgccttcaccttgaaggcagaaagttctgaagatttgtttgagtggaaaacagcgctggaagaagctcttgcacaagctccaaatgcagctcttgtgatggggcataatggaatatttcgcaatgacacaacagatgtatatgaaggggctattccgaattggggaaagaagagacctatcaaatcaatagttgttggcaggccaatactgcttgcactggaagatatagatggcagtccttcttttctggaaaaagctttgtgtttccttgagaaacatggaatgaaggtggaaggaattttgcgtcaagctgcagatgtggaggaggttgacaggagattgcaagaatatgagcaaggaaggacagaatttgcaccagaagaggatgctcatgttgttggtgactgtgtaaagcatgttctccgtgagcttccatcttctcctgttccagcttcgtgctgtacagcattattggaagctttccgtctggaaaccaaggaatctcagatcaaatccatgcgtgcagcaatatctgaaacatttcctgagcctaataggcggctgctacagagacttttgaaaatgatgcataccattgcttctcatactgccgagaatagaatgactccatcagcagttgctgcatgtatggccccgctcttgttgcgtccccttcttgctggtgaatgcgagatggaagatgacttagacatgaatggtgacagtgctgctcagcttattgccgctgcaaatgctgctaacagtgctcaaggcattgtaactactctattagaggaatacaagagtatattcaatgatgagcactttaggtgctccttatcacctgattctcaaacaggagatagtggaagtgaagaatcaactgatgacgaaactgtggataccaagggtaatggatttcatgatgcggaaaatgatgtagatcaagaattagatgatgccgagcgaatgctgagtggaaaattcactgaaaccagtgcaagtgcttgtgctgacctctatgaccacaaggaagttaatggcaatagttcagacactgagctctttgttgaggatcacacatttgaatcaaatgtagatttaaatgatgctcccctaagtcgtttaacagaaaatggaaagggtccatcaaatctgatgtccgctcatgaaactccattatcagtgggagagattcttctgtctttggatgctggaattccattaccttgtcgtgcagctgaatattctagcaaacccaatggaactcagcagcatgtgaagcgtactaacttatggggatggagcaatgtgagaaagggccaacgatcggagttagttgatccatcaggtgaagaagagcttgctattcaacgacttgaggtaatgaagaatgacttgcagatcaggattgcaaaggaggctagaggcaatgcaatcctacaggcaagtttggaaagaagaaaacaagcactacacgagcgtcgtgtggctctggaacaggatgtgtcaaggttgcaagagcagctacaggctgaaagggatcttagagctgcactggaggttgggctaagcatgtcttcttcacaattttctagctcactctccatggactcgaagacaaagtcagagcttgaggaaattgctctcgcagaagctgatgttgcaagattaaaacagaaggttgcagagctgcatttccaactcaatcaacagcgccagcaccagtatggctcttccgtagatgcaaatgatcatcctcaacaccttctaaatcatctctcgcagaacattgtccaaacaggatttgataggagcgttgctttctgtaatcaagagaagcaaagaaatgaggagagcctgccgagcacatcccactggagaagcatcaaacagcatgtgctatctcatggttcttcaaggcctttctcccgaaagcattcctcggacacctccttgagtgattctacaagtgtgcctgcagagggcgggccaatgttggtgaacatccctagaacaacgaaaggtgtcgaatatgggagaccgccgtctgtgtcgtcatccactctggttgaactaacaaccaggctagatttcttcaaagaacggcggtcacaattgatggaacagctccacagcctcgatttagggcatggatccacgtcccatggtttcccatacaaaccttcatctccctggaacagcccaaagtaaagtaggggatgatcatttgctgcagtacgacgtctctgtatattcttgcggcgacacataggatctgccacatatcttaacgagatgaacttttc

SEQ ID NO: 67392 - DNA, 3009 bp, Zea Mays
atgacccacccacccacagccacacaggccgagctgaagggagggggactgcctgcgggctgcggcttccggcgcaagatgccatgtggactccggatgactcgaaagtccatccatctcctctctatctctctatctatctatttcacgcctccacggctccacggctgctgccagcctgactagtgaggtgattgccgcagcggcggtcggccagagcgcgtgtgctcctccccagcataatcccaccaccatcgcgcacccgcccacctcaagcgagcggccccaattcccagccaccgcaagtggcttaaccctcgctcccgcacccccactcttccaccgcacgcacccgcgcgagcgagtgcggcagatcgcggccggccgctgggtccggtgcagttccgggctgcggcgccgggccacagttgatgcggacgatccgaggaggacgggacgggatggcggcttcggcggcgcctgggtcggctgggaggcaggcgcgcggagtcgcggcagcggcgaccggaaacgcggtatttaagagtggccctctcttcatatcatcgaaaggaattggatggaaaacgtggaaaaaacgctggttcatcctcacacgaacatcactggttttcttcaagagtgatcctagtacgttaccacagagaagtgaagtgaaccttacattgggaggaattgaccttaataattctgggagatggccgtgatggccgtgccttcaccttgaaggtacatgtaccttcctcctaaacagtttgacacgctagagcaagccaaacaggcagaaagttctgaagatttgtttgagtggaaaacagcgctggaagaagctcttgcacaagctccaaatgcagctcttgtgatggggcataatggaatatttcgcaatgacacaacagatgtatatgaaggggctattccgaattggggaaagaagagacctatcaaatcaatagttgttggcaggccaatactgcttgcactggaagatatagatggcagtccttcttttctggaaaaagctttgtgtttccttgagaaacatggaatgaaggtggaaggaattttgcgtcaagctgcagatgtggaggaggttgacaggagattgcaagaatatgagcaaggaaggacagaatttgcaccagaagaggatgctcatgttgttggtgactgtgtaaagcatgttctccgtgagcttccatcttctcctgttccagcttcgtgctgtacagcattattggaagctttccgtctggaaaccaaggaatctcagatcaaatccatgcgtgcagcaatatctgaaacatttcctgagcctaataggcggctgctacagagacttttgaaaatgatgcataccattgcttctcatactgccgagaatagaatgactccatcagcagttgctgcatgtatggccccgctcttgttgcgtccccttcttgctggtgaatgcgagatggaagatgacttagacatgaatggtgacagtgctgctcagcttattgccgctgcaaatgctgctaacagtgctcaaggcattgtaactactctattagaggaatacaagagtatattcaatgatgagcactttaggtgctccttatcacctgattctcaaacaggagatagtggaagtgaagaatcaactgatgacgaaactgtggataccaagggtaatggatttcatgatgcggaaaatgatgtagatcaagaattagatgatgccgagcgaatgctgagtggaaaattcactgaaaccagtgcaagtgcttgtgctgacctctatgaccacaaggaagttaatggcaatagttcagacactgagctctttgttgaggatcacacatttgaatcaaatgtagatttaaatgatgctcccctaagtcgtttaacagaaaatggaaagggtccatcaaatctgatgtccgctcatgaaactccattatcagtgggagagattcttctgtctttggatgctggaattccattaccttgtcgtgcagctgaatattctagcaaacccaatggaactcagcagcatgtgaagcgtactaacttatggggatggagcaatgtgagaaagggccaacgatcggagttagttgatccatcaggtgaagaagagcttgctattcaacgacttgaggtaatgaagaatgacttgcagatcaggattgcaaaggaggctagaggcaatgcaatcctacaggcaagtttggaaagaagaaaacaagcactacacgagcgtcgtgtggctctggaacaggatgtgtcaaggttgcaagagcagctacaggctgaaagggatcttagagctgcactggaggttgggctaagcatgtcttcttcacaattttctagctcactctccatggactcgaagacaaagtcagagcttgaggaaattgctctcgcagaagctgatgttgcaagattaaaacagaaggttgcagagctgcatttccaactcaatcaacagcgccagcaccagtatggctcttccgtagatgcaaatgatcatcctcaacaccttctaaatcatctctcgcagaacattgtccaaacaggatttgataggagcgttgctttctgtaatcaagagaagcaaagaaatgagttttcataaataatgtcaacaacgtcttgaaaggtcatagctatcgatggaagaccagacgactctggcgataggcacacaccgtccacagaggttctcacgacgatggcgtggaggtagcacatgatgtgctttggtgacaacgtcaagagcatctagaatagtggagatgcatttgtggtcattgaaacggtgggacgacgcaaaacagttacgggggtatactttttatcatggacttggcgccaacattgatttcaagagtctcaaaaaggttggtaaatgtagagataaaattgagtttgtaggaagtatgtaaatttatggatgttttacataaccgttggagaatagttttcttgagaact

SEQ ID NO: 67393 - DNA, 2207 bp, Zea Mays
cttgggtggtacactacactcagtccaccgtgtccatgcgctggccggccttctgctgttctgctctgctgttctgcacagagacggcagctcatgggccatccggccatcccatgagccaggtctactacctcctggctcctgctcctgcgaatcccgtacatgccacgtgggtagcgccgcgccaagacaagcctcctgtgagtctgtgacgagccaccgtgaaactggacaccgacgtggagcgcgtccgctggccgaagcgacagcctgcgctcacgagctgccgcagctcttggtccccggcgagccgtgctcagccgcggatgctgcaggcagcctggccagcagcagagatgcgccgtgtcgggacgggtgtgaggatgctttgcggcgcggcgctgtcggtgcttctgcttctcgcgggcggcgcggcggcgtcgcactcgcgctcgtcgtgccccgccacgcctccggacgcggggaacacgctgcaggtgtcgcacgcgttcgggccgtgctcgccgctgggccccgggacggcggcgccgtcgtgggcggggttcctggcggaccaggcgtcgcgtgacgcgtcgcggctgctgtacctggactcgctggcggtgcgtggccgcgcccgcgcgtacgcgcccatcgcgtcggggcggcagctgctgcagacgccgacgtacgtggtgcgggccagcctcggcacgccgccgcagcagctgctcctggccgtcgacaccagcaacgacgcctcgtggatcccttgcgccggctgcgcgggctgccccacgtcgtccgcggcgcccttcgacccggcctcgtccgcctcgtaccgcacggtgccctgcgggtcgccgctctgcgcgcaggcacccaacgcggcgtgcccgcccggcggcaaggcctgcggcttcagcctcacctacgccgactcctcgctgcaggccgcgctgtcgcaggactctctcgccgtcgccggcaacgccgtgaaggcctacaccttcgggtgcctgcagagggccactggcacggctgcgccgccgcaggggctgctggggctcggccgcggcccgctgtcgttcctttcgcagaccaaggacatgtacgaggccaccttctcgtactgtctccccagcttcaagtcgctcaacttctctggaacgctccggctcgggcgcaacggccagccgcagcgcatcaagacgacgccgctgctggccaacccgcaccggtcgtcgctctactacgtgaacatgaccggcatccgcgtgggcaggaaggtggtgcctatcccggcgttcgacccggcgacgggggcgggcaccgtgctggactctggcaccatgttcacccggctggtggcgccggcgtacgtggccgtgcgggacgaggtccggcgccgcgtcggcgcgcccgtgtcctcgctgggagggttcgacacgtgcttcaacaccaccgccgtcgcgtggccgcccgtgacgctgctgttcgacggcatgcaggtgacgctgccggaggagaacgtggtcatccacagcacgtacgggaccatcagctgcctggccatggccgcggcgcccgacggcgtcaacaccgtgctcaacgtcatcgccagcatgcagcagcagaaccaccgtgtgctcttcgacgtgcccaacggacgcgtaggcttcgcgcgcgagcgctgcaccgccgcttgatcagcttgctcgcgcgcctgcgcgcgggctcggattcgggttatatttagttaaacctacgttctacggttgtggacgtcatgcactgctgtcggagtgggtgattaataatttaactttccttttcttttcttttaccggtcagtgtaatctcgttgctcttcagatttaccatatgtgtttcacattcaccgatcgattgcttcaagtggcattatgtggtttaggggctgaatgattggggtctaaataatgtactgcatattccagttttggattaaagaggtgtttggttttagggactaatgtttagtcccttcattttattcctttttagtgtataaattgttaaatatagaaactaaaataaagttttagtttctatatttggtaattttggaactaaaatggaataaaatctagggactaaacattggtccctagaaaccaaacaccctctaagcacggtcgtcgtttaggcttgatatgcctaacaga

SEQ ID NO: 67394 - DNA, 2331 bp, Zea Mays
cttgggtggtacactacactcagtccaccgtgtccatgcgctggccggccttctgctgttctgctctgctgttctgcacagagacggcagctcatgggccatccggccatcccatgagccaggtctactacctcctggctcctgctcctgcgaatcccgtacatgccacgtgggtagcgccgcgccaagacaagcctcctgtgagtctgtgacgagccaccgtgaaactggacaccgacgtggagcgcgtccgctggccgaagcgacagcctgcgctcacgagctgccgcagctcttggtccccggcgagccgtgctcagccgcggatgctgcaggcagcctggccagcagcaggtacggcgatacgtccgtccacgctaaacctcacgggcgtgccatgcatggcgcgcgcgctctgcccgcgtcgccagaccccagtggcgctcacgtgccccgccgctatatagcccacggcgtcgcgccaccgtccgtccgtccgtcgtctcgcgctctcgtttcgtcgctacgctagcttccagtcccgggcttagcaactgtgctgctgttgcactgcacccggcgcacgcagagatgcgccgtgtcgggacgggtgtgaggatgctttgcggcgcggcgctgtcggtgcttctgcttctcgcgggcggcgcggcggcgtcgcactcgcgctcgtcgtgccccgccacgcctccggacgcggggaacacgctgcaggtgtcgcacgcgttcgggccgtgctcgccgctgggccccgggacggcggcgccgtcgtgggcggggttcctggcggaccaggcgtcgcgtgacgcgtcgcggctgctgtacctggactcgctggcggtgcgtggccgcgcccgcgcgtacgcgcccatcgcgtcggggcggcagctgctgcagacgccgacgtacgtggtgcgggccagcctcggcacgccgccgcagcagctgctcctggccgtcgacaccagcaacgacgcctcgtggatcccttgcgccggctgcgcgggctgccccacgtcgtccgcggcgcccttcgacccggcctcgtccgcctcgtaccgcacggtgccctgcgggtcgccgctctgcgcgcaggcacccaacgcggcgtgcccgcccggcggcaaggcctgcggcttcagcctcacctacgccgactcctcgctgcaggccgcgctgtcgcaggactctctcgccgtcgccggcaacgccgtgaaggcctacaccttcgggtgcctgcagagggccactggcacggctgcgccgccgcaggggctgctggggctcggccgcggcccgctgtcgttcctttcgcagaccaaggacatgtacgaggccaccttctcgtactgtctccccagcttcaagtcgctcaacttctctggaacgctccggctcgggcgcaacggccagccgcagcgcatcaagacgacgccgctgctggccaacccgcaccggtcgtcgctctactacgtgaacatgaccggcatccgcgtgggcaggaaggtggtgcctatcccggcgttcgacccggcgacgggggcgggcaccgtgctggactctggcaccatgttcacccggctggtggcgccggcgtacgtggccgtgcgggacgaggtgacgctgccggaggagaacgtggtcatccacagcacgtacgggaccatcagctgcctggccatggccgcggcgcccgacggcgtcaacaccgtgctcaacgtcatcgccagcatgcagcagcagaaccaccgtgtgctcttcgacgtgcccaacggacgcgtaggcttcgcgcgcgagcgctgcaccgccgcttgatcagcttgctcgcgcgcctgcgcgcgggctcggattcgggttatatttagttaaacctacgttctacggttgtggacgtcatgcactgctgtcggagtgggtgattaataatttaactttccttttcttttcttttaccggtcagtgtaatctcgttgctcttcagatttaccatatgtgtttcacattcaccgatcgattgcttcaagtggcattatgtggtttaggggctgaatgattggggtctaaataatgtactgcatattccagttttggattaaagaggtgtttggttttagggactaatgtttagtcccttcattttattcctttttagtgtataaattgttaaatatagaaactaaaataaagttttagtttctatatttggtaattttggaactaaaatggaataaaatctagggactaaacattggtccctagaaaccaaacaccctctaagcacggtcgtcgtttaggcttgatatgcctaacaga

SEQ ID NO: 67395 - DNA, 2907 bp, Zea Mays
attcccttcacaaagctcagaccacaactgagtcctgactcctgagctttgtcgacatccacgccaccttcaaagcaatgcattccgccgcctccaccaataccaccgcctttgccgccgccgcgctctctacgctcctgtcgcgctgccgttccctcgcctccgtcaagcagctccatgcccacatcctcgcacgttcaaacagcccattcccctacaatcatttcctctccaaactcctctccctctcctgctccgcctctgcctccgccgccaactatgccctcctcctcctctcctcccacccggcgcccaccgccttcacctacaatgtcacaatccgcttattcgcctcatcgcgcccggacacctcccttcgcctcttcctcagcatgctccgcgccgaggtccgcgtccgacccgacgcatacaccctccctttcctcctcctcgccgcggcgcgctgcccggcaccggccctcgcccggtccgcccatgctctcctcgagaagatcggtctcggtgaccacgaccacaccgtccactccctcatcaccatgtactcctgccttgatgatcacctcgccgcgcgcagggtgttcgacggaatttcccaccgggatgtcgtctcttggaactcgatggtgaaggcatacgaacgggcagggatggtggccgaggttgaagggatgttgcggtcgatggtcaccgagggcgcagtggcacccaatggggtgactctggcggttgtgctcacagcttgcagggacgctggcaatttggtgcttgggaggtgggtggaggagtgggtgaggtctgcggggatggaggtggactcgctcattgggtcagcacttgtggggatgtatgagaagtgtggagagatggcagaggcacggcgtgtgtttgatggcatcagacacaaggatgtcgtggcatggaatgccatgatcaccgggtatgcgcaaaatggcatgtcaaatgaagcgatagccttgtttcacagcatgagggaagctgggctgtgtccggacaagataaccttggtcggtgtcctctcatcctgcgcagcagttggtgcactgaagcttggagttgaattggatacgtatgccatgcgcagaggcctctacaacaatgtctatgtaggaacagccttagtggacatgtatgctaagtgtggagatcttgagaaagccacgcatgtttttgggaagatgccattcaaaaatgaagcctcatggaatgcattaatctgtggacttgccttcaacggtcgaggctatgatgccattcagcagtttgaactaatgagagatgagaaaggactccaaccagatgatatcacattcataggtgtgctttcggcttgtgtacatgctgggctactcgagtatggccgccagttgttcaattctctgacacctgtttttaagatcattcctagaattgagcactactcctgcattgttgatttgttggcacgtgctggtcatttagaagaagcatgggattttattgaggaaatgcctggcaaggtagatgccgtcatgttaggcgctttgcttgctgcttgccggaaatgcaagaacactgaggttggtgagagggtcatcaataggattatgaagctggagccatcaaactcgtggaactacgtggtgtcatccaagatttatgcaacctcagataaaatggatgaatctgcaaggatgatagggctaatgagggagaggggtgtcaacaagactccagggtgcagctgggttgaggttaatggaaaagttcttgaattctatgcaagcactgaaccacagcatggtgcggaagatatgtatcaactcatgggcgtactggtaaatgagatgagactaaagggatatgttccaaaccttgatctggtgtagcacgtaataaagcatatttcctgttcttcttggagcaaaaggaatgacttatgctaattcacaggaggaggaaaatcgcaaaatgaaataaacagaggaacgacaagaacagcagcagccaacaatatgatgggataccatactataatataaaacgaaaaagagggaacacccaaatgctaaacctcaatagctgatactctttgcctgatttcaacttcttccttaatgcagtgaaccatttgcagcgtgctaagcaatcgttattgacaattatttaccttctcacttgttcaataaagtgtgccgcatggaatctctcatttggctattgggacctttttatggtctacttcctatcaccaccaccaagtcagtttgtttgtaagctgggaagataagagtccagttacaccgtgtggctccttaaatacgcacatgatttttaatgttacaggacaagagcgtggagacgcacaagatctacatcgctgaagcaggtgcaccctggtattggaatcccctgcgaggtcatgtctgtcatgaactcgctcatcaacgacaacttgccggcgaggctgccaagttcatccgccacaataagatgggcaccatcacatcccaggacatccaagggcatcaaggccgtcaccaagttcacctcgtctttgtcttcttctcccgtgtgactgtcttcgtgtgagtaacatgttggttggtcggaggcttggctgttgtggtctcgcgtaattgccgcggtggctttttggcagaatggaatgctatggttatgtgaatgttgatctctcagcactccgtacacctgcttgccacactgttttggccattgtgtcggggtctagattgggactgacttgagagtgtttcaggtctgttcagttgggtgttctggggccatgcagtctgattcagttcagcgtttcctttatcgtacctgctcaatgaatctaataccagatccgaaagagtgatcgcttct

SEQ ID NO: 67396 - DNA, 2851 bp, Zea Mays
cttcaaagcaatgcattccgccgcctccaccaataccaccgcctttgccgccgccgcgctctctacgctcctgtcgcgctgccgttccctcgcctccgtcaagcagctccatgcccacatcctcgcacgttcaaacagcccattcccctacaatcatttcctctccaaactcctctccctctcctgctccgcctctgcctccgccgccaactatgccctcctcctcctctcctcccacccggcgcccaccgccttcacctacaatgtcacaatccgcttattcgcctcatcgcgcccggacacctcccttcgcctcttcctcagcatgctccgcgccgaggtccgcgtccgacccgacgcatacaccctccctttcctcctcctcgccgcggcgcgctgcccggcaccggccctcgcccggtccgcccatgctctcctcgagaagatcggtctcggtgaccacgaccacaccgtccactccctcatcaccatgtactcctgccttgatgatcacctcgccgcgcgcagggtgttcgacggaatttcccaccgggatgtcgtctcttggaactcgatggtgaaggcatacgaacgggcagggatggtggccgaggttgaagggatgttgcggtcgatggtcaccgagggcgcagtggcacccaatggggtgactctggcggttgtgctcacagcttgcagggacgctggcaatttggtgcttgggaggtgggtggaggagtgggtgaggtctgcggggatggaggtggactcgctcattgggtcagcacttgtggggatgtatgagaagtgtggagagatggcagaggcacggcgtgtgtttgatggcatcagacacaaggatgtcgtggcatggaatgccatgatcaccgggtatgcgcaaaatggcatgtcaaatgaagcgatagccttgtttcacagcatgagggaagctgggctgtgtccggacaagataaccttggtcggtgtcctctcatcctgcgcagcagttggtgcactgaagcttggagttgaattggatacgtatgccatgcgcagaggcctctacaacaatgtctatgtaggaacagccttagtggacatgtatgctaagtgtggagatcttgagaaagccacgcatgtttttgggaagatgccattcaaaaatgaagcctcatggaatgcattaatctgtggacttgccttcaacggtcgaggctatgatgccattcagcagtttgaactaatgagagatgagaaaggactccaaccagatgatatcacattcataggtgtgctttcggcttgtgtacatgctgggctactcgagtatggccgccagttgttcaattctctgacacctgtttttaagatcattcctagaattgagcactactcctgcattgttgatttgttggcacgtgctggtcatttagaagaagcatgggattttattgaggaaatgcctggcaaggtagatgccgtcatgttaggcgctttgcttgctgcttgccggaaatgcaagaacactgaggttggtgagagggtcatcaataggattatgaagctggagccatcaaactcgtggaactacgtggtgtcatccaagatttatgcaacctcagataaaatggatgaatctgcaaggatgatagggctaatgagggagaggggtgtcaacaagactccagggtgcagctgggttgaggttaatggaaaagttcttgaattctatgcaagcactgaaccacagcatggtgcggaagatatgtatcaactcatgggcgtactggtaaatgagatgagactaaagggatatgttccaaaccttgatctggtgtagcacgtaataaagcatatttcctgttcttcttggagcaaaaggaatgacttatgctaattcacaggaggaggaaaatcgcaaaatgaaataaacagaggaacgacaagaacagcagcagccaacaatatgatgggataccatactataatataaaacgaaaaagagggaacacccaaatgctaaacctcaatagctgatactctttgcctgatttcaacttcttccttaatgcagtgaaccatttgcagcgtgctaagcaatcgttattgacaattatttaccttctcacttgttcaataaagtgtgccgcatggaatctctcatttggctattgggacctttttatggtctacttcctatcaccaccaccaagtcagtttgtttgtaagctgggaagataagagtccagttacaccgtgtggctccttaaatacgcacatgatttttaatgttacaggacaagagggcaagaagagcgtggagacgcacaagatctacatcgctgaagcaggtgcaccctggtattggaatcccctgcgaggtcatgtctgtcatgaactcgctcatcaacgacaacttgccggcgaggctgccaagttcatccgccacaataagatgggcaccatcacatcccaggacatccaagggcatcaaggccgtcaccaagttcacctcgtctttgtcttcttctcccgtgtgactgtcttcgtgtgagtaacatgttggttggtcggaggcttggctgttgtggtctcgcgtaattgccgcggtggctttttggcagaatggaatgctatggttatgtgaatgttgatctctcagcactccgtacacctgcttgccacactgttttggccattgtgtcggggtctagattgggactgacttgagagtgtttcaggtctgttcagttgggtgttctggggccatgcagtctgattcagttcagcgtttcctttatcgtacctgctcaatgaatctaataccagatccgaaagagtgatcgcttct

SEQ ID NO: 67397 - DNA, 670 bp, Zea Mays
gacacgttcgcatcgcacgtgaacgccgcagcggctacctcgcctctgacaggcagggcccaccagaagtgggggagggagaggaagatatcccgtgcccagtgccctcgccgtcgccgacctaccacacccgtttccgggaggagagagagggcgggggcgaaggggatggcaaagcgccggcgccacgagttggcgccggtcgtggaggagctgatttcgccgatgaacagcctggacgacggctgcctcatgcacatcttcagcttcctgagcccaatcccagatggcgcttccttgcatgccaccctcggctatggctgcgtgtcgagaggccaatcagagatgcgatggagcctggagtttatccagatctcgaggctgctgtttctgctgctaggccgggtgacaccattcttattgcggctggtggttcccatgttgcatgtaacatccaaataaagaagcctatttgcataattggcgggggcgatcttcctgatgacactgtattgacctgctcacgtggtttcgacaagttcaacgaagacttccagagacaccagtgcctagtgggatcctaaggcacaatagtaatggaaagagaggcatgtgcaggatgaagttgacatgggaagataccgtaaaaagaagacttaagggctagttt

SEQ ID NO: 67398 - DNA, 597 bp, Zea Mays
gacacgttcgcatcgcacgtgaacgccgcagcggctacctcgcctctgacaggcagggcccaccagaagtgggggagggagaggaagatatcccgtgcccagtgccctcgccgtcgccgacctaccacacccgtttccgggaggagagagagggcgggggcgaaggggatggcaaagcgccggcgccacgagttggcgccggtcgtggaggagctgatttcgccgatgaacagcctggacgacggctgcctcatgcacatcttcagcttcctgagcccaatcccagataggtataacaccgccctcgtttgccacagatggcgcttccttgcatgccaccctcggctatggctgcgtgtcgagaggccaatcagagatgcgatggagcctggagtttatccagatctcgaggctgctgtttctgctgctaggccgggtgacaccattcttattgcggctggtggttcccatgttgcatgtaacatccaaataaagaagcctatttgcataattggcgggggcgatcttcctgatgacactgtattgacctgctcacgtggtttcgacaatcttacctaggtttccattgattggcct

SEQ ID NO: 67399 - DNA, 1384 bp, Zea Mays
cgagagccgagagagacaggagatgctttaattcgaacgcggttgcctcctccctcgagcccttctccttccttctttccttgcttcctccccccacagccacagtggcatatcgcatcacgccaaagcccatccgccggccgtagatcggctccggcaaccggcttcgaccgcggcctcccctctgagaattcaccaaaaccaaatgtggcaagctatggcaacgtgcgtgagctactggaatgccctgtgtgtttgagtgccatgtatcctccaattcatcagtgctccaacggacatactctgtgttctggatgcaagccaagggttcataatcgctgtccaacatgcaggcatgaactgggtaacataagatgccttgctctggaaaaggtggctgcatcactagagcttccatgcaagtaccagaactttgggtgcttgggcatatatccttactattgcaagctgaaacacgaatcgcaatgccaatacagaccatatacttgtccatatgctggatctgaatgcacggttgctggtgatattccgtatctagtaaatcacttgaaagatgaccataaggtcgacatgcacaatggaagcaccttcaatcatcgttatgtcaagtcaaatcctcatgaagtcgagaatgctacctggatgctcacggttttcagctgcttcggccagtacttctgcctgcacttcgaggctttccagctgggcatggcgcccgtgtacatcgccttcctccggttcatgggggacgacgctgaggccaagaactacagctacagcctggaggtcgggggcagcgggcgcaagatgacatggcagggcgtgcctcggagcatcagagacagccaccggaaggtccgggacagctacgacgggctcatcatccagcgcaacatggcgctcttcttctcgggtggcgacaggaaggagctcaagctgcgggtcaccgggaggatctggaaggagcagcagcagctcgacgcatgcggcgttgcgtgtgttccttctccggtgttaccatgacctgaagcatggaatccaggaaccttgtagggtggtgtaggtggtagttggaatctttgagtcgtgggtggttcttgtgtcgttgtgtggtagtggtaccgactgatttagagaactggaggcaattctctcctttgctttgaacctgtcgagagctggtcatgatgggcacggctgtggactccatgaaatgtaaatgatgtatcccggctcactctgtctgtggatcagactcgctctctatcggcggaccacaattgttcctgagtttggccaatgagttaggtcccaaccattctctgctccagctggtacacgtagttttagtgagatctgtttg

SEQ ID NO: 67400 - DNA, 1354 bp, Zea Mays
cttcttttctgggggcgatttgattgccactgattttcggcctagaggttccccatggcatcagttacttatattgatgatagccatgctgaggttattgatcctccaaagaatgaggaaatgctggatgccactgaacttgttggtgatcatattcagaattcaccaaaaccaaatgtggcaagctatggcaacgtgcgtgagctactggaatgccctgtgtgtttgagtgccatgtatcctccaattcatcagtgctccaacggacatactctgtgttctggatgcaagccaagggttcataatcgctgtccaacatgcaggcatgaactgggtaacataagatgccttgctctggaaaaggtggctgcatcactagagcttccatgcaagtaccagaactttgggtgcttgggcatatatccttactattgcaagctgaaacacgaatcgcaatgccaatacagaccatatacttgtccatatgctggatctgaatgcacggttgctggtgatattccgtatctagtaaatcacttgaaagatgaccataaggtcgacatgcacaatggaagcaccttcaatcatcgttatgtcaagtcaaatcctcatgaagtcgagaatgctacctggatgctcacggttttcagctgcttcggccagtacttctgcctgcacttcgaggctttccagctgggcatggcgcccgtgtacatcgccttcctccggttcatgggggacgacgctgaggccaagaactacagctacagcctggaggtcgggggcagcgggcgcaagatgacatggcagggcgtgcctcggagcatcagagacagccaccggaaggtccgggacagctacgacgggctcatcatccagcgcaacatggcgctcttcttctcgggtggcgacaggaaggagctcaagctgcgggtcaccgggaggatctggaaggagcagcagcagctcgacgcatgcggcgttgcgtgtgttccttctccggtgttaccatgacctgaagcatggaatccaggaaccttgtagggtggtgtaggtggtagttggaatctttgagtcgtgggtggttcttgtgtcgttgtgtggtagtggtaccgactgatttagagaactggaggcaattctctcctttgctttgaacctgtcgagagctggtcatgatgggcacggctgtggactccatgaaatgtaaatgatgtatcccggctcactctgtctgtggatcagactcgctctctatcggcggaccacaattgttcctgagtttggccaatgagttaggtcccaaccattctctgctccagctggtacacgtagttttagtgagatctgtttg

SEQ ID NO: 67401 - DNA, 736 bp, Zea Mays
gctctacctgtttttcttctctgggttttcagctgcttcggccagtacttctgcctgcacttcgaggctttccagctgggcatggcgcccgtgtacatcgccttcctccggttcatgggggacgacgctgaggccaagaactacagctacagcctggaggtcgggggcagcgggcgcaagatgacatggcagggcgtgcctcggagcatcagagacagccaccggaaggtccgggacagctacgacgggctcatcatccagcgcaacatggcgctcttcttctcgggtggcgacaggaaggagctcaagctgcgggtcaccgggaggatctggaaggagcagcagcagctcgacgcatgcggcgttgcgtgtgttccttctccggtgttaccatgacctgaagcatggaatccaggaaccttgtagggtggtgtaggtggtagttggaatctttgagtcgtgggtggttcttgtgtcgttgtgtggtagtggtaccgactgatttagagaactggaggcaattctctcctttgctttgaacctgtcgagagctggtcatgatgggcacggctgtggactccatgaaatgtaaatgatgtatcccggctcactctgtctgtggatcagactcgctctctatcggcggaccacaattgttcctgagtttggccaatgagttaggtcccaaccattctctgctccagctggtacacgtagttttagtgagatctgtttg

SEQ ID NO: 67402 - DNA, 536 bp, Zea Mays
aggtatgtgcaaaattttaggccattcgaagtttatttgattgttttttttattttttcttctttgtttttgggctgttaaaatgcgacagtgcccgtaaaaacagtattgccgtacaagagcataacacgaccttgtgagccataccagagtttacaactagaagccatcctctgctagtctgctccgtttacttgggccagagctccaggaggcaggagcccaatctgctccttttgttttcctcccagttggtgttctgaaggtatttgcagctacgacggccatggttctcggtgaaccaaaactgcctaggtaacctgcactggtcaaccggtcaaaggacatggcacgactccactactgggcaccgaatccgttgacgatccctgcttgcatttgaccgtcgatgagattcatattcatggattttttacaatgcaaaaaaagtagggaaaaaaagatcttatcctttctcagtcccaatggatatgtcaaccattttccttgttacatgctctcatccacgcttgcag

SEQ ID NO: 67403 - DNA, 481 bp, Zea Mays
cgaccttgtgagccataccagagtttacaactagaagccatcctctgctagtctgctccgtttacttgggccagagctccaggaggcaggagcccaatctgctccttttgttttcctcccagttggtgttctgaaggtatttgcagctacgacggccatggttctcggtgaaccaaaactgcctaggtaacctgcactggtcaaccggtcaaaggacatggcacgactccactactgggcaccgaatccgttgacgatccctgcttgcatttgaccgtcgatgagattcatattcatggattttttacaatgcaaaaaaagtagggaaaaaaagatcttatcctttctcagtcccaatggatatgtcaaccattttccttgttacatgctctcatccacgcttgctagcataagcagaatcaagtgtcatcttagcaaaccgccttcttcgctgaatatagctacacagcacagacaccag

SEQ ID NO: 67404 - DNA, 357 bp, Zea Mays
gtggacaaggttgttcgagtcatctaattccttcagctacaacaaaggtccatgcccagtaggaaaatgactaggatgaacaccacgctttggcctttcattaccataccgtctcatttcaactggaccccaaccaagaattcctgcagaactactagattcctgcaacctatttccatttgtcataattggaggttgatacaaaggctgggtgtcaaactgattatcagggtctgctctccgtcgacgcttccaggcttcagaacttccagagctctcattattgtgcaaagactcagaattgtactggagagacctggttggcctatggtttcttgtaggatgaagttgatttga

SEQ ID NO: 67405 - DNA, 455 bp, Zea Mays
caccttgtgccgcggccgacgagaggagcaggaggcggcgggcaggcgggcggggacaggcaacgggtgctcagtccccacgacagagacgaatgctcggaccggcacgaggcgggtttttctggctcgacgcgggcgcctatttgtctgcgcgatcgccgtcgccggcggccgcggggctggcggcgggaggggagcgagaggggcggggcgcaacgcccgtgcgatttattcaaacagaaccgggcgaatttccgcgattttttgcggtattttccacgatttttcgtctaggattcggatcgaaggcggggacaggaggggggctagacggcggcgatcgccggagacgggctcccggcggggaggcgcggcggcggcggcggcggcgcgcaagggagaggggtggttatctaacacaagggggtaagggcgattaggaagggcagataagt

SEQ ID NO: 67406 - DNA, 2560 bp, Zea Mays
cttataaggaatgaggtgatgatggatcaactcattctattcaacaaaccaaataaaaatgtgagaagtgagaagaagatgaatcactttattcctcgaaccaaacacacccttaatgttttactctagagcccatgctaaacacgccatgagtcttggtctatttaacacactttaaatagttaataggtctgtataaacttattaaacaatatatatggatctaaataacacactccaaatagtggtactgatgcactttactctctcaacagcaaccacaaaagaaaagggtgcgtagcccctaacccatatgtgtgtaatattgactcgatactgtgtgcctaccacgatttcggagagaccgagacagcggacttccgtaccgcgcgccgccgccaccgccatctatcctggaagcctgctgctctccacgcaaccacgccggcccccgtcaaccggtcgccatctctcctggactcctgctctccacgcaacgccgggcagccccgcctcagctcctcaccctcctcgacaactctccctccggccggtcgccccccacgactccccggggcccgtcgtccgcacgggcacgggctgcacggtggtgggagcagaaccagagcagccgaggaggcacatctactccgggctccggacctccctcggcctcaacccctctggagtctggattctgccatttcataccatctccgcttcgccactgccagcgcgctggccctggagcggaggcaagaggggtgactacaaggagcttttcgtcatggcactgcctaaggacggctgcctcgatggtgccaagatcacagaggtaggaggggtcggctacaaggagcttcttgtcatggcgctgcctaaggacgacagcatcgatggcgccaaggtcgcagaggccatcggcgtcaagctgccagacgtcgggggggccataaggactattttgaatagcagagaggccagagaatttgccagtggggcactagctggtgctatgtcaaaggctattcttgcacctctagagactatcagatattgtgcttaccgtattttgagcttagtggttgggttgacaggaggcattaatggcaggacaagaatgattgtaggagtaggacctaggcacatttttggtagtttggtggatatcatccaacaaaacgggtggcaagggctttgggcagggaatacaatcaacatgctccgcatcattccaacccaagcagtcgaactcggaacatttgaatgcgtcaagaggagcatggcagaagcacaagagaaatggaaagaggacggatgcccaaagatacagcttggtaatatgaaaatcgagcttccacttcacctcttatctccagttgctattgccggtgctgctgctggaatagctgccacactggcgtgccatcctctcgaagttatcaaggatcgcttgactatcaaccgagaggtttatccaagcattggccttgccttccgcaggatctataagacggatggtataggtggtttctatgctggcctgtgtccaacgctgattggcatgattccttacacaacatgttacttctttatgtatgacacgatcaagacctcttactgccgcttgcataagaagtcgtctctgagccgccctgagcttctacttatcggcgctctttcaggtcttactgcaagcacaatcagcttccctctggaagtagcaaggaagcggttgatggccggcgccctgcaggggaagtgcccgcctaacatgattgccgccttgtcggaggtgatccaggaggagggcgtcatggggctttaccgcgggtggggggcgagctgcctgaaggtgatgccgaattctggcatcacctgggtgttgtacgaggcatggaaggatgttcttctggctgacaggaacaagccacgctctttagcgaactaaacaggccgtccttgagcaatggaggcgttgctgggattcctgatctattttcagttttggaatcccggctgcggcgagtggggtacatagggcgcgtttctctcttttttgattgactgatgagtggtaagcgttttgttgtgtcatcggcacacagacaaacatcattaatgtgtcaaaaaactaagcgaaaagacaaacccttctgtatttcctgagtggaaagatggggaacctaaccctacctggagcctctgcaggaaccttttccttcatctaccaatcagatacagggagcttcaggttgacagatcgcaccaactgaaggacgaacctgttctgcgacaacaagcaggataagctgaggaacctgttttgcaagctaagttgagatgtaatttttgtcttgggctgggtggttatagtgttttctttcggcttttcttttctttctgcctcaagtctgaagcgaagtttataaattatttttcctcggctaatataatttgggtggcaaagcttttgccgcttccttaaaaaaagagtggtaagcattttgttgtgtcatcaattctgaattcttgtgctgttataagaaaaaaggatttg

SEQ ID NO: 67407 - DNA, 2457 bp, Zea Mays
tcaactcattctattcaacaaaccaaataaaaatgtgagaagtgagaagaagatgaatcactttattcctcgaaccaaacacacccttaatgttttactctagagcccatgctaaacacgccatgagtcttggtctatttaacacactttaaatagttaataggtctgtataaacttattaaacaatatatatggatctaaataacacactccaaatagtggtactgatgcactttactctctcaacagcaaccacaaaagaaaagggtgcgtagcccctaacccatatgtgtgtaatattgactcgatactgtgtgcctaccacgatttcggagagaccgagacagcggacttccgtaccgcgcgccgccgccaccgccatctatcctggaagcctgctgctctccacgcaaccacgccggcccccgtcaaccggtcgccatctctcctggactcctgctctccacgcaacgccgggcagccccgcctcagctcctcaccctcctcgacaactctccctccggccggtcgccccccacgactccccggggcccgtcgtccgcacgggcacgggctgcacggtggtgggagcagaaccagagcagccgaggaggcacatctactccgggctccggacctccctcggcctcaacccctctggagtctggattctgccatttcataccatctccgcttcgccactgccagcgcgctggccctggagcggaggcaagaggggtgactacaaggagcttttcgtcatggcactgcctaaggacggctgcctcgatggtgccaagatcacagaggtaggaggggtcggctacaaggagcttcttgtcatggcgctgcctaaggacgacagcatcgatggcgccaaggtcgcagaggccatcggcgtcaagctgccagacgtcgggggggccataaggagaggccagagaatttgccagtggggcactagctggtgctatgtcaaaggctattcttgcacctctagagactatcaggacaagaatgattgtaggagtaggacctaggcacatttttggtagtttggtggatatcatccaacaaaacgggtggcaagggctttgggcagggaatacaatcaacatgctccgcatcattccaacccaagcagtcgaactcggaacatttgaatgcgtcaagaggagcatggcagaagcacaagagaaatggaaagaggacggatgcccaaagatacagcttggtaatatgaaaatcgagcttccacttcacctcttatctccagttgctattgccggtgctgctgctggaatagctgccacactggcgtgccatcctctcgaagttatcaaggatcgcttgactatcaaccgagaggtttatccaagcattggccttgccttccgcaggatctataagacggatggtataggtggtttctatgctggcctgtgtccaacgctgattggcatgattccttacacaacatgttacttctttatgtatgacacgatcaagacctcttactgccgcttgcataagaagtcgtctctgagccgccctgagcttctacttatcggcgctctttcaggtcttactgcaagcacaatcagcttccctctggaagtagcaaggaagcggttgatggccggcgccctgcaggggaagtgcccgcctaacatgattgccgccttgtcggaggtgatccaggaggagggcgtcatggggctttaccgcgggtggggggcgagctgcctgaaggtgatgccgaattctggcatcacctgggtgttgtacgaggcatggaaggatgttcttctggctgacaggaacaagccacgctctttagcgaactaaacaggccgtccttgagcaatggaggcgttgctgggattcctgatctattttcagttttggaatcccggctgcggcgagtggggtacatagggcgcgtttctctcttttttgattgactgatgagtggtaagcgttttgttgtgtcatcggcacacagacaaacatcattaatgtgtcaaaaaactaagcgaaaagacaaacccttctgtatttcctgagtggaaagatggggaacctaaccctacctggagcctctgcaggaaccttttccttcatctaccaatcagatacagggagcttcaggttgacagatcgcaccaactgaaggacgaacctgttctgcgacaacaagcaggataagctgaggaacctgttttgcaagctaagttgagatgtaatttttgtcttgggctgggtggttatagtgttttctttcggcttttcttttctttctgcctcaagtctgaagcgaagtttataaattatttttcctcggctaatataatttgggtggcaaagcttttgccgcttccttaaaaaaagagtggtaagcattttgttgtgtcatcaattctgaattcttgtgctgttataagaaaaaaggatttg

SEQ ID NO: 67408 - DNA, 2871 bp, Zea Mays
agaagatgaatcactttattcctcgaaccaaacacacccttaatgttttactctagagcccatgctaaacacgccatgagtcttggtctatttaacacactttaaatagttaataggtctgtataaacttattaaacaatatatatggatctaaataacacactccaaatagtggtactgatgcactttactctctcaacagcaaccacaaaagaaaagggtgcgtagcccctaacccatatgtgtgtaatattgactcgatactgtgtgcctaccacgatttcggagagaccgagacagcggacttccgtaccgcgcgccgccgccaccgccatctatcctggaagcctgctgctctccacgcaaccacgccggcccccgtcaaccggtcgccatctctcctggactcctgctctccacgcaacgccgggcagccccgcctcagctcctcaccctcctcgacaactctccctccggccggtcgccccccacgactccccggggcccgtcgtccgcacgggcacgggctgcacggtggtgggagcagaaccagagcagccgaggaggcacatctactccgggctccggacctccctcggcctcaacccctctggagtctggattctgccatttcataccatctccgcttcgccactgccagcgcgctggccctggagcggaggcaagaggggtgactacaaggagcttttcgtcatggcactgcctaaggacggctgcctcgatggtgccaagatcacagaggtaggaggggtcggctacaaggagcttcttgtcatggcgctgcctaaggacgacagcatcgatggcgccaaggtcgcagaggccatcggcgtcaagctgccagacgtcgggggggccataagggtttttgacgcgatgattcgtcacagagtttcagattcttatgttttgtcacaagggcaagtctttttgctgcttaagtgctagtatgcaaactgtgtatgtttgatcatcaagtgatgattttctaccgtttttgcaagtaatgacttgctgtgaaaccgacatttgggctataagatgtggtattttgtggggccctacagaagcacatagttgaatgtacattacttacctcaataacttgtaatttacactataatgtatagatacggcgtcttcaataaatactgaaatgccttttgtttatatgatggaattagataatgtggttgctaattcgttacacacttacgctattaaatgtactttgtaacttgaactatcttactctctaatcttcggtacattgacaaccatacaatgccaaagaacttgcagttgcagactattttgaatagcagagaggccagagaatttgccagtggggcactagctggtgctatgtcaaaggctattcttgcacctctagagactatcaggacaagaatgattgtaggagtaggacctaggcacatttttggtagtttggtggatatcatccaacaaaacgggtggcaagggctttgggcagggaatacaatcaacatgctccgcatcattccaacccaagcagtcgaactcggaacatttgaatgcgtcaagaggagcatggcagaagcacaagagaaatggaaagaggacggatgcccaaagatacagcttggtaatatgaaaatcgagcttccacttcacctcttatctccagttgctattgccggtgctgctgctggaatagctgccacactggcgtgccatcctctcgaagttatcaaggatcgcttgactatcaaccgagaggtttatccaagcattggccttgccttccgcaggatctataagacggatggtataggtggtttctatgctggcctgtgtccaacgctgattggcatgattccttacacaacatgttacttctttatgtatgacacgatcaagacctcttactgccgcttgcataagaagtcgtctctgagccgccctgagcttctacttatcggcgctctttcaggtcttactgcaagcacaatcagcttccctctggaagtagcaaggaagcggttgatggccggcgccctgcaggggaagtgcccgcctaacatgattgccgccttgtcggaggtgatccaggaggagggcgtcatggggctttaccgcgggtggggggcgagctgcctgaaggtgatgccgaattctggcatcacctgggtgttgtacgaggcatggaaggatgttcttctggctgacaggaacaagccacgctctttagcgaactaaacaggccgtccttgagcaatggaggcgttgctgggattcctgatctattttcagttttggaatcccggctgcggcgagtggggtacatagggcgcgtttctctcttttttgattgactgatgagtggtaagcgttttgttgtgtcatcggcacacagacaaacatcattaatgtgtcaaaaaactaagcgaaaagacaaacccttctgtatttcctgagtggaaagatggggaacctaaccctacctggagcctctgcaggaaccttttccttcatctaccaatcagatacagggagcttcaggttgacagatcgcaccaactgaaggacgaacctgttctgcgacaacaagcaggataagctgaggaacctgttttgcaagctaagttgagatgtaatttttgtcttgggctgggtggttatagtgttttctttcggcttttcttttctttctgcctcaagtctgaagcgaagtttataaattatttttcctcggctaatataatttgggtggcaaagcttttgccgcttccttaaaaaaagagtggtaagcattttgttgtgtcatcaattctgaattcttgtgctgttataagaaaaaaggatttg

SEQ ID NO: 67409 - DNA, 3009 bp, Zea Mays
agaagatgaatcactttattcctcgaaccaaacacacccttaatgttttactctagagcccatgctaaacacgccatgagtcttggtctatttaacacactttaaatagttaataggtctgtataaacttattaaacaatatatatggatctaaataacacactccaaatagtggtactgatgcactttactctctcaacagcaaccacaaaagaaaagggtgcgtagcccctaacccatatgtgtgtaatattgactcgatactgtgtgcctaccacgatttcggagagaccgagacagcggacttccgtaccgcgcgccgccgccaccgccatctatcctggaagcctgctgctctccacgcaaccacgccggcccccgtcaaccggtcgccatctctcctggactcctgctctccacgcaacgccgggcagccccgcctcagctcctcaccctcctcgacaactctccctccggccggtcgccccccacgactccccggggcccgtcgtccgcacgggcacgggctgcacggtggtgggagcagaaccagagcagccgaggaggcacatctactccgggctccggacctccctcggcctcaacccctctggagtctggattctgccatttcataccatctccgcttcgccactgccagcgcgctggccctggagcggaggcaagaggggtgactacaaggagcttttcgtcatggcactgcctaaggacggctgcctcgatggtgccaagatcacagaggtaggaggggtcggctacaaggagcttcttgtcatggcgctgcctaaggacgacagcatcgatggcgccaaggtcgcagaggccatcggcgtcaagctgccagacgtcgggggggccataagggtttttgacgcgatgattcgtcacagagtttcagattcttatgttttgtcacaagggcaagtctttttgctgcttaagtgctagtatgcaaactgtgtatgtttgatcatcaagtgatgattttctaccgtttttgcaagtaatgacttgctgtgaaaccgacatttgggctataagatgtggtattttgtggggccctacagaagcacatagttgaatgtacattacttacctcaataacttgtaatttacactataatgtatagatacggcgtcttcaataaatactgaaatgccttttgtttatatgatggaattagataatgtggttgctaattcgttacacacttacgctattaaatgtactttgtaacttgaactatcttactctctaatcttcggtacattgacaaccatacaatgccaaagaacttgcagttgcaggtaggctttgcctagagaagtcgcttcaatttcaatcctcatagatgccttatatatgaatttaaactttgaagtaacgatgaatttttgactgatcgtttgaggccttccttttatccaattcaccacagactattttgaatagcagagaggccagagaatttgccagtggggcactagctggtgctatgtcaaaggctattcttgcacctctagagactatcaggacaagaatgattgtaggagtaggacctaggcacatttttggtagtttggtggatatcatccaacaaaacgggtggcaagggctttgggcagggaatacaatcaacatgctccgcatcattccaacccaagcagtcgaactcggaacatttgaatgcgtcaagaggagcatggcagaagcacaagagaaatggaaagaggacggatgcccaaagatacagcttggtaatatgaaaatcgagcttccacttcacctcttatctccagttgctattgccggtgctgctgctggaatagctgccacactggcgtgccatcctctcgaagttatcaaggatcgcttgactatcaaccgagaggtttatccaagcattggccttgccttccgcaggatctataagacggatggtataggtggtttctatgctggcctgtgtccaacgctgattggcatgattccttacacaacatgttacttctttatgtaaatgaatcagcatctggttgcatcttttgcttcagtcggttcacctgttgcgtaccgcttcaacatcctgtctcaaaatttgagataggaaaagtcttactgcaagcacaatcagcttccctctggaagtagcaaggaagcggttgatggccggcgccctgcaggggaagtgcccgcctaacatgattgccgccttgtcggaggtgatccaggaggagggcgtcatggggctttaccgcgggtggggggcgagctgcctgaaggtgatgccgaattctggcatcacctgggtgttgtacgaggcatggaaggatgttcttctggctgacaggaacaagccacgctctttagcgaactaaacaggccgtccttgagcaatggaggcgttgctgggattcctgatctattttcagttttggaatcccggctgcggcgagtggggtacatagggcgcgtttctctcttttttgattgactgatgagtggtaagcgttttgttgtgtcatcggcacacagacaaacatcattaatgtgtcaaaaaactaagcgaaaagacaaacccttctgtatttcctgagtggaaagatggggaacctaaccctacctggagcctctgcaggaaccttttccttcatctaccaatcagatacagggagcttcaggttgacagatcgcaccaactgaaggacgaacctgttctgcgacaacaagcaggataagctgaggaacctgttttgcaagctaagttgagatgtaatttttgtcttgggctgggtggttatagtgttttctttcggcttttcttttctttctgcctcaagtctgaagcgaagtttataaattatttttcctcggctaatataatttgggtggcaaagcttttgccgcttccttaaaaaaagagtggtaagcattttgttgtgtcatcaattctgaattcttgtgctgttataagaaaaaaggatttg

SEQ ID NO: 67410 - DNA, 2985 bp, Zea Mays
agaagatgaatcactttattcctcgaaccaaacacacccttaatgttttactctagagcccatgctaaacacgccatgagtcttggtctatttaacacactttaaatagttaataggtctgtataaacttattaaacaatatatatggatctaaataacacactccaaatagtggtactgatgcactttactctctcaacagcaaccacaaaagaaaagggtgcgtagcccctaacccatatgtgtgtaatattgactcgatactgtgtgcctaccacgatttcggagagaccgagacagcggacttccgtaccgcgcgccgccgccaccgccatctatcctggaagcctgctgctctccacgcaaccacgccggcccccgtcaaccggtcgccatctctcctggactcctgctctccacgcaacgccgggcagccccgcctcagctcctcaccctcctcgacaactctccctccggccggtcgccccccacgactccccggggcccgtcgtccgcacgggcacgggctgcacggtggtgggagcagaaccagagcagccgaggaggcacatctactccgggctccggacctccctcggcctcaacccctctggagtctggattctgccatttcataccatctccgcttcgccactgccagcgcgctggccctggagcggaggcaagaggggtgactacaaggagcttttcgtcatggcactgcctaaggacggctgcctcgatggtgccaagatcacagaggtaggaggggtcggctacaaggagcttcttgtcatggcgctgcctaaggacgacagcatcgatggcgccaaggtcgcagaggccatcggcgtcaagctgccagacgtcgggggggccataagggtttttgacgcgatgattcgtcacagagtttcagattcttatgttttgtcacaagggcaagtctttttgctgcttaagtgctagtatgcaaactgtgtatgtttgatcatcaagtgatgattttctaccgtttttgcaagtaatgacttgctgtgaaaccgacatttgggctataagatgtggtattttgtggggccctacagaagcacatagttgaatgtacattacttacctcaataacttgtaatttacactataatgtatagatacggcgtcttcaataaatactgaaatgccttttgtttatatgatggaattagataatgtggttgctaattcgttacacacttacgctattaaatgtactttgtaacttgaactatcttactctctaatcttcggtacattgacaaccatacaatgccaaagaacttgcagttgcaggtaggctttgcctagagaagtcgcttcaatttcaatcctcatagatgccttatatatgaatttaaactttgaagtaacgatgaatttttgactgatcgtttgaggccttccttttatccaattcaccacagactattttgaatagcagagaggccagagaatttgccagtggggcactagctggtgctatgtcaaaggctattcttgcacctctagagactatcaggagtaggacctaggcacatttttggtagtttggtggatatcatccaacaaaacgggtggcaagggctttgggcagggaatacaatcaacatgctccgcatcattccaacccaagcagtcgaactcggaacatttgaatgcgtcaagaggagcatggcagaagcacaagagaaatggaaagaggacggatgcccaaagatacagcttggtaatatgaaaatcgagcttccacttcacctcttatctccagttgctattgccggtgctgctgctggaatagctgccacactggcgtgccatcctctcgaagttatcaaggatcgcttgactatcaaccgagaggtttatccaagcattggccttgccttccgcaggatctataagacggatggtataggtggtttctatgctggcctgtgtccaacgctgattggcatgattccttacacaacatgttacttctttatgtatgacacgatcaagacctcttactgccgcttgcataagaagtcgtctctgagccgccctgagcttctacttatcggcgctctttcaggtcttactgcaagcacaatcagcttccctctggaagtagcaaggaagcggttgatggccggcgccctgcaggggaagtgcccgcctaacatgattgccgccttgtcggaggtgatccaggaggagggcgtcatggggctttaccgcgggtggggggcgagctgcctgaaggtgatgccgaattctggcatcacctgggtgttgtacgaggcatggaaggatgttcttctggctgacaggaacaagccacgctctttagcgaactaaacaggccgtccttgagcaatggaggcgttgctgggattcctgatctattttcagttttggaatcccggctgcggcgagtggggtacatagggcgcgtttctctcttttttgattgactgatgagtggtaagcgttttgttgtgtcatcggcacacagacaaacatcattaatgtgtcaaaaaactaagcgaaaagacaaacccttctgtatttcctgagtggaaagatggggaacctaaccctacctggagcctctgcaggaaccttttccttcatctaccaatcagatacagggagcttcaggttgacagatcgcaccaactgaaggacgaacctgttctgcgacaacaagcaggataagctgaggaacctgttttgcaagctaagttgagatgtaatttttgtcttgggctgggtggttatagtgttttctttcggcttttcttttctttctgcctcaagtctgaagcgaagtttataaattatttttcctcggctaatataatttgggtggcaaagcttttgccgcttccttaaaaaaagagtggtaagcattttgttgtgtcatcaattctgaattcttgtgctgttataagaaaaaaggatttg

SEQ ID NO: 67411 - DNA, 2646 bp, Zea Mays
agaagatgaatcactttattcctcgaaccaaacacacccttaatgttttactctagagcccatgctaaacacgccatgagtcttggtctatttaacacactttaaatagttaataggtctgtataaacttattaaacaatatatatggatctaaataacacactccaaatagtggtactgatgcactttactctctcaacagcaaccacaaaagaaaagggtgcgtagcccctaacccatatgtgtgtaatattgactcgatactgtgtgcctaccacgatttcggagagaccgagacagcggacttccgtaccgcgcgccgccgccaccgccatctatcctggaagcctgctgctctccacgcaaccacgccggcccccgtcaaccggtcgccatctctcctggactcctgctctccacgcaacgccgggcagccccgcctcagctcctcaccctcctcgacaactctccctccggccggtcgccccccacgactccccggggcccgtcgtccgcacgggcacgggctgcacggtggtgggagcagaaccagagcagccgaggaggcacatctactccgggctccggacctccctcggcctcaacccctctggagtctggattctgccatttcataccatctccgcttcgccactgccagcgcgctggccctggagcggaggcaagaggggtgactacaaggagcttttcgtcatggcactgcctaaggacggctgcctcgatggtgccaagatcacagaggtaggaggggtcggctacaaggagcttcttgtcatggcgctgcctaaggacgacagcatcgatggcgccaaggtcgcagaggccatcggcgtcaagctgccagacgtcgggggggccataagggtttttgacgcgatgattcgtcacagagtttcagattcttatgttttgtcacaagggcaagtctttttgctgcttaagtgctagtatgcaaactgtgtatgtttgatcatcaagtgatgattttctaccgtttttgcaagtaatgacttgctgtgaaaccgacatttgggctataagatgtggtattttgtggggccctacagaagcacatagttgaatactattttgaatagcagagaggccagagaatttgccagtggggcactagctggtgctatgtcaaaggctattcttgcacctctagagactatcaggacaagaatgattgtaggagtaggacctaggcacatttttggtagtttggtggatatcatccaacaaaacgggtggcaagggctttgggcagggaatacaatcaacatgctccgcatcattccaacccaagcagtcgaactcggaacatttgaatgcgtcaagaggagcatggcagaagcacaagagaaatggaaagaggacggatgcccaaagatacagcttggtaatatgaaaatcgagcttccacttcacctcttatctccagttgctattgccggtgctgctgctggaatagctgccacactggcgtgccatcctctcgaagttatcaaggatcgcttgactatcaaccgagaggtttatccaagcattggccttgccttccgcaggatctataagacggatggtataggtggtttctatgctggcctgtgtccaacgctgattggcatgattccttacacaacatgttacttctttatgtatgacacgatcaagacctcttactgccgcttgcataagaagtcgtctctgagccgccctgagcttctacttatcggcgctctttcaggtcttactgcaagcacaatcagcttccctctggaagtagcaaggaagcggttgatggccggcgccctgcaggggaagtgcccgcctaacatgattgccgccttgtcggaggtgatccaggaggagggcgtcatggggctttaccgcgggtggggggcgagctgcctgaaggtgatgccgaattctggcatcacctgggtgttgtacgaggcatggaaggatgttcttctggctgacaggaacaagccacgctctttagcgaactaaacaggccgtccttgagcaatggaggcgttgctgggattcctgatctattttcagttttggaatcccggctgcggcgagtggggtacatagggcgcgtttctctcttttttgattgactgatgagtggtaagcgttttgttgtgtcatcggcacacagacaaacatcattaatgtgtcaaaaaactaagcgaaaagacaaacccttctgtatttcctgagtggaaagatggggaacctaaccctacctggagcctctgcaggaaccttttccttcatctaccaatcagatacagggagcttcaggttgacagatcgcaccaactgaaggacgaacctgttctgcgacaacaagcaggataagctgaggaacctgttttgcaagctaagttgagatgtaatttttgtcttgggctgggtggttatagtgttttctttcggcttttcttttctttctgcctcaagtctgaagcgaagtttataaattatttttcctcggctaatataatttgggtggcaaagcttttgccgcttccttaaaaaaagagtggtaagcattttgttgtgtcatcaattctgaattcttgtgctgttataagaaaaaaggatttg

SEQ ID NO: 67412 - DNA, 3062 bp, Zea Mays
agaagatgaatcactttattcctcgaaccaaacacacccttaatgttttactctagagcccatgctaaacacgccatgagtcttggtctatttaacacactttaaatagttaataggtctgtataaacttattaaacaatatatatggatctaaataacacactccaaatagtggtactgatgcactttactctctcaacagcaaccacaaaagaaaagggtgcgtagcccctaacccatatgtgtgtaatattgactcgatactgtgtgcctaccacgatttcggagagaccgagacagcggacttccgtaccgcgcgccgccgccaccgccatctatcctggaagcctgctgctctccacgcaaccacgccggcccccgtcaaccggtcgccatctctcctggactcctgctctccacgcaacgccgggcagccccgcctcagctcctcaccctcctcgacaactctccctccggccggtcgccccccacgactccccggggcccgtcgtccgcacgggcacgggctgcacggtggtgggagcagaaccagagcagccgaggaggcacatctactccgggctccggacctccctcggcctcaacccctctggagtctggattctgccatttcataccatctccgcttcgccactgccagcgcgctggccctggagcggaggcaagaggggtgactacaaggagcttttcgtcatggcactgcctaaggacggctgcctcgatggtgccaagatcacagaggtaggaggggtcggctacaaggagcttcttgtcatggcgctgcctaaggacgacagcatcgatggcgccaaggtcgcagaggccatcggcgtcaagctgccagacgtcgggggggccataagggtttttgacgcgatgattcgtcacagagtttcagattcttatgttttgtcacaagggcaagtctttttgctgcttaagtgctagtatgcaaactgtgtatgtttgatcatcaagtgatgattttctaccgtttttgcaagtaatgacttgctgtgaaaccgacatttgggctataagatgtggtattttgtggggccctacagaagcacatagttgaatgtacattacttacctcaataacttgtaatttacactataatgtatagatacggcgtcttcaataaatactgaaatgccttttgtttatatgatggaattagataatgtggttgctaattcgttacacacttacgctattaaatgtactttgtaacttgaactatcttactctctaatcttcggtacattgacaaccatacaatgccaaagaacttgcagttgcaggtaggctttgcctagagaagtcgcttcaatttcaatcctcatagatgccttatatatgaatttaaactttgaagtaacgatgaatttttgactgatcgtttgaggccttccttttatccaattcaccacagactattttgaatagcagagaggccagagaatttgccagtggggcactagctggtgctatgtcaaaggctattcttgcacctctagagactatcagatattgtgcttaccgtattttgagcttagtggttgggttgacaggaggcattaatggcaggacaagaatgattgtaggagtaggacctaggcacatttttggtagtttggtggatatcatccaacaaaacgggtggcaagggctttgggcagggaatacaatcaacatgctccgcatcattccaacccaagcagtcgaactcggaacatttgaatgcgtcaagaggagcatggcagaagcacaagagaaatggaaagaggacggatgcccaaagatacagcttggtaatatgaaaatcgagcttccacttcacctcttatctccagttgctattgccggtgctgctgctggaatagctgccacactggcgtgccatcctctcgaagttatcaaggatcgcttgactatcaaccgagaggtttatccaagcattggccttgccttccgcaggatctataagacggatggtataggtggtttctatgctggcctgtgtccaacgctgattggcatgattccttacacaacatgttacttctttatgtatgacacgatcaagacctcttactgccgcttgcataagaagtcgtctctgagccgccctgagcttctacttatcggcgctctttcaggtcttactgcaagcacaatcagcttccctctggaagtagcaaggaagcggttgatggccggcgccctgcaggggaagtgcccgcctaacatgattgccgccttgtcggaggtgatccaggaggagggcgtcatggggctttaccgcgggtggggggcgagctgcctgaaggtgatgccgaattctggcatcacctgggtgttgtacgaggcatggaaggatgttcttctggctgacaggaacaagccacgctctttagcgaactaaacaggccgtccttgagcaatggaggcgttgctgggattcctgatctattttcagttttggaatcccggctgcggcgagtggggtacatagggcgcgtttctctcttttttgattgactgatgagtggtaagcgttttgttgtgtcatcggcacacagacaaacatcattaatgtgtcaaaaaactaagcgaaaagacaaacccttctgtatttcctgagtggaaagatggggaacctaaccctacctggagcctctgcaggaaccttttccttcatctaccaatcagatacagggagcttcaggttgacagatcgcaccaactgaaggacgaacctgttctgcgacaacaagcaggataagctgaggaacctgttttgcaagctaagttgagatgtaatttttgtcttgggctgggtggttatagtgttttctttcggcttttcttttctttctgcctcaagtctgaagcgaagtttataaattatttttcctcggctaatataatttgggtggcaaagcttttgccgcttccttaaaaaaagagtggtaagcattttgttgtgtcatcaattctgaattcttgtgctgttataagaaaaaaggatttg

SEQ ID NO: 67413 - DNA, 2659 bp, Zea Mays
tctatttaacacactttaaatagttaataggtctgtataaacttattaaacaatatatatggatctaaataacacactccaaatagtggtactgatgcactttactctctcaacagcaaccacaaaagaaaagggtgcgtagcccctaacccatatgtgtgtaatattgactcgatactgtgtgcctaccacgatttcggagagaccgagacagcggacttccgtaccgcgcgccgccgccaccgccatctatcctggaagcctgctgctctccacgcaaccacgccggcccccgtcaaccggtcgccatctctcctggactcctgctctccacgcaacgccgggcagccccgcctcagctcctcaccctcctcgacaactctccctccggccggtcgccccccacgactccccggggcccgtcgtccgcacgggcacgggctgcacggtggtgggagcagaaccagagcagccgaggaggcacatctactccgggctccggacctccctcggcctcaacccctctggagtctggattctgccatttcataccatctccgcttcgccactgccagcgcgctggccctggagcggaggcaagaggggtgactacaaggagcttttcgtcatggcactgcctaaggacggctgcctcgatggtgccaagatcacagaggtaggaggggtcggctacaaggagcttcttgtcatggcgctgcctaaggacgacagcatcgatggcgccaaggtcgcagaggccatcggcgtcaagctgccagacgtcgggggggccataaggactattttgaatagcagagaggccagagaatttgccagtggggcactagctggtgctatgtcaaaggctattcttgcacctctagagactatcaggacaagaatgattgtaggagtaggacctaggcacatttttggtagtttggtggatatcatccaacaaaacgggtggcaagggctttgggcagggaatacaatcaacatgctccgcatcattccaacccaagcagtcgaactcggaacatttgaatgcgtcaagaggagcatggcagaagcacaagagaaatggaaagaggacggatgcccaaagatacagcttggtaatatgaaaatcgagcttccacttcacctcttatctccagttgctattgccggtgctgctgctggaatagctgccacactggcgtgccatcctctcgaagttatcaaggatcgcttgactatcaaccgagaggtttatccaagcattggccttgccttccgcaggatctataagacggatggtataggtggtttctatgctggcctgtgtccaacgctgattggcatgattccttacacaacatgttacttctttatgtatgacacgatcaagacctcttactgccgcttgcataagaagtcgtctctgagccgccctgagcttctacttatcggcgctctttcaggtcttactgcaagcacaatcagcttccctctggaagtagcaaggaagcggttgatggccggcgccctgcaggggaagtgcccgcctaacatgattgccgccttgtcggaggtgatccaggaggagggcgtcatggggctttaccgcgggtggggggcgagctgcctgaaggtgatgccgaattctggcatcacctgggtgttgtacgaggcatggaaggatgttcttctggctgacaggaacaagccacgctctttagcgaactaaacaggccgtccttgagcaatggaggcgttgctgggattcctgatctattttcagttttggaatcccggctgcggcgagtggggtacatagggcgcgtttctctcttttttgattgactgatgagtggaaccttttccttcatctaccaatcagatacagggagcttcaggttgacagatcgcaccaactgaaggacgaacctgttctgcgacaacaagcaggataagctgaggaacctgttttgcaagctaagttgagatgtaatttttgtcttgggctgggtggttatagtgttttctttcggcttttcttttctttctgcctcaagtctgaagcgaagtttataaattatttttcctcggctaatataatttgggtggcaaagcttttgccgcttccttaaaaaaagagtggtaagcattttgttgtgtcatcaattctgaattcttgtgctgttataagaaaaaaggatttgggtaaaaagaagagcaacaacgtctcgctgcaagaaaatagctttgatcagattcagttattacaaataatataggcaaagtgaaccgcatgtcaatatgtaaatctagcacattaaggttgtctcagaagcttaaccatcctatctcttatttcaaatttcactctttcaaaaatgcaaaacagtgttttgcacgaccatatgcacgatctgctggagaaagcctaatgctacagatgtcaggtggattgcacataaaaagtgtcgatggcacaagtttggcctcacagcgaagataacttttatacaccccaacactgtcaagggcgtcaacgcccaagacggcaggccctcgactacgtagttcgtagccgcggacattagcggcgtcgaggttgttgcccgactgcccgatgatgaaggaggtaggattgagaggagaagagagatta

SEQ ID NO: 67414 - DNA, 2081 bp, Zea Mays
ttttcgtattgaaagagcacgactcgtcttgtcgctttgtcttggacttctttccgatttccctggtcgccgtgacaccatgccagtcgccatcgttgtcgtctcccctactcgcttacgctaccaccggccgctgtgcgccgctgccacaggctcacccgtgtagtgcagcagcaccacacaccgaacctagaggacgactggccgctgctaaacctggggcccttgttggctgtctcggccggccggccaagagggagccatgctgctcgagcctgcaaggaagaccgcaatacagagcttcgccactgccagcgcgctggccctggagcggaggcaagaggggtgactacaaggagcttttcgtcatggcactgcctaaggacggctgcctcgatggtgccaagatcacagaggtaggaggggtcggctacaaggagcttcttgtcatggcgctgcctaaggacgacagcatcgatggcgccaaggtcgcagaggccatcggcgtcaagctgccagacgtcgggggggccataaggactattttgaatagcagagaggccagagaatttgccagtggggcactagctggtgctatgtcaaaggctattcttgcacctctagagactatcaggacaagaatgattgtaggagtaggacctaggcacatttttggtagtttggtggatatcatccaacaaaacgggtggcaagggctttgggcagggaatacaatcaacatgctccgcatcattccaacccaagcagtcgaactcggaacatttgaatgcgtcaagaggagcatggcagaagcacaagagaaatggaaagaggacggatgcccaaagatacagcttggtaatatgaaaatcgagcttccacttcacctcttatctccagttgctattgccggtgctgctgctggaatagctgccacactggcgtgccatcctctcgaagttatcaaggatcgcttgactatcaaccgagaggtttatccaagcattggccttgccttccgcaggatctataagacggatggtataggtggtttctatgctggcctgtgtccaacgctgattggcatgattccttacacaacatgttacttctttatgtatgacacgatcaagacctcttactgccgcttgcataagaagtcgtctctgagccgccctgagcttctacttatcggcgctctttcaggtcttactgcaagcacaatcagcttccctctggaagtagcaaggaagcggttgatggccggcgccctgcaggggaagtgcccgcctaacatgattgccgccttgtcggaggtgatccaggaggagggcgtcatggggctttaccgcgggtggggggcgagctgcctgaaggtgatgccgaattctggcatcacctgggtgttgtacgaggcatggaaggatgttcttctggctgacaggaacaagccacgctctttagcgaactaaacaggccgtccttgagcaatggaggcgttgctgggattcctgatctattttcagttttggaatcccggctgcggcgagtggggtacatagggcgcgtttctctcttttttgattgactgatgagtggtaagcgttttgttgtgtcatcggcacacagacaaacatcattaatgtgtcaaaaaactaagcgaaaagacaaacccttctgtatttcctgagtggaaagatggggaacctaaccctacctggagcctctgcaggaaccttttccttcatctaccaatcagatacagggagcttcaggttgacagatcgcaccaactgaaggacgaacctgttctgcgacaacaagcaggataagctgaggaacctgttttgcaagctaagttgagatgtaatttttgtcttgggctgggtggttatagtgttttctttcggcttttcttttctttctgcctcaagtctgaagcgaagtttataaattatttttcctcggctaatataatttgggtggcaaagcttttgccgcttccttaaaaaaagagtggtaagcattttgttgtgtcatcaattctgaattcttgtgctgttataagaaaaaaggatttg

SEQ ID NO: 67415 - DNA, 2694 bp, Zea Mays
gcttacgctaccaccggccgctgtgcgccgctgccacaggctcacccgtgtagtgcagcagcaccacacaccgaacctagaggacgactggccgctgctaaacctggggcccttgttggctgtctcggccggccggccaagagggagccatgctgctcgagcctgcaaggaagaccgcaatacagagcttcgccactgccagcgcgctggccctggagcggaggcaagaggggtgactacaaggagcttttcgtcatggcactgcctaaggacggctgcctcgatggtgccaagatcacagaggtaggaggggtcggctacaaggagcttcttgtcatggcgctgcctaaggacgacagcatcgatggcgccaaggtcgcagaggccatcggcgtcaagctgccagacgtcgggggggccataagggtaaggaaatctccacctgattttatgtcgtttccatgtttgtggagcaatgaaagggacacgactttcggttttggccagttacttttttttctgaactaattgaaactggcgtactgtgttttcccaattggttgtggtttaatttcaggtttttgacgcgatgattcgtcacagagtttcagattcttatgttttgtcacaagggcaagtctttttgctgcttaagtgctagtatgcaaactgtgtatgtttgatcatcaagtgatgattttctaccgtttttgcaagtaatgacttgctgtgaaaccgacatttgggctataagatgtggtattttgtggggccctacagaagcacatagttgaatgtacattacttacctcaataacttgtaatttacactataatgtatagatacggcgtcttcaataaatactgaaatgccttttgtttatatgatggaattagataatgtggttgctaattcgttacacacttacgctattaaatgtactttgtaacttgaactatcttactctctaatcttcggtacattgacaaccatacaatgccaaagaacttgcagttgcaggtaggctttgcctagagaagtcgcttcaatttcaatcctcatagatgccttatatatgaatttaaactttgaagtaacgatgaatttttgactgatcgtttgaggccttccttttatccaattcaccacagactattttgaatagcagagaggccagagaatttgccagtggggcactagctggtgctatgtcaaaggctattcttgcacctctagagactatcaggacaagaatgattgtaggagtaggacctaggcacatttttggtagtttggtggatatcatccaacaaaacgggtggcaagggctttgggcagggaatacaatcaacatgctccgcatcattccaacccaagcagtcgaactcggaacatttgaatgcgtcaagaggagcatggcagaagcacaagagaaatggaaagaggacggatgcccaaagatacagcttggtaatatgaaaatcgagcttccacttcacctcttatctccagttgctattgccggtgctgctgctggaatagctgccacactggcgtgccatcctctcgaagttatcaaggatcgcttgactatcaaccgagaggtttatccaagcattggccttgccttccgcaggatctataagacggatggtataggtggtttctatgctggcctgtgtccaacgctgattggcatgattccttacacaacatgttacttctttatgtatgacacgatcaagacctcttactgccgcttgcataagaagtcgtctctgagccgccctgagcttctacttatcggcgctctttcaggtcttactgcaagcacaatcagcttccctctggaagtagcaaggaagcggttgatggccggcgccctgcaggggaagtgcccgcctaacatgattgccgccttgtcggaggtgatccaggaggagggcgtcatggggctttaccgcgggtggggggcgagctgcctgaaggtgatgccgaattctggcatcacctgggtgttgtacgaggcatggaaggatgttcttctggctgacaggaacaagccacgctctttagcgaactaaacaggccgtccttgagcaatggaggcgttgctgggattcctgatctattttcagttttggaatcccggctgcggcgagtggggtacatagggcgcgtttctctcttttttgattgactgatgagtggtaagcgttttgttgtgtcatcggcacacagacaaacatcattaatgtgtcaaaaaactaagcgaaaagacaaacccttctgtatttcctgagtggaaagatggggaacctaaccctacctggagcctctgcaggaaccttttccttcatctaccaatcagatacagggagcttcaggttgacagatcgcaccaactgaaggacgaacctgttctgcgacaacaagcaggataagctgaggaacctgttttgcaagctaagttgagatgtaatttttgtcttgggctgggtggttatagtgttttctttcggcttttcttttctttctgcctcaagtctgaagcgaagtttataaattatttttcctcggctaatataatttgggtggcaaagcttttgccgcttccttaaaaaaagagtggtaagcattttgttgtgtcatcaattctgaattcttgtgctgttataagaaaaaaggatttg

SEQ ID NO: 67416 - DNA, 2032 bp, Zea Mays
cacacaccgaacctagaggacgactggccgctgctaaacctggggcccttgttggctgtctcggccggccggccaagagggagccatgctgctcgagcctgcaaggaagaccgcaatacagagggctttggctgatacggagccacaccaaacatgtctttaatagtcgcgccctgtctatttggctctagcttcgccactgccagcgcgctggccctggagcggaggcaagaggggtgactacaaggagcttttcgtcatggcactgcctaaggacggctgcctcgatggtgccaagatcacagaggtaggaggggtcggctacaaggagcttcttgtcatggcgctgcctaaggacgacagcatcgatggcgccaaggtcgcagaggccatcggcgtcaagctgccagacgtcgggggggccataaggactattttgaatagcagagaggccagagaatttgccagtggggcactagctggtgctatgtcaaaggctattcttgcacctctagagactatcagatattgtgcttaccgtattttgagcttagtggttgggttgacaggaggcattaatggcaggacaagaatgattgtaggagtaggacctaggcacatttttggtagtttggtggatatcatccaacaaaacgggtggcaagggctttgggcagggaatacaatcaacatgctccgcatcattccaacccaagcagtcgaactcggaacatttgaatgcgtcaagaggagcatggcagaagcacaagagaaatggaaagaggacggatgcccaaagatacagcttggtaatatgaaaatcgagcttccacttcacctcttatctccagttgctattgccggtgctgctgctggaatagctgccacactggcgtgccatcctctcgaagttatcaaggatcgcttgactatcaaccgagaggtttatccaagcattggccttgccttccgcaggatctataagacggatggtataggtggtttctatgctggcctgtgtccaacgctgattggcatgattccttacacaacatgttacttctttatgtatgacacgatcaagacctcttactgccgcttgcataagaagtcgtctctgagccgccctgagcttctacttatcggcgctctttcaggtcttactgcaagcacaatcagcttccctctggaagtagcaaggaagcggttgatggccggcgccctgcaggggaagtgcccgcctaacatgattgccgccttgtcggaggtgatccaggaggagggcgtcatggggctttaccgcgggtggggggcgagctgcctgaaggtgatgccgaattctggcatcacctgggtgttgtacgaggcatggaaggatgttcttctggctgacaggaacaagccacgctctttagcgaactaaacaggccgtccttgagcaatggaggcgttgctgggattcctgatctattttcagttttggaatcccggctgcggcgagtggggtacatagggcgcgtttctctcttttttgattgactgatgagtggtaagcgttttgttgtgtcatcggcacacagacaaacatcattaatgtgtcaaaaaactaagcgaaaagacaaacccttctgtatttcctgagtggaaagatggggaacctaaccctacctggagcctctgcaggaaccttttccttcatctaccaatcagatacagggagcttcaggttgacagatcgcaccaactgaaggacgaacctgttctgcgacaacaagcaggataagctgaggaacctgttttgcaagctaagttgagatgtaatttttgtcttgggctgggtggttatagtgttttctttcggcttttcttttctttctgcctcaagtctgaagcgaagtttataaattatttttcctcggctaatataatttgggtggcaaagcttttgccgcttccttaaaaaaagagtggtaagcattttgttgtgtcatcaattctgaattcttgtgctgttataagaaaaaaggatttg

SEQ ID NO: 67417 - DNA, 1819 bp, Zea Mays
ggcaaactgcaggtggtcagttgaggcttgatttcctatccccggctttctggattagtccatctggttttatatctgggactgtgcaagtgtgctacactgatacttgcatcttcgccactgccagcgcgctggccctggagcggaggcaagaggggtgactacaaggagcttttcgtcatggcactgcctaaggacggctgcctcgatggtgccaagatcacagaggtaggaggggtcggctacaaggagcttcttgtcatggcgctgcctaaggacgacagcatcgatggcgccaaggtcgcagaggccatcggcgtcaagctgccagacgtcgggggggccataaggactattttgaatagcagagaggccagagaatttgccagtggggcactagctggtgctatgtcaaaggctattcttgcacctctagagactatcagatattgtgcttaccgtattttgagcttagtggttgggttgacaggaggcattaatggcaggacaagaatgattgtaggagtaggacctaggcacatttttggtagtttggtggatatcatccaacaaaacgggtggcaagggctttgggcagggaatacaatcaacatgctccgcatcattccaacccaagcagtcgaactcggaacatttgaatgcgtcaagaggagcatggcagaagcacaagagaaatggaaagaggacggatgcccaaagatacagcttggtaatatgaaaatcgagcttccacttcacctcttatctccagttgctattgccggtgctgctgctggaatagctgccacactggcgtgccatcctctcgaagttatcaaggatcgcttgactatcaaccgagaggtttatccaagcattggccttgccttccgcaggatctataagacggatggtataggtggtttctatgctggcctgtgtccaacgctgattggcatgattccttacacaacatgttacttctttatgtatgacacgatcaagacctcttactgccgcttgcataagaagtcgtctctgagccgccctgagcttctacttatcggcgctctttcaggtcttactgcaagcacaatcagcttccctctggaagtagcaaggaagcggttgatggccggcgccctgcaggggaagtgcccgcctaacatgattgccgccttgtcggaggtgatccaggaggagggcgtcatggggctttaccgcgggtggggggcgagctgcctgaaggtgatgccgaattctggcatcacctgggtgttgtacgaggcatggaaggatgttcttctggctgacaggaacaagccacgctctttagcgaactaaacaggccgtccttgagcaatggaggcgttgctgggattcctgatctattttcagttttggaatcccggctgcggcgagtggggtacatagggcgcgtttctctcttttttgattgactgatgagtggaaccttttccttcatctaccaatcagatacagggagcttcaggttgacagatcgcaccaactgaaggacgaacctgttctgcgacaacaagcaggataagctgaggaacctgttttgcaagctaagttgagatgtaatttttgtcttgggctgggtggttatagtgttttctttcggcttttcttttctttctgcctcaagtctgaagcgaagtttataaattatttttcctcggctaatataatttgggtggcaaagcttttgccgcttccttaaaaaaagagtggtaagcattttgttgtgtcatcaattctgaattcttgtgctgttataagaaaaaaggatttg

SEQ ID NO: 67418 - DNA, 1866 bp, Zea Mays
ttgatttcctatccccggctttctggattagtccatctggttttatatctgggactgtgcaagtgtgctacactgatacttgcatcttcgccactgccagcgcgctggccctggagcggaggcaagaggggtgactacaaggagcttttcgtcatggcactgcctaaggacggctgcctcgatggtgccaagatcacagaggtaggaggggtcggctacaaggagcttcttgtcatggcgctgcctaaggacgacagcatcgatggcgccaaggtcgcagaggccatcggcgtcaagctgccagacgtcgggggggccataaggactattttgaatagcagagaggccagagaatttgccagtggggcactagctggtgctatgtcaaaggctattcttgcacctctagagactatcaggacaagaatgattgtaggagtaggacctaggcacatttttggtagtttggtggatatcatccaacaaaacgggtggcaagggctttgggcagggaatacaatcaacatgctccgcatcattccaacccaagcagtcgaactcggaacatttgaatgcgtcaagaggagcatggcagaagcacaagagaaatggaaagaggacggatgcccaaagatacagcttggtaatatgaaaatcgagcttccacttcacctcttatctccagttgctattgccggtgctgctgctggaatagctgccacactggcgtgccatcctctcgaagttatcaaggatcgcttgactatcaaccgagaggtttatccaagcattggccttgccttccgcaggatctataagacggatggtataggtggtttctatgctggcctgtgtccaacgctgattggcatgattccttacacaacatgttacttctttatgtatgacacgatcaagacctcttactgccgcttgcataagaagtcgtctctgagccgccctgagcttctacttatcggcgctctttcaggtcttactgcaagcacaatcagcttccctctggaagtagcaaggaagcggttgatggccggcgccctgcaggggaagtgcccgcctaacatgattgccgccttgtcggaggtgatccaggaggagggcgtcatggggctttaccgcgggtggggggcgagctgcctgaaggtgatgccgaattctggcatcacctgggtgttgtacgaggcatggaaggatgttcttctggctgacaggaacaagccacgctctttagcgaactaaacaggccgtccttgagcaatggaggcgttgctgggattcctgatctattttcagttttggaatcccggctgcggcgagtggggtacatagggcgcgtttctctcttttttgattgactgatgagtggtaagcgttttgttgtgtcatcggcacacagacaaacatcattaatgtgtcaaaaaactaagcgaaaagacaaacccttctgtatttcctgagtggaaagatggggaacctaaccctacctggagcctctgcaggaaccttttccttcatctaccaatcagatacagggagcttcaggttgacagatcgcaccaactgaaggacgaacctgttctgcgacaacaagcaggataagctgaggaacctgttttgcaagctaagttgagatgtaatttttgtcttgggctgggtggttatagtgttttctttcggcttttcttttctttctgcctcaagtctgaagcgaagtttataaattatttttcctcggctaatataatttgggtggcaaagcttttgccgcttccttaaaaaaagagtggtaagcattttgttgtgtcatcaattctgaattcttgtgctgttataagaaaaaaggatttg

SEQ ID NO: 67419 - DNA, 1769 bp, Zea Mays
ctatccccggctttctggattagtccatctggttttatatctgggactgtgcaagtgtgctacactgatacttgcatcttcgccactgccagcgcgctggccctggagcggaggcaagaggggtgactacaaggagcttttcgtcatggcactgcctaaggacggctgcctcgatggtgccaagatcacagaggtaggaggggtcggctacaaggagcttcttgtcatggcgctgcctaaggacgacagcatcgatggcgccaaggtcgcagaggccatcggcgtcaagctgccagacgtcgggggggccataaggactattttgaatagcagagaggccagagaatttgccagtggggcactagctggtgctatgtcaaaggctattcttgcacctctagagactatcaggacaagaatgattgtaggagtaggacctaggcacatttttggtagtttggtggatatcatccaacaaaacgggtggcaagggctttgggcagggaatacaatcaacatgctccgcatcattccaacccaagcagtcgaactcggaacatttgaatgcgtcaagaggagcatggcagaagcacaagagaaatggaaagaggacggatgcccaaagatacagcttggtaatatgaaaatcgagcttccacttcacctcttatctccagttgctattgccggtgctgctgctggaatagctgccacactggcgtgccatcctctcgaagttatcaaggatcgcttgactatcaaccgagaggtttatccaagcattggccttgccttccgcaggatctataagacggatggtataggtggtttctatgctggcctgtgtccaacgctgattggcatgattccttacacaacatgttacttctttatgtcttactgcaagcacaatcagcttccctctggaagtagcaaggaagcggttgatggccggcgccctgcaggggaagtgcccgcctaacatgattgccgccttgtcggaggtgatccaggaggagggcgtcatggggctttaccgcgggtggggggcgagctgcctgaaggtgatgccgaattctggcatcacctgggtgttgtacgaggcatggaaggatgttcttctggctgacaggaacaagccacgctctttagcgaactaaacaggccgtccttgagcaatggaggcgttgctgggattcctgatctattttcagttttggaatcccggctgcggcgagtggggtacatagggcgcgtttctctcttttttgattgactgatgagtggtaagcgttttgttgtgtcatcggcacacagacaaacatcattaatgtgtcaaaaaactaagcgaaaagacaaacccttctgtatttcctgagtggaaagatggggaacctaaccctacctggagcctctgcaggaaccttttccttcatctaccaatcagatacagggagcttcaggttgacagatcgcaccaactgaaggacgaacctgttctgcgacaacaagcaggataagctgaggaacctgttttgcaagctaagttgagatgtaatttttgtcttgggctgggtggttatagtgttttctttcggcttttcttttctttctgcctcaagtctgaagcgaagtttataaattatttttcctcggctaatataatttgggtggcaaagcttttgccgcttccttaaaaaaagagtggtaagcattttgttgtgtcatcaattctgaattcttgtgctgttataagaaaaaaggatttg

SEQ ID NO: 67420 - DNA, 1769 bp, Zea Mays
gtcagcttcgccactgccagcgcgctggccctggagcggaggcaagaggggtgactacaaggagcttttcgtcatggcactgcctaaggacggctgcctcgatggtgccaagatcacagaggtaggaggggtcggctacaaggagcttcttgtcatggcgctgcctaaggacgacagcatcgatggcgccaaggtcgcagaggccatcggcgtcaagctgccagacgtcgggggggccataaggagaggccagagaatttgccagtggggcactagctggtgctatgtcaaaggctattcttgcacctctagagactatcaggacaagaatgattgtaggagtaggacctaggcacatttttggtagtttggtggatatcatccaacaaaacgggtggcaagggctttgggcagggaatacaatcaacatgctccgcatcattccaacccaagcagtcgaactcggaacatttgaatgcgtcaagaggagcatggcagaagcacaagagaaatggaaagaggacggatgcccaaagatacagcttggtaatatgaaaatcgagcttccacttcacctcttatctccagttgctattgccggtgctgctgctggaatagctgccacactggcgtgccatcctctcgaagttatcaaggatcgcttgactatcaaccgagaggtttatccaagcattggccttgccttccgcaggatctataagacggatggtataggtggtttctatgctggcctgtgtccaacgctgattggcatgattccttacacaacatgttacttctttatgtatgacacgatcaagacctcttactgccgcttgcataagaagtcgtctctgagccgccctgagcttctacttatcggcgctctttcaggtcttactgcaagcacaatcagcttccctctggaagtagcaaggaagcggttgatggccggcgccctgcaggggaagtgcccgcctaacatgattgccgccttgtcggaggtgatccaggaggagggcgtcatggggctttaccgcgggtggggggcgagctgcctgaaggtgatgccgaattctggcatcacctgggtgttgtacgaggcatggaaggatgttcttctggctgacaggaacaagccacgctctttagcgaactaaacaggccgtccttgagcaatggaggcgttgctgggattcctgatctattttcagttttggaatcccggctgcggcgagtggggtacatagggcgcgtttctctcttttttgattgactgatgagtggtaagcgttttgttgtgtcatcggcacacagacaaacatcattaatgtgtcaaaaaactaagcgaaaagacaaacccttctgtatttcctgagtggaaagatggggaacctaaccctacctggagcctctgcaggaaccttttccttcatctaccaatcagatacagggagcttcaggttgacagatcgcaccaactgaaggacgaacctgttctgcgacaacaagcaggataagctgaggaacctgttttgcaagctaagttgagatgtaatttttgtcttgggctgggtggttatagtgttttctttcggcttttcttttctttctgcctcaagtctgaagcgaagtttataaattatttttcctcggctaatataatttgggtggcaaagcttttgccgcttccttaaaaaaagagtggtaagcattttgttgtgtcatcaattctgaattcttgtgctgttataagaaaaaaggatttg

SEQ ID NO: 67421 - DNA, 1818 bp, Zea Mays
gtagaatccaaatatcagagacaagagagataaatttcttcgccactgccagcgcgctggccctggagcggaggcaagaggggtgactacaaggagcttttcgtcatggcactgcctaaggacggctgcctcgatggtgccaagatcacagaggtaggaggggtcggctacaaggagcttcttgtcatggcgctgcctaaggacgacagcatcgatggcgccaaggtcgcagaggccatcggcgtcaagctgccagacgtcgggggggccataaggactattttgaatagcagagaggccagagaatttgccagtggggcactagctggtgctatgtcaaaggctattcttgcacctctagagactatcaggacaagaatgattgtaggagtaggacctaggcacatttttggtagtttggtggatatcatccaacaaaacgggtggcaagggctttgggcagggaatacaatcaacatgctccgcatcattccaacccaagcagtcgaactcggaacatttgaatgcgtcaagaggagcatggcagaagcacaagagaaatggaaagaggacggatgcccaaagatacagcttggtaatatgaaaatcgagcttccacttcacctcttatctccagttgctattgccggtgctgctgctggaatagctgccacactggcgtgccatcctctcgaagttatcaaggatcgcttgactatcaaccgagaggtttatccaagcattggccttgccttccgcaggatctataagacggatggtataggtggtttctatgctggcctgtgtccaacgctgattggcatgattccttacacaacatgttacttctttatgtatgacacgatcaagacctcttactgccgcttgcataagaagtcgtctctgagccgccctgagcttctacttatcggcgctctttcaggtcttactgcaagcacaatcagcttccctctggaagtagcaaggaagcggttgatggccggcgccctgcaggggaagtgcccgcctaacatgattgccgccttgtcggaggtgatccaggaggagggcgtcatggggctttaccgcgggtggggggcgagctgcctgaaggtgatgccgaattctggcatcacctgggtgttgtacgaggcatggaaggatgttcttctggctgacaggaacaagccacgctctttagcgaactaaacaggccgtccttgagcaatggaggcgttgctgggattcctgatctattttcagttttggaatcccggctgcggcgagtggggtacatagggcgcgtttctctcttttttgattgactgatgagtggtaagcgttttgttgtgtcatcggcacacagacaaacatcattaatgtgtcaaaaaactaagcgaaaagacaaacccttctgtatttcctgagtggaaagatggggaacctaaccctacctggagcctctgcaggaaccttttccttcatctaccaatcagatacagggagcttcaggttgacagatcgcaccaactgaaggacgaacctgttctgcgacaacaagcaggataagctgaggaacctgttttgcaagctaagttgagatgtaatttttgtcttgggctgggtggttatagtgttttctttcggcttttcttttctttctgcctcaagtctgaagcgaagtttataaattatttttcctcggctaatataatttgggtggcaaagcttttgccgcttccttaaaaaaagagtggtaagcattttgttgtgtcatcaattctgaattcttgtgctgttataagaaaaaaggatttg

SEQ ID NO: 67422 - DNA, 2053 bp, Zea Mays
cgacaatagcaccaattcaagcaaccccccgtctcgtcctccttcctctcaagagtcgagacccaggcagccaggcttccagttccagccccacctcgcctctaccctcctcaaaccctacaccacgccccccggcccccagcccccggccttcgcccaacccgatagcgtagcgccggcgcagaaccggaccctgccgtgcggttgtccaccccgctcggcgccgcccgccgccgccgccgcctttgatgtctcctacctgcgacctcggcttcctctgcccccggtcgcagaagagctcccaagaggtcccccgagccaccgcttccggcgcccagcgattggcttccccaccgcagccgagatgagcagcggcggcgagaagatgttgttgtttgggtcctttacggaggacgagactaagttgttacagggtcagcccctcaaaagtccaactaaaagtgtcagcaaagaatgtgaacggacggagatccagtttggcaccctgaacttgtcagtgctgaatttagagaaaatatctacttcaagtgttgttcttcctgcaaaatcagcaaaaggggaaaccagtgccatcacgaaggagaatgcatgcaataatgaaaagaaagctgcagggtcaagcctttcaaacggtggaccagttctggctaatggatgccctcctgttaatgttcctgctaacaatggtttatttgagaatgtgaagacagaggctgttgtcccaccagttatacctgtcaaaatcatcagcaatccaacaccgcaaatgacgttggagacgcataaggatggcaccaaacccactgaaagcagaaagttaaataaggaaagggaaattactgaaaatggtagtccaattgtcgataaacacattgttgctgctccagcagaagaggcagtcacaagcctaaataagaaagcctctcagaacatgcccttgcttccacatggtttgaggaacacaggaaatatttgctttctgaatgcaactttgcaggcattgctttcatgctcgccttttgtctaccttttacaggatttgaggaaccgcaggatacctaaggttggctacccaactctgagtgcatttgttgagttgatatctcaattggatgtgcctgatgagtcagttatcaagaaaaatgagaaggttattactgttgccgcaaaaccacttaatcctgccatgtttgatgctgttctcagaaactttacaccagatgtgccggctggaataactgctcggcctaggcaggaagatgctcaagagtttttaagttttgccatggatagaatgcatgatgaactgctgaaacttaatggagatggtttgaattcaaaggaggggatggttgtttcatccgctgatgatgatgcttgggagacagttggacgaaagaacaaatctgcaatagttagaactcagagttttgtcccctctgagcttagtgctatttttggagggcagctacagagcgttgtgaaagctgcagcccaatatcagggttaatagttcatgttggaagagcattctacatgttggcgattaatgaagtgtctgttctgtgttagtcctttgatataacatggaagaatctaggatttttttggtgttccgtaaggtaattctgcgctctaccattgaagctctacaataatgcaccaatgcatctcagcactagcctggctgccctgctaagttaaaacagccccattcagatgttttcgttttctccaatggaataatgatatcatgattgcattagttattcaccataggtatagtgtgaaacttatgcttgagtaggcccacttgtgctttcctatctgtcttttcagtggtgtatactgataaatacacctgtcaggtaacaaagcatcagctactgttcagcccttcctactgctccatcttgatatattcccagatgctgttcagacgcttaatgatgcacttcgtctgttctctactcctgaatctttggaaggatacagaacagctgcgggaaaggtatctaccttgtcacctttg

SEQ ID NO: 67423 - DNA, 1669 bp, Zea Mays
cgacaatagcaccaattcaagcaaccccccgtctcgtcctccttcctctcaagagtcgagacccaggcagccaggcttccagttccagccccacctcgcctctaccctcctcaaaccctacaccacgccccccggcccccagcccccggccttcgcccaacccgatagcgtagcgccggcgcagaaccggaccctgccgtgcggttgtccaccccgctcggcgccgcccgccgccgccgccgcctttgatgtctcctacctgcgacctcggcttcctctgcccccggtcgcagaagagctcccaagaggtcccccgagccaccgcttccggcgcccagcgattggcttccccaccgcagccgagatgagcagcggcggcgagaagatgttgttgtttgggtcctttacggaggacgagactaagttgttacagggtcagcccctcaaaagtccaactaaaagtgtcagcaaagaatgtgaacggacggagatccagtttggcaccctgaacttgtcagtgctgaatttagagaaaatatctacttcaagtgttgttcttcctgcaaaatcagcaaaaggggaaaccagtgccatcacgaaggagaatgcatgcaataatgaaaagaaagctgcagggtcaagcctttcaaacggtggaccagttctggctaatggatgccctcctgttaatgttcctgctaacaatggtttatttgagaatgtgaagacagaggctgttgtcccaccagttatacctgtcaaaatcatcagcaatccaacaccgcaaatgacgttggagacgcataaggatggcaccaaacccactgaaagcagaaagttaaataaggaaagggaaattactgaaaatggtagtccaattgtcgataaacacattgttgctgctccagcagaagaggcagtcacaagcctaaataagaaagcctctcagaacatgcccttgcttccacatggtttgaggaacacaggaaatatttgctttctgaatgcaactttgcaggcattgctttcatgctcgccttttgtctaccttttacaggatttgaggaaccgcaggatacctaaggttggctacccaactctgagtgcatttgttgagttgatatctcaattggatgtgcctgatgagtcagttatcaagaaaaatgagaaggttattactgttgccgcaaaaccacttaatcctgccatgtttgatgctgttctcagaaactttacaccagatgtgccggctggaataactgctcggcctaggcaggaagatgctcaagagtttttaagttttgccatggatagaatgcatgatgaactgctgaaacttaatggagatggtttgaattcaaaggaggggatggttgtttcatccgctgatgatgatgcttgggagacagttggacgaaagaacaaatctgcaatagttagaactcagagttttgtcccctctgagcttagtgctatttttggagggcagctacagagcgttgtgaaagctgcagcatcagctactgttcagcccttcctactgctccatcttgatatattcccagatgctgttcagacgcttaatgatgcacttcgtctgttctctactcctgaatctttggaaggatacagaacagctgcgggaaaggtatctaccttgtcacctttg

SEQ ID NO: 67424 - DNA, 2292 bp, Zea Mays
cgacaatagcaccaattcaagcaaccccccgtctcgtcctccttcctctcaagagtcgagacccaggcagccaggcttccagttccagccccacctcgcctctaccctcctcaaaccctacaccacgccccccggcccccagcccccggccttcgcccaacccgatagcgtagcgccggcgcagaaccggaccctgccgtgcggttgtccaccccgctcggcgccgcccgccgccgccgccgcctttgatgtctcctacctgcgacctcggcttcctctgcccccggtcgcagaagagctcccaagaggtcccccgagccaccgcttccggcgcccagcgattggcttccccaccgcagccgagatgagcagcggcggcgagaagatgttgttgtttgggtcctttacggaggacgagactaagttgttacagggtcagcccctcaaaagtccaactaaaagtgtcagcaaagaatgtgaacggacggagatccagtttggcaccctgaacttgtcagtgctgaatttagagaaaatatctacttcaagtgttgttcttcctgcaaaatcagcaaaaggggaaaccagtgccatcacgaaggagaatgcatgcaataatgaaaagaaagctgcagggtcaagcctttcaaacggtggaccagttctggctaatggatgccctcctgttaatgttcctgctaacaatggtttatttgagaatgtgaagacagaggctgttgtcccaccagttatacctgtcaaaatcatcagcaatccaacaccgcaaatgacgttggagacgcataaggatggcaccaaacccactgaaagcagaaagttaaataaggaaagggaaattactgaaaatggtagtccaattgtcgataaacacattgttgctgctccagcagaagaggcagtcacaagcctaaataagaaagcctctcagaacatgcccttgcttccacatggtttgaggaacacaggaaatatttgctttctgaatgcaactttgcaggcattgctttcatgctcgccttttgtctaccttttacaggatttgaggaaccgcaggatacctaaggttggctacccaactctgagtgcatttgttgagttgatatctcaattggatgtgcctgatgagtcagttatcaagaaaaatgagaaggttattactgttgccgcaaaaccacttaatcctgccatgtttgatgctgttctcagaaactttacaccagatgtgccggctggaataactgctcggcctaggcaggaagatgctcaagagtttttaagttttgccatggatagaatgcatgatgaactgctgaaacttaatggagatggtttgaattcaaaggaggggatggttgtttcatccgctgatgatgatgcttgggagacagttggacgaaagaacaaatctgcaatagttagaactcagagttttgtcccctctgagcttagtgctatttttggagggcagctacagagcgttgtgaaagctgcaggtaattttgtcttgtcctgagggagacaactcaatttttctgtaagctggtatctacctagcattctagctagtatatctctttgaaagaacttggaaacttttgtttttttgagtttttcttgatttgttacgtctgcatcatgtttccatgaacgtattccctgttgatccagttgctgtcaccttttgcttcctgctgtacatgctgtcattgcttttttttccatctttgaccagcccaatatcagggttaatagttcatgttggaagagcattctacatgttggcgattaatgaagtgtctgttctgtgttagtcctttgatataacatggaagaatctaggatttttttggtgttccgtaaggtaattctgcgctctaccattgaagctctacaataatgcaccaatgcatctcagcactagcctggctgccctgctaagttaaaacagccccattcagatgttttcgttttctccaatggaataatgatatcatgattgcattagttattcaccataggtatagtgtgaaacttatgcttgagtaggcccacttgtgctttcctatctgtcttttcagtggtgtatactgataaatacacctgtcaggtaacaaagcatcagctactgttcagcccttcctactgctccatcttgatatattcccagatgctgttcagacgcttaatgatgcacttcgtctgttctctactcctgaatctttggaaggatacagaacagctgcgggaaaggtatctaccttgtcacctttg

SEQ ID NO: 67425 - DNA, 1678 bp, Zea Mays
cgacaatagcaccaattcaagcaaccccccgtctcgtcctccttcctctcaagagtcgagacccaggcagccaggcttccagttccagccccacctcgcctctaccctcctcaaaccctacaccacgccccccggcccccagcccccggccttcgcccaacccgatagcgtagcgccggcgcagaaccggaccctgccgtgcggttgtccaccccgctcggcgccgcccgccgccgccgccgcctttgatgtctcctacctgcgacctcggcttcctctgcccccggtcgcagaagagctcccaagaggtcccccgagccaccgcttccggcgcccagcgattggcttccccaccgcagccgagatgagcagcggcggcgagaagatgttgttgtttgggtcctttacggaggacgagactaagttgttacagggtcagcccctcaaaagtccaactaaaagtgtcagcaaagaatgtgaacggacggagatccagtttggcaccctgaacttgtcagtgctgaatttagagaaaatatctacttcaagtgttgttcttcctgcaaaatcagcaaaaggggaaaccagtgccatcacgaaggagaatgcatgcaataatgaaaagaaagctgcagggtcaagcctttcaaacggtggaccagttctggctaatggatgccctcctgttaatgttcctgctaacaatggtttatttgagaatgtgaagacagaggctgttgtcccaccagttatacctgtcaaaatcatcagcaatccaacaccgcaaatgacgttggagacgcataaggatggcaccaaacccactgaaagcagaaagttaaataaggaaagggaaattactgaaaatggtagtccaattgtcgataaacacattgttgctgctccagcagaagaggcagtcacaagcctaaataagaaagcctctcagaacatgcccttgcttccacatggtttgaggaacacaggaaatatttgctttctgaatgcaactttgcaggcattgctttcatgctcgccttttgtctaccttttacaggatttgaggaaccgcaggatacctaaggttggctacccaactctgagtgcatttgttgagttgatatctcaattggatgtgcctgatgagtcagttatcaagaaaaatgagaaggttattactgttgccgcaaaaccacttaatcctgccatgtttgatgctgttctcagaaactttacaccagatgtgccggctggaataactgctcggcctaggcaggaagatgctcaagagtttttaagttttgccatggatagaatgcatgatgaactgctgaaacttaatggagatggtttgaattcaaaggaggggatggttgtttcatccgctgatgatgatgcttgggagacagttggacgaaagaacaaatctgcaatagttagaactcagagttttgtcccctctgagcttagtgctatttttggagggcagctacagagcgttgtgaaagctgcaggtaacaaagcatcagctactgttcagcccttcctactgctccatcttgatatattcccagatgctgttcagacgcttaatgatgcacttcgtctgttctctactcctgaatctttggaaggatacagaacagctgcgggaaaggtatctaccttgtcacctttg

SEQ ID NO: 67426 - DNA, 6543 bp, Zea Mays
cttagatgagaaacatgactgctatggactaaagatacttacagtctgcaaggaagtccgagattcctagaacaaatccaatgtatgatgtggctatagcgagaaatgagaacgcctcaacaataggccccactatcccattactcgatctaagtagttccaaggggtcagaaacagtgctgctccctgcaaggtctggaagtgtccccaagattactccatcccatactaggaacagagccaggggtatggcagtacccgccacaatagctgttcgtacttttgacaggtctccctccaaatttgtacagagaacaggaaccacattctggtatacaaatgaaagagcaattattggtatactttgtggagcagcagcaaaattcgcttcaagaagagaactccactgtaggtttccacttgccactacctgtgtaaaccacatatggaaagttgctatctgtgccaaaggagttttcaagttgtctgatgatcaatttgtaacaagggcatactttatgtccaaatagacgcatataaaaaggatgataatcacatcattataaaaaatgatcatgtttcttgtcaaaagaacctatctgcatataagtattgagcttatgcaatgttttactcaggtcgttctttgtacctgtgtatacttgatttacgatgtttccctccctcctgatataaattataatattatattttgaaaaatgccttgtgttgttttattactttgtcatttaactgccgtgcatgttcttcccatgagagatttttaaaaatatttataacaagtttcttgaatgtaaaatccaccaggcaactttggtgcatatctgatagcattagcacttacaacaagagaagtgaaggatgctaggatgccgactaccagaactccatttactgcaccaatcaatcgctggctgcggtcatcaataattcaatacaacttgttttagttcatatatattataattgtcttggggaagtagtaattaataatcaattataacataatcaagtaaaaatttaactaattccacactatggataggatccaaaatcctaccacgactgtgttggttgtatccttgtttcttgtgggtttcatctctagcctatcccaacttacttgggacaaaaggttatattattgttgtatttatcctctcctaacaagaatcattcatgattctatttttatggaagcaatataaaatacctaaggaatgaaaattcttggcatttcacccttaaatgttggcgtggcctagccactagcacaactctaacgcctatagatgacaccaatcataacatcttcccacctattcgaacagcttatcctacaactgaacatcagggtagaggtctttgaagtgataaagtggctcccaagtggtgtcgtcaccgagcacgccacaccattgaatgaggacatgctaggtgccccaacgtagttgggcacattacgcataacacattctagcacaggatatcaaccgtcctgtacgggcatcaaggcggtggagtcgttgaagagtccccgggaatggctatagtagccccacatggaacacatcatggagacgagcaccctctagaagctgaatgcgacaagccacctacccgacatgctctagcacctagaaggggttggcacaacatggcccgagcttgcccttgtaccaggactccagcgagtgcatcggtcggtggagacagagccacacccaatcacccaccgcgaacacgtgctcatgatggcgattgtcgtagtagcgcttggcataccgcttggcctgaagaagacgctcacgaaccaccacgaggaagacattgcaatcgcataggaggtgttcgccgcctccatctgatctacccctgcgacgtgtggaagtagaggtggcggggtcagttgtatacaccacctagaatggtgtggtgtgcatcgccatgtgaaacaaaatattatagcaatactccgtacaaggaagttagtcaactcaggcacacagacaatccctcgtggcgcaacagaggtacatgacgattgttgatgacctccgactgaccgtctgtttgagggtggaacaccatgctcaagcaaagcttgataccgaccatcttaaagaggttgtgccacatgtgactagtgaagaccggaccaaagtcgtcggaggtggggaatccgtgtagatgaacaacgccctcgaagaaggcacgagcgaccgaggcagccacgtacgagtgcctgagggcaatgaagtgtgcgtacttagagaagcagtcaatgacggtgagaatgatgaacatcccatggacttctgggaggcccttgatgtagtccatcgagatattttcccacacctgagaaggcaagtcgagggctgaaggagaccgaccgactatagggttagtgtcttattgcgctggcatgtaacgcaagcgcgaacgtagtcttggatgagcacccaatcgctggggatgtagaaatccgtgcatggtcgttggagggtcttctatgttccctcgtagctggtggtatggggccagagcaagcatctgttggtgcaagttgggctcctacggcacgaagatgcacttaccgtaggccaggaaggtgtcgatggcccccagggtgccccgaggaacacaccctgtagctactggtggaggtagtctacctcattgtccatggtggcggcagggatcttgtcaagtaggcgaaacaagggccccgagagagcgtgcagctctacggagtctgtggtggtgtcggtgtcatggcgtgagatggcgtccatcgccaagttaaggcgacctgcggacctgggcaatactcgatcgcgaaatcaaagtcgaacagcttgttgatccactggtgctggggatcgatggaccactagtccaagaggaacttgaggctgtagtggtcggtgcggacgaggaagcggcaaccacagaggtacaatcaccaatgccgcacagcctagactaggctgatgagctcatgctcatacgctgccaatgggcaagagctggccgaaaaaggccatggaaccaccccctagtggagaatggcgttgaaccccaaacctgaaggtttgcagtccatgacaaactgacggttgaagttcgacatctacaagagcgacctcatggagaggacgcgcttgagagccacgaacgccactgcaaccttaggcgtccaggcaaaggtatccttgcgcaacagctatgtcaagggcgcgatgatcatgtggaagtcttggatgaacttctagtagtagtcgtctatccccaagaagctgcacacgctctagggtgagcggggctctagctaggacaagatggtgtccactttgtcgctgcccatggcgatgctaccaacagaggtaacatggctgagataggctactaatggtgccccaaaggagcactttgtctacttctagtggaggttttgtgtatgtaggttatcaaggacaagacgaacatgttgcaggtgcttggaccacgacgaattatagatcaaaatgtcgtcgaagaagatgatcatgaacatgcgaaggaagggatataatacgtcattcatgactccataaggatggggaagttgtccttggacgtcttgttttagcacatgttggtcgatgtagaacctccaggagccctctaccttcttgaccaacagcaccggacgacaagaacggagaagtgcccggcctgatgatgcctttctcaagcatggtggtgcactgctgcttgggctcatccttctacagttgggggtagcaataagggccacctcaacggtttgtccttgggtgcctcgtcgagtaggtagtcagcagcctcaaaatagaacaaacactaacactggtggtcccatagatacagatcatcgcagttgtaacatagcccttgtcgatggtgctttaccatcttggccagtgtgaggcgacaaaactagcattaggaataggcaagatcaccattagaggtggcctaagtatagccatgcacgcagtgggcattggggaggccgggcggcctgttgcaccggggctggcatggtggccgcaacgcgacgctcgtaggcttgcacctggtgcatggccatctacatgtcgtatgatttctggagctcgatgttgacccaaatgtgttccagtagacccccaatgaagaggtcgaccttcttgaccgacagaagattcggtgtttggcacaccagcgtgttgaagtggtcatagtagtcttggaccacgacatggaaggggggcctcaccagttcaacgagacagttgctgcggatggtcgaaccacatatgacaaagatctttgagctgctcccatgatgacatgccctcatcttgctctagagtatagtaccatgtctaggccacacccacgaggtggtacgatgtgagctagatccgttccgaggtaagcgtacgctgcccacggaagaactgctcacaatggttgagccagtttaggaggtcctccttgctgttgtaggtggagaagtagaacttcctgaagcaggggacgcccaatccaacgtgcatgatagtatcaatagcgaagggcgccgacgtagatgagaaaggcaccccttgcagaaatataggtagccaggatggcgaggaggagaagttgatcgggtggacgggaagggggggaaacggtggttgttgcaatgtacaagagagtgtcgggcgctgcagcgggcagggtagtggagggcgacacatcagtggcagtggataaggaaaggaacatcgtcgcctcttaccccgcatcccgtaggggaaaacctggtcatggcacccacagaggaggatgcttactagtgctctagtgggtggagagattggccaccttatcgtctagggcttttgtggtggtgtcggggaacgacgatggtgggatcagcagatgcttcaagcatcatcacctcacatctccgataccagattgataggatctaggatcttaccgcaattgcgtaggatgtacgggtaagagatcgatggactgggcttgtaccccgtgggcgcacaagaatcatggttgcacacagggagcaggcgagcaagagggatagacgtgggagacgacccttgaggcgaggcaagataattgccttgctttctttattctaaaactatttagaggtttttatcctctcctaataaaaatcaaccatggccctatttttatgaaaacaataaaaaatattaaaggaagaaaattctcaggcatttcgccctgactgccggcgtggcctagccactggcacgacctcaccgcgtataggtgatgctggttataacacacacacaaagagtttgagaattacttgtacaatcatctttttaatgctaggaagtcactcaacataaaataaggattcctaagtgcattgcatgtaatcagtaggcaccacaacttatatcttggatataccttgtgaggaaccttcgagtctaatcaaaaggctaaaaactaaaaatgagttgttccctcaaatgtttacaattcttgatgtccaggatgtctgatacattagtaattgacaattaccttccaaagtaacatacccctccgaaagctagagaaaacagggtagcactctcccatctgcaatcatatagcacactgtcaatggctttaagagaaggcatcaccgaatccgtggattctataacccattgaaagttaaagttattctatgctttgtagttgttttgtggatgcaacaaacttcatttattcttaatgcaatgatatgcatttctccaacgtgttcaggcaaaacttttgcaaatgaacccaagggtcagcatatcctctgatgatgcctcactcataagtcaaaagaagatttagaaaacggcaatccgctgagattaccaatatgatgccacaggatgttgtggttgaaaatggaatacaagatactccctctgttccaaaatagaattcgtcttagataattagtggattcatataattatgatgtatgtgttttatatgcgtcgagattcatcattatccatttgaatatagacataaaaaccaagtgctaaaacgactactattttgggacagagggaggggtatatcaatgttaattacttgcaaaaagggtagtgacttatgagatgaaccaaggtgaaacatatagtaggtgcttggatcctatgatatgacacagtaatcaaatggatacactttcggttaagtggccaactaaagtaaaagaaaacaaaagtaagtcttacattggaatgcccaatgagtttgttatgatatttgaagagcgtgccacgtatgcgacaagaagtgcataatgtataaataaataggataagctgcagcacaaggaaagcaaagtcagaaatccttcatatacgttaggaatgttaattgagtagaaaataggaattctgactctgagtggtcagctcagtttatgctatggtctgagtctgaagttccttcttttgcaattttcat

SEQ ID NO: 67427 - DNA, 3740 bp, Zea Mays
gttactttctcggatcttgcttccgcgtgccatccattctcgtttctttttctgaaacaaccgagcttctcaacgcgaccaaactcacccgatggagagagagatattcaggagagggggagaggaaaaaaaaatctttcctttcatggcgagatctgcaagttgcagcagcagagagagcgctcgcgccgcatctaatctagactagtactgtagacgtcacgtgaggcggcagcatggcgcggtagagttcgggagaggctgacggaccgggcagtggaaccgacggccgacgcgcgcgtcgtcctcacctcacgtgtgtcaccgccaccgccgctcacagccacacacaaccggacgacgacccgagcggattgctttgctattcttcgccgtctcaaaattaggagccggatccacgaagggaggagaaaagggctccttttttatgctgtcactgcggtcgcgggtgacgctttcccaggctctcccaccgtcgtagacgtcgccttcgccctccacacgcacacccatccgctcccctcgcgtcgccttctatcttcgagggagagccggagagccttcgccgctctctcactcgctctgttttgtacctcgctctgatctctccccccgcccgtcgctgattccctgcccgtttgtcgccattgccgccggtcgtgccgtgtcaaggacatggcgacctcgggaaagaaacacctgaattcagtgaccttgctgttcaaactaccgtattacacgcaatggggccagagcttgctgattgccgggtcggaaccagcactcgggtcgtggaatgtcaagcaaggagtatctctcagtccagtccatcaggacagtgagctaatctggtgtgggagcgtgtctgttgttgccggctttacctctgagtacaagtactatgtggtggatgacaagaagaatgtgttgagatgggaggctggggagaaaaggaaactagtcctgccggagggcgtgaaggaaggagacgtaattgaaatccgtgactggtggcaggatgcttctgaagctctattcttcagaagtgcattcaagaatgtcattttcaatgctactgaaggtgttaaaaaggaatcacagtcagtgtccctcaacaaaagtttggatcctgaagatatcgttgtccagttcgtgattagctgtcctcggctcgtatctggatctactgtcatcgtcactggaagtaaccctcaattaggaagatggcaaactcaagatggtctcaagctgagctatgttggagattccttgtggaaagcaagctgtgctttacggaagtctgagttccctataaaatacaaatattgtcaaatcagtcaagcaggaaactctacattggagcttggcccaaacagggaggttaatgttgatttatcatcacccaagcaatccagatatattgtgttatctgatggtgctcttagggatgcaccatggaggggtgcaggtgttgctgtacccatgttttcaatcagatcagatgaggaccttggcgttggagaatttctagatcttaaacttcttgttgactgggcagtcaattcgggcttccatcttgttcagctccttccaatcaacgatacttcagttcatgggatgtggtgggattcttatccgtacagctccctgtctgtgtttgctttgcatcccttgtacctgagggtacaagcactttcagatgcaattcctgtggatgttaaggaagaaattcagcaggcgaagaagcaattggataaaaaggatgtcgactacgaggcagcattgtccacaaaattgtcgattgctagaaaaatattcaatttagaaaaggaaaaagtgctaaactccagttctttcaagcagttcttatctgaaaacgaggaatggttgaaaccatatgcggcattttgctttttgcgggactttttcgagacatctgatcacagtcaatggggtcgtttttctcagttttccaaggataagcttgacaaacttatttgtgaaggtactttacaccatgacattatacgttttcattactatgttcagtaccatctatatatacaattatctgaggcagcaacatatgcaagaaagaaaaatgttatcctgaaaggtgatttacctattggtgttgataggaatagtgtcgatacatgggtatacccaaccttgtttcgcatgaataccgctactggagcgcctcctgattattttgacaagaatggacaaaattggggttttcctacatataactgggaggagatgtcaaaggataattatgggtggtggcgagctcgtctgacacagatggcaaagtacttcacagcatacaggatagaccacatcttgggtttctttaggatatgggagcttccagatcatgctgcaacaggtttagttgggaaatttagaccttccatccctcttagtcaggaggagcttctaagtgaaggtctatgggattttaatcggatgagccaaccatacattcgtcaggaaatactggaggagaagtttggatccttttggacagtcattgcagccaattttctaaatgagtaccagaagcagtgttatgagtttaaagaagattgcaacacagagaaaaagattattgtaaagattaaaacaagtgctgaaaagtcactgtgggtagagaaagaggacaatatccgccgtggccttttcgatttactacagaatattgtccttatcagagatccagaggactccacaaaattctatccccgttcaacctggaagacacatcaagttttagggaccttgatgaacacagcaaaaatatcctcagaagattgtattataactattattttgttcgccaagaaaatctctggcgccaaaatgccctgaagactttgcctgtcctgctgaactcgtcagatatgttagcatgtggagaggaccttggccttatccctgcttgtgttcaccctgttatgcaagaactggggttgattggattgcgtatccaaagaatgcctagtgaaccaaacttggaatttggtattccttctcagtatagctatatgacggtttgtgctccctcatgtcatgactgctctacattacgtgcttggtgggaagaagatgaaggaagaagaagtcgtttctacaagactgtagttggcagtgatgaggagcccccatctcgttgcaccccggaagtagtgcacttcattgttcagcagcattttgacgctccatcaatgtgggcaatctttccacttcaggacctccttgcactgaaagacaagtacaccacaagaccagcgccagaggaaacaatcaatgaccccactaacccaaagcactattggagattccgtgtccacgtgacattggagtccctgctgaacgacaaggacatccaggcaaccatcaaggacctggtcacaagcagtgggaggtccttccccggaaagaagctgtccaaggtgcagctgaatggtaaagcttaggaaaggattgcgagagctgctggaagtgaccacggttacaagtaaataaatagaataaggcgacagattgcatcaccgtgttgatccaggtgatgctgtttctggtaggaaattcttacccatgtgatgttctttcaactctggaaataagaagcaccctctaccaagtcagaaagtgaaataatccatccagtgtcggttttcattaatagaattttcgttgaccgcccagtt

SEQ ID NO: 67428 - DNA, 1201 bp, Zea Mays
aaaaatctttcctttcatggcgagatctgcaagttgcagcagcagagagagcgctcgcgccgcatctaatctagactagtactgtagacgtcacgtgaggcggcagcatggcgcggtagagttcgggagaggctgacggaccgggcagtggaaccgacggccgacgcgcgcgtcgtcctcacctcacgtgtgtcaccgccaccgccgctcacagccacacacaaccggacgacgacccgagcggattgctttgctattcttcgccgtctcaaaattaggagccggatccacgaagggaggagaaaagggctccttttttatgctgtcactgcggtcgcgggtgacgctttcccaggctctcccaccgtcgtagacgtcgccttcgccctccacacgcacacccatccgctcccctcgcgtcgccttctatcttcgagggagagccggagagccttcgccgctctctcactcgctctgttttgtacctcgctctgatctctccccccgcccgtcgctgattccctgcccgtttgtcgccattgccgccggtcgtgccgtgtcaaggacatggcgacctcgggaaagaaacacctgaattcagtgaccttgctgttcaaactaccgtattacacgcaatggggccagagcttgctgattgccgggtcggaaccagcactcgggtcgtggaatgtcaagcaaggagtatctctcagtccagtccatcaggacagtgagctaatctggtgtgggagcgtgtctgttgttgccggctttacctctgagtacaagtactatgtggtggatgacaagaagaatgtgttgagatgggaggctggggagaaaaggaaactagtcctgccggagggcgtgaaggaaggagacgtaattgaaatccgtgactggtggcaggatgcttctgaagctctattcttcagaagtgcattcaagaatgtcattttcaatgctactgaaggtgttaaaaaggaatcacagtcagtgtccctcaacaaaagtttggatcctgaagatatcgttgtccagttcgtgattagctgtcctcggctcgtatctggatctactgtgtcatcgtcactggaagtaaccctcaattaggaagatggcaaactcaagatggtctcaagctgagctatgttggagattccttgtggaaagcaagctgtgctttacggaagtctgagtt

SEQ ID NO: 67429 - DNA, 1373 bp, Zea Mays
aaatctttcctttcatggcgagatctgcaagttgcagcagcagagagagcgctcgcgccgcatctaatctagactagtactgtagacgtcacgtgaggcggcagcatggcgcggtagagttcgggagaggctgacggaccgggcagtggaaccgacggccgacgcgcgcgtcgtcctcacctcacgtgtgtcaccgccaccgccgctcacagccacacacaaccggacgacgacccgagcggattgctttgctattcttcgccgtctcaaaattaggagccggatccacgaagggaggagaaaagggctccttttttatgctgtcactgcggtcgcgggtgacgctttcccaggctctcccaccgtcgtagacgtcgccttcgccctccacacgcacacccatccgctcccctcgcgtcgccttctatcttcgagggagagccggagagccttcgccgctctctcactcgctctgttttgtacctcgctctgatctctccccccgcccgtcgctgattccctgcccgtttgtcgccattgccgccggtcgtgccgtgtcaaggacatggcgacctcgggaaagaaacacctgaattcagtgaccttgctgttcaaactaccgtattacacgcaatggggccagagcttgctgattgccgggtcggaaccagcactcgggtcgtggaatgtcaagcaaggagtatctctcagtccagtccatcaggacagtgagctaatctggtgtgggagcgtgtctgttgttgccggctttacctctgagtacaagtactatgtggtggatgacaagaagaatgtgttgagatgggaggctggggagaaaaggaaactagtcctgccggagggcgtgaaggaaggagacgtaattgaaatccgtgactggtggcaggatgcttctgaagctctattcttcagaagtgcattcaagaatgtcattttcaatgctactgaaggtgttaaaaaggaatcacagtcagtgtccctcaacaaaagtttggatcctgaagatatcgttgtccagttcgtgattagctgtcctcggctcgtatctggatctactgtcatcgtcactggaagtaaccctcaattaggaagatggcaaactcaagatggtctcaagctgagctatgttggagattccttgtggaaagcaagctgtgctttacggaagtctgagttccctataaaatacaaatattgtcaaatcagtcaagcaggaaactctacattggagcttggcccaaacagggaggttaatgttgatttatcatcacccaagcaatccagatatattgtgttatctgatggtgctcttaggaaccatggaactccacacttcggataacaaaccagag

SEQ ID NO: 67430 - DNA, 1481 bp, Zea Mays
aaatctttcctttcatggcgagatctgcaagttgcagcagcagagagagcgctcgcgccgcatctaatctagactagtactgtagacgtcacgtgaggcggcagcatggcgcggtagagttcgggagaggctgacggaccgggcagtggaaccgacggccgacgcgcgcgtcgtcctcacctcacgtgtgtcaccgccaccgccgctcacagccacacacaaccggacgacgacccgagcggattgctttgctattcttcgccgtctcaaaattaggagccggatccacgaagggaggagaaaagggctccttttttatgctgtcactgcggtcgcgggtgacgctttcccaggctctcccaccgtcgtagacgtcgccttcgccctccacacgcacacccatccgctcccctcgcgtcgccttctatcttcgagggagagccggagagccttcgccgctctctcactcgctctgttttgtacctcgctctgatctctccccccgcccgtcgctgattccctgcccgtttgtcgccattgccgccggtcgtgccgtgtcaaggacatggcgacctcgggaaagaaacacctgaattcagtgaccttgctgttcaaactaccgtattacacgcaatggggccagagcttgctgattgccgggtcggaaccagcactcgggtcgtggaatgtcaagcaaggagtatctctcagtccagtccatcaggacagtgagctaatctggtgtgggagcgtgtctgttgttgccggctttacctctgagtacaagtactatgtggtggatgacaagaagaatgtgttgagatgggaggctggggagaaaaggaaactagtcctgccggagggcgtgaaggaaggagacgtaattgaaatccgtgactggtggcaggatgcttctgaagctctattcttcagaagtgcattcaagaatgtcattttcaatgctactgaaggtgttaaaaaggaatcacagtcagtgtccctcaacaaaagtttggatcctgaagatatcgttgtccagttcgtgattagctgtcctcggctcgtatctggatctactgtcatcgtcactggaagtaaccctcaattaggaagatggcaaactcaagatggtctcaagctgagctatgttggagattccttgtggaaagcaagctgtgctttacggaagtctgagttccctataaaaaatattgtcaaatcagtcaagcaggaaactctacattggagcttggcccaaacagggaggttaatgttgatttatcatcacccaagcaatccagatatattgtgttatctgatggtgctcttagggatgcaccatggaggggtgcaggtgttgctgtacccatgttttcaatcagatcagatgaggaccttggcgttggagaatttctagatcttaaacttcttgttgactgggcagtcaattcgggcttccatcttgttcagctccttccaat

SEQ ID NO: 67431 - DNA, 3479 bp, Zea Mays
aaatctttcctttcatggcgagatctgcaagttgcagcagcagagagagcgctcgcgccgcatctaatctagactagtactgtagacgtcacgtgaggcggcagcatggcgcggtagagttcgggagaggctgacggaccgggcagtggaaccgacggccgacgcgcgcgtcgtcctcacctcacgtgtgtcaccgccaccgccgctcacagccacacacaaccggacgacgacccgagcggattgctttgctattcttcgccgtctcaaaattaggagccggatccacgaagggaggagaaaagggctccttttttatgctgtcactgcggtcgcgggtgacgctttcccaggctctcccaccgtcgtagacgtcgccttcgccctccacacgcacacccatccgctcccctcgcgtcgccttctatcttcgagggagagccggagagccttcgccgctctctcactcgctctgttttgtacctcgctctgatctctccccccgcccgtcgctgattccctgcccgtttgtcgccattgccgccggtcgtgccgtgtcaaggacatggcgacctcgggaaagaaacacctgaattcagtgaccttgctgttcaaactaccgtattacacgcaatggggccagagcttgctgattgccgggtcggaaccagcactcgggtcgtggaatgtcaagcaaggagtatctctcagtccagtccatcaggacagtgagctaatctggtgtgggagcgtgtctgttgttgccggctttacctctgagtacaagtactatgtggtggatgacaagaagaatgtgttgagatgggaggctggggagaaaaggaaactagtcctgccggagggcgtgaaggaaggagacgtaattgaaatccgtgactggtggcaggatgcttctgaagctctattcttcagaagtgcattcaagaatgtcattttcaatgctactgaaggtgttaaaaaggaatcacagtcagtgtccctcaacaaaagtttggatcctgaagatatcgttgtccagttcgtgattagctgtcctcggctcgtatctggatctactgtcatcgtcactggaagtaaccctcaattaggaagatggcaaactcaagatggtctcaagctgagctatgttggagattccttgtggaaagcaagctgtgctttacggaagtctgagttccctataaaatacaaatattgtcaaatcagtcaagcaggaaactctacattggagcttggcccaaacagggaggttaatgttgatttatcatcacccaagcaatccagatatattgtgttatctgatggtgctcttagggatgcaccatggaggggtgcaggtgttgctgtacccatgttttcaatcagatcagatgaggaccttggcgttggagaatttctagatcttaaacttcttgttgactgggcagtcaattcgggcttccatcttgttcagctccttccaatcaacgatacttcagttcatgggatgtggtgggattcttatccgtacagctccctgtctgtgtttgctttgcatcccttgtacctgagggtacaagcactttcagatgcaattcctgtggatgttaaggaagaaattcagcaggcgaagaagcaattggataaaaaggatgtcgactacgaggcagcattgtccacaaaattgtcgattgctagaaaaatattcaatttagaaaaggaaaaagtgctaaactccagttctttcaagcagttcttatctgaaaacgaggaatggttgaaaccatatgcggcattttgctttttgcgggactttttcgagacatctgatcacagtcaatggggtcgtttttctcagttttccaaggataagcttgacaaacttatttgtgaaggtactttacaccatgacattatacgttttcattactatgttcagtaccatctatatatacaattatctgaggcagcaacatatgcaagaaagaaaaatgttatcctgaaaggtgatttacctattggtgttgataggaatagtgtcgatacatgggtatacccaaccttgtttcgcatgaataccgctactggagcgcctcctgattattttgacaagaatggacaaaattggggttttcctacatataactgggaggagatgtcaaaggataattatgggtggtggcgagctcgtctgacacagatggcaaagtacttcacagcatacaggatagaccacatcttgggtttctttaggatatgggagcttccagatcatgctgcaacaggtttagttgggaaatttagaccttccatccctcttagtcaggaggagcttctaagtgaaggtctatgggattttaatcggatgagccaaccatacattcgtcaggaaatactggaggagaagtttggatccttttggacagtcattgcagccaattttctaaatgagtaccagaagcagtgttatgagtttaaagaagattgcaacacagagaaaaagattattgtaaagattaaaacaagtgctgaaaagtcactgtgggtagagaaagaggacaatatccgccgtggccttttcgatttactacagaatattgtccttatcagagatccagaggactccacaaaattctatccccgttcaacctggaagacacatcaagttttagggaccttgatgaacacaggttatgcaagaactggggttgattggattgcgtatccaaagaatgcctagtgaaccaaacttggaatttggtattccttctcagtatagctatatgacggtttgtgctccctcatgtcatgactgctctacattacgtgcttggtgggaagaagatgaaggaagaagaagtcgtttctacaagactgtagttggcagtgatgaggagcccccatctcgttgcaccccggaagtagtgcacttcattgttcagcagcattttgacgctccatcaatgtgggcaatctttccacttcaggacctccttgcactgaaagacaagtacaccacaagaccagcgccagaggaaacaatcaatgaccccactaacccaaagcactattggagattccgtgtccacgtgacattggagtccctgctgaacgacaaggacatccaggcaaccatcaaggacctggtcacaagcagtgggaggtccttccccggaaagaaggcggaaggtgccgacgagagcggggagaagctgtccaaggtgcagctgaatggtaaagcttaggaaaggattgcgagagctgctggaagtgaccacggttacaagtaaataaatagaataaggcgacagattgcatcaccgtgttgatccaggtgatgctgtttctggtaggaaattcttacccatgtgatgttctttcaactctggaaataagaagcaccctctaccaagtcagaaagtgaaataatccatccagtgtcggttttcattaatagaattttcgttgaccgcccagtt

SEQ ID NO: 67432 - DNA, 615 bp, Zea Mays
ctggtttctgatgcagcctctctgcaaaaatgcaggggatgcttctgaagctctattcttcagaagtgcattcaagaatgtcattttcaatgctactgaaggtgttaaaaaggaatcacagtcagtgtccctcaacaaaagtttggatcctgaagatatcgttgtccagttcgtgattagctgtcctcggctcgtatctggatctactgtcatcgtcactggaagtaaccctcaattaggaagatggcaaactcaagatggtctcaagctgagctatgttggagattccttgtggaaagcaagctgtgctttacggaagtctgagttccctataaaatacaaatattgtcaaatcagtcaagcaggaaactctacattggagcttggcccaaacagggaggttaatgttgatttatcatcacccaagcaatccagatatattgtgttatctgatggtgctcttagggatgcaccatggaggggtgcaggtgttgctgtacccatgttttcaatcagatcagatgaggaccttggcgttggagaatttctagatcttaaacttcttgttgactgggcagtcaattcgggcttccatcttgttcagctccttccaat

SEQ ID NO: 67433 - DNA, 764 bp, Zea Mays
gtggagcagcaacacggccacctccgagccgtcctcacccaagtccctgcactcgcctctcctgacgagcatgcagggctcggacatcgagacggggtcggcacagattgtgaggccgtccagcctccggatgctcctaagcaagccaacccacacggtgcactactactggcgcaagttcgacgacgcgctcatgcggcccatgtttggcggccgcgggttcgtgcccttctcccctggatcgcccactgagcagagcgtccacgacggacggtgaacaaagccgcgtctgacaccaagagacgagcaggacatgcttttggctgctaatcgtcagatgatgatgtttttgtttgttgacagcttctgatggtgcgttagcaatggcaacgaggtgtcagttggtttggattagcaggatgaagaagagcaaccctggtaactagggcggggggattgagtttgtgcatgacaaggctgcaaacttttgtatgtagataaaaaaaacacccatttggccatttgtattgtatgttattgtatgtaagctagcaggcctgtacaactgcttttaggtcttcgtttggatgggcgaaattctggcaaatagcagcacatccactctgtgttctgatctaagcatcttggtttgattttgaaatggactcggtgtgtaggatagcttttggaagttgttttgccacaactcggtttttctagggtgcgtacagtgtctatcaagtgtgtttttttggctatgcaag

SEQ ID NO: 67434 - DNA, 62 bp, Zea Mays
ccatgatcttgtcggcaagagcacataatcggaagggacgatgcttacacactgaccttggc

SEQ ID NO: 67435 - DNA, 1831 bp, Zea Mays
cggcggccttggaatttatgaggattctggtagggagtgtattcgtcaattcgtgccactgccgctctgggcccatcatcttgtgtttggtttgtgcatctcccggtgctctcaaacacgaagctgcgagtcactgttaccatggatgatcgaggcttgtcgtcgtcgtcgcgggtccattcattgatcgcggatttaaaaccaaacaatcctggtagttgtttgtagttttgctagacaaggatccatcatcactcgctcactcactcatagaggccgtcaggcctgtcgcccagtagtagcgacgggcgacggtggagatcgtgcgaggctgtactacctgtacgcctccatcgtcgcctcgcaccatcaatcctgtgcggtgccagatcctccccgggtcttgtcttgtcgcaggtggaagccatgtccgccgcggacgcagccggcggcaaggaggcggcgccggcgtgcgactcctgcacgggcatgccggcggtggtgtactgccgggccgactccgcgaggctgtgcctgccgtgcgaccgccacgtgcacggcgccaacaccgtgtccactcgccacgcccgggcgccgctctgcgccgggtgccgcgcagccgctgccgctgcggcccgccacgcgcggcggcttcctctgcgccagctgccgcttgggggaggagaaggatgagcgggacggcggtggcgccgccgacagtagtagcgacgacggtggcgcggtggaagggtacgccgggtgcccctcggtcgccgatctcgcgaccatcctgggcgccggctccgcgtgggaggagccccagacgctccgcttggagagccggagctccggcggcgagctggctgacgaggtcatccgccagctggtggagctcgccaggtcggaggcggcggctcgcgctgagatggagcagcttactccatggccgtcgccggagcttgctgccattactggacagtacgccgacttcggggctctcgacgctgacaccgcctggcatgatgatgcagcagccatcgcggcagcagtagtgccttccactgaggaggagcagcaagcgtggatcgcggccggctgcgacgtcggcgcgtgccggacggaggagaaggcgcgcgagaacgacgctgctctggccgagccgtgtctgtcctcgttcgtggagatgtcagagatctgccccgccagcgtcgtcgtcaccctcagccacggcggggacgagggcgtcgacagcagcggcaagacagccccgcggccgcagctggccgcgccgacgccggcgaagggcggctacgacgtggcctaccccgaccgcggcacggtgatctcgcgctacaaggagaagcggaagaacaggaggttcgacaagcagatccggtacgagtcgcgcaaggcccgcgccgacggccggatgcggatcaaggggcggttcgccaagtccggcgagctcgctgctcgcacgtgtcgatgcgtactagtctacgttgattagagacggttgtctactctttcctcattcgtttaataaaacacggctccaccaccaatgcaagtttcaccccgatcgattggaagcgtgtgtttacgtggagaactcgctaagttagatgtcgtttggtaatgtaatagataaccgatattgttaaattatatttgtttaggtttaattataattaataatatactagaaatagataccggcttattcgaacttgttactgccggtattcgagagtgaatcattaccattattatttaagttgtatttcgtgaatcaaacgacacattagtttctagtcaaatttgttattca

SEQ ID NO: 67436 - DNA, 2145 bp, Zea Mays
cgccctttcatccgcctccctagctccgtgatccgtgccgcgcgagcgccgagcagcaatgtgtacaaggcgcgagactcgctgagcggcaagatcgtggcgctcaagaaggtgcgcttcgacaacctggagcccgagagcgtgcggttcatggcgcgcgagatcctcatcctgcgccgcctcgaccaccccaatgtcgtcaagctcgacgggctcgtcacctcccgcatgtcctgcagcctctacctcgtcttcgactacatggtccacgacctcgccggcctagccgccagccccgacatcaagttcacgctgccccaggtcaagtgctatgtgcaccagctgttgtcaggacttgagcattgtcacaaccggggagtgctacatcgcgacatcaaggggtctaacctgcttttggacaacaacggtgtgctgaagattgctgatttcggtctggcgtccttcttcgaccccaaccataaacagccaatgacgagtcgggtggtgacactctggtaccgcccaccagagctgctgctgggtgcgacagattatggagttggcgtcgacttgtggagcgcaggatgtatactagctgaattgctggctggaaagcccattatgcctggacggactgaggtggaacagctgcataaaatttttaagctatgtggctctccgacagaagaatattggaaaaaatcaaagttgcctcatgcaactatatttaagccccaacagccatacaaaaggcgaatagcggatacattcaaagatttccctcaatcagcacttcgactgatcgagacactacttgcaattgatccagctgatcggttaacggcaacttctgcattgaacagtgatttctttgcaacagagccttatgcgtgtgaaccatcaagtctgccccaatacccaccaagtaaagagatggatgctaaacgaagagacgaagaagctagacgcttaagggctgctggtggtagaggtaacggagatggaacaaggaagacaaggacacgggatcggcctagggctgttccagcgccagaggcaaacgccgaactgcaagcaaacattgataaaagaaggttgataactcatgcaaatgctaagagcaagagcgaaaagttccctccaccgcatcaggacggcgcgctcggctttcccttgggctgttcgaatcacatggaaccttcattcgagcccccggacccttcttccttcagcactgtatttcctttcgagaaaagcgcggtgccaacctggtccggaccgctggcggactctgcagctggcaaccagaagcggaaacacaagtctgcccgctcctcaaaacaaccagcaactgcccgtgctagatgatacacaccatgccgtgcttagcgcagatcaagtcttcaatacccccaaagaaacacattgtagtggttcctacaaactgggatgtctgattcggaatcaagagctacaacaaggaattgtttacttttttctcggattcaattcatgtatgaaaatttttctgaacaacggtcaatgtataggctggagagggagctcgattagtccattatgtacattaggttctcttttccattcttacaagcaacatgtctgttagattaattcgaagtgaggaatggaactggtaggtcagcttagcaagtcatcactctgcatagattacttccaatcaattgaatatttttttacctgctattttgtcaacaatttgcgtcatctgttttttttcctttattccattttacaaggtcttcaaacagaatcaaaagcgtagcaaaattgaattgctttctgctgttatggccgaaggttgtgtctccttgagtcttctgatatggtgatggaattttcacagatttcttccagcaggacgccgttttttgggcgaattccttggggccgcacgaattccgagtcgatcctgctgtccacttcgtcctggagctcgtggaagtcacccagggagtagctgccaaggcttccgtcaccctctgagctgtatggatcacacgccttgtctcctggaccaggggaagctctgtcagatctgtaccggtatatgacagttacacagtgcttatttgcaaagcacacatgaatgaaaaggttaggaca

SEQ ID NO: 67437 - DNA, 1266 bp, Zea Mays
caactgaacactctactgatgatatatctagtagctagctagcttcttcattctcgtccgtctatctatcagtcaagaaaccatggagcgatcgaccttagattgctatagttttaccatgtaccaaccattatgcatgtgtctgtgtgtgtgttgtagcagtatagggttgtctgtttgatcagttgatgatggtttgaggccccgaggcgtctgtttttatagtgaccggcggcgaggcggcttgtgcatcactgcggctggcctgcgtgtgttgtgcttgtgcctcaacactcccaatgcaggaggcttttgggtggatcatgtatctccagtgacatgtccatgacagattcctcggccgcttctcccagaagctaagacgcgctgtgtctgtgtgcaaagaaagacgatgccgtatatatctgtccattcatcgtccaggtcactaggggtgtgcagtgcaggccatgcacgaggagcggtttgtccccatgccaatgcgatagggatcaacccgggagtgatgatgtgtgtacaccctgtcgcacgcacttgtgtcatgtcattcgtgtgtgtgcagctgcggttttttccttccttccttctttccgacgaaaaaaccgcgcgcgtacattgttttcaattacacatctcgtcaagtctaaatcaatccatgaaatcaggcttgtaattaattaattaatatgtaagaatattcactccacatccgaactaatgtgatttcaggggataacatgaacaacaatgtttttttttttttttgcatcaaatagcctcagcatgtttcattcgtgcaaacgaaagaacaaaattaaaccgaagtagaaaagggtacataagggctagtctgggaaccacatttcctaaggaattttcatttttttaaggaaaaataaactaattttccttggaaaaataaaaatcccttgaaaaaaattctcaaactagctctaaatatgggaaaacgtagaagatatatgatatatctgacttggtatagaagaaggtcgattagaaatagatttgccttaatggctgagcttcagatatgacctagctagggttgggggggggggggggggatcaattaagcgtagtaataatatttaacaacagcatgctacaagcttgaaattcctaagcatgtcgcaataatacctgaacgggagagcgagcagggaggagattggcatcaaaagaaagagacgatgatggaagagtgctacgatatctactcgttat

SEQ ID NO: 67438 - DNA, 1588 bp, Zea Mays
gccactgctcctctactccagttttgttgctcctctgctccaattccaaccaccgacagccattgctccagttacaaacgtcggtagccactgcccccactgctctaataagttatcaactatatatatatatggacaagttccggttcatggagagatggagcctgggtgccaaagtggtagctctcgcactcctgctgtctgctgcttctcatggaagagagttgcctgtcaagagtagtgaccgcagttttatctacaatcatactcttgcaaagacgcttgtggaatatgcatcagcggtgtatatgacagatttaaccgctctgtttacgtggacatgctcaagatgcaatgacttgactcaaggattcgagatgagatctctaattgttgatgtggagaactgcttgcaggcatttgttggtgtagatcatagtctgaattcgataattgttgcaatcaggggaactcaagagaacagtgtacagaattggataaaagacttgatatggaagcagcttgatctaagttatccaaacatgccaaatgcaaaggtgcacagtggatttttctcctcgtataacaatacaattttgcgtctagctatcacaagtgctgtgcacaaggcaagaaagtcatatggagatatcaatgtcatagtgacaggccactcgatgggaggagctatggcttctttttgcgcgctcgatcttgctatgaagcttggaggtggcagtgtgcaactcatgacttttgggcagcctcgtgttggcaatgctgcattcgcctcatacttcgccaaatatgtacccaacacaattcgagtgacacacgggcatgatattgtgccacatttgccaccttatttctcctttcttccccagctgacataccaccatttcccaagagaggtatgggtccaggattctgatggcaacacaactgaacggatttgtgacgacagcggtgaagacccagattgttgcaggtgcatctccatgttcggcttgaggattcaggaccatttcacttacctaggagttgatatggaagcggacgactggagcacctgtagaatcatcacagctcaaagggttcagcagttccgactggagctagcgggcaacatcatgatgaccaagcacgatatcgacgtctccatcgttgaacctagtgtacaaaacagattggagcagttctagataggcggaacattcgttttgtccagattcagagaagcaacagcctcttgttaatgcagtggaaattgttcagagacgaaggcgacccttgttttctctattagttcggtcagaatgggatgttctttcagatcaaggaaataaatcgggagtcatctcttgtaacaaagagaatcagagcatgatgtacataaggaaaaatcataggcacggtttatgctggatatggtagggattgcttctgtgtaaatatatgtatacaatgtaaacttgcaatggctatatttgcagcaacataagcaccaagctaactgaaaaatatcagttaaccgaatgaatgaggcgtatctatatatacatgatgtgagcttgcaatagcgtat

SEQ ID NO: 67439 - DNA, 1354 bp, Zea Mays
ctcctctgctccaattccaaccaccgacagccattgctccagttacaaacgtcggtagccactgcccccactgctctaataagttatcaactatatatatatatggacaaagttgcctgtcaagagtagtgaccgcagttttatctacaatcatactcttgcaaagacgcttgtggaatatgcatcagcggtgtatatgacagatttaaccgctctgtttacgtggacatgctcaagatgcaatgacttgactcaaggattcgagatgagatctctaattgttgatgtggagaactgcttgcaggcatttgttggtgtagatcatagtctgaattcgataattgttgcaatcaggggaactcaagagaacagctatcacaagtgctgtgcacaaggcaagaaagtcatatggagatatcaatgtcatagtgacaggccactcgatgggaggagctatggcttctttttgcgcgctcgatcttgctatgaagcttggaggtggcagtgtgcaactcatgacttttgggcagcctcgtgttggcaatgctgcattcgcctcatacttcgccaaatatgtacccaacacaattcgagtgacacacgggcatgatattgtgccacatttgccaccttatttctcctttcttccccagctgacataccaccatttcccaagagaggtatgggtccaggattctgatggcaacacaactgaacggatttgtgacgacagcggtgaagacccagattgttgcaggtgcatctccatgttcggcttgaggattcaggaccatttcacttacctaggagttgatatggaagcggacgactggagcacctgtagaatcatcacagctcaaagggttcagcagttccgactggagctagcgggcaacatcatgatgaccaagcacgatatcgacgtctccatcgttgaacctagtgtacaaaacagattggagcagttctagataggcggaacattcgttttgtccagattcagagaagcaacagcctcttgttaatgcagtggaaattgttcagagacgaaggcgacccttgttttctctattagttcggtcagaatgggatgttctttcagatcaaggaaataaatcgggagtcatctcttgtaacaaagagaatcagagcatgatgtacataaggaaaaatcataggcacggtttatgctggatatggtagggattgcttctgtgtaaatatatgtatacaatgtaaacttgcaatggctatatttgcagcaacataagcaccaagctaactgaaaaatatcagttaaccgaatgaatgaggcgtatctatatatacatgatgtgagcttgcaatagcgtat

SEQ ID NO: 67440 - DNA, 1466 bp, Zea Mays
aataagttatcaactatatatatatatggacaagttccggttcatggagagatggagcctgggtgccaaagtggtagctctcgcactcctgctgtctgctgcttctcatggaagagagttgcctgtcaagagtagtgaccgcagttttatctacaatcatactcttgcaaagacgcttgtggaatatgcatcagcggtgtatatgacagatttaaccgctctgtttacgtggacatgctcaagatgcaatgacttgactcaaggattcgagatgagatctctaattgttgatgtggagaactgcttgcagatcatagtctgaattcgataattgttgcaatcaggggaactcaagagaacagtgtacagaattggataaaagacttgatatggaagcagcttgatctaagttatccaaacatgccaaatgcaaaggtgcacagtggatttttctcctcgtataacaatacaattttgcgtctagctatcacaagtgctgtgcacaaggcaagaaagtcatatggagatatcaatgtcatagtgacaggccactcgatgggaggagctatggcttctttttgcgcgctcgatcttgctatgaagcttggaggtggcagtgtgcaactcatgacttttgggcagcctcgtgttggcaatgctgcattcgcctcatacttcgccaaatatgtacccaacacaattcgagtgacacacgggcatgatattgtgccacatttgccaccttatttctcctttcttccccagctgacataccaccatttcccaagagaggtatgggtccaggattctgatggcaacacaactgaacggatttgtgacgacagcggtgaagacccagattgttgcaggtgcatctccatgttcggcttgaggattcaggaccatttcacttacctaggagttgatatggaagcggacgactggagcacctgtagaatcatcacagctcaaagggttcagcagttccgactggagctagcgggcaacatcatgatgaccaagcacgatatcgacgtctccatcgttgaacctagtgtacaaaacagattggagcagttctagataggcggaacattcgttttgtccagattcagagaagcaacagcctcttgttaatgcagtggaaattgttcagagacgaaggcgacccttgttttctctattagttcggtcagaatgggatgttctttcagatcaaggaaataaatcgggagtcatctcttgtaacaaagagaatcagagcatgatgtacataaggaaaaatcataggcacggtttatgctggatatggtagggattgcttctgtgtaaatatatgtatacaatgtaaacttgcaatggctatatttgcagcaacataagcaccaagctaactgaaaaatatcagttaaccgaatgaatgaggcgtatctatatatacatgatgtgagcttgcaatagcgtat

SEQ ID NO: 67441 - DNA, 3522 bp, Zea Mays
actttcttgattataagcattttttgtggaatcattatctttttacacagaaaaacaaggtaagttgtcttgtatcgggttttaaggtctggacgacttagtatcgattagtcgtccgagttgtcgataagtcgactagattgacttcgtctcaatgacttaaaaacattgatgtgacgtcatgcctcatgcgcacaggttttaggcgcgacaactgacgtacgtcgcacaagcactaaacgtaaaatcggtccggccctatccaaaccaggagcaacctctccctcaaaggtatcgtcgtcgacgtgacatacgtcgaacgacgcctctcacgtcccattcactgctcgttcccgcgctacttctagcgcctcctccacgtctcggtgctggacaacatctccatggcgacactagaccacttgtgccccccgtcacgctcctgttctcccaattggccaccttcgcttctttgttgttggcttgatctataaacgaaattttgccttatgttgaacaaggtgcactcctcccttgcgtgatcttcaacagggtgcactcctcccttgcggagctccttcgacaatacaaggatgaaagcattatttggcgttgtcggttgcggcgtcacgaccactggtgttgtcctctcaacgattctccgagcaccaccccgtaaactcctcaacttttgccttatgaggcctaaatgatgatcaatatttcttccatcccaaaatagtattctctttaattcttggtttttttatgcctatattcaaatgagtgatgatgaatctagacatatatctaaaaacacatacatcaattattgtatgaatccattaaaaacctaagatgaattttagtttgggacatatgaagtatatctcaggtggggatcccctggtggtgacagtagaaaaaacgtaaatcggtctgaatttttcaaaccgtgattgcctgtcaagacgttactgcaaagacaccaacaacaaatcaccactgaaataaaaatgaatcgacagcaaaggcgtaagtcaaaacaagacaaacaagagagataaaaaaaagatcaaaatatcagtaaagattcaacctgccgtagcaccagcgaatggaagctcaagactgaaattccggagcggcacgatgaaatccatgccaccgtcgactacaaattagaaacggcccaaaccgaatctcaaacatcaagcaacagtagctgaccgcaaacaagaacatctcaaagcatgattcaatagacagaaacttagatgtacgtatctctctaggggctattgcaacagtctaacttcctttctccaacttgaaaatggggcctactttatacggaattgggcgatttttaaaaaaacaagacttgttaaatcatcaagtctgtggttgatcccttgttctagcagaagaaaacttcaagatgtggaaatggtattctagctctagaactaggagagggaaatctcagctccatgcttcatggcaggtgaggattgtgaagcctgtgcgcgcccatgttctccacgaaaagacgaactcgttctccttcacgatttcgacagcattgacacgaaaacagttgttaatccctagcctaggtatccatagatccaacccagatgctgatgcgggggtgcaacagtgcaagaacaactctggattcctccggatgatgccatgccaccaatcctcactaaccaattattattatccaacaaatccacgagaaaaggacgtcctttttttctctctgaagagtgggagtgtacccggcggcctggcctaccgccttcatttcttggcacaaccaaccgggggctcggaagaggagaagagccgaccagccgggcatattctctcttcctccctccggtgctctctccagcggtccagccgcagcgccctgaaagagggaggcttccactcttctttctccccgagcacccgccgtacgtctcctgcaccttcttccagtttctcccatttcagtttgtccactccctgtcattcctgccgcctcgacctccccgctctggaaggttcagatttagcctgggtgcgtctgcaggttccggttcatggagagatggagcctgggtgccaaagtggtagctctcgcactcctgctgtctgctgcttctcatggaagagagttgcctgtcaagagtagtgaccgcagttttatctacaatcatactcttgcaaagacgcttgtggaatatgcatcagcggtgtatatgacagatttaaccgctctgtttacgtggacatgctcaagatgcaatgacttgactcaaggattcgagatgagatctctaattgttgatgtggagaactgcttgcagatcatagtctgaattcgataattgttgcaatcaggggaactcaagagaacagtgtacagaattggataaaagacttgatatggaagcagcttgatctaagttatccaaacatgccaaatgcaaaggtgcacagtggatttttctcctcgtataacaatacaattttgcgtctagctatcacaagtgctgtgcacaaggcaagaaagtcatatggagatatcaatgtcatagtgacaggccactcgatgggaggagctatggcttctttttgcgcgctcgatcttgctatgaagcttggaggtggcagtgtgcaactcatgacttttgggcagcctcgtgttggcaatgctgcattcgcctcatacttcgccaaatatgtacccaacacaattcgagtgacacacgggcatgatattgtgccacatttgccaccttatttctcctttcttccccagctgacataccaccatttcccaagagaggtatgggtccaggattctgatggcaacacaactgaacggatttgtgacgacagcggtgaagacccagattgttgcaggtgcatctccatgttcggcttgaggattcaggaccatttcacttacctaggagttgatatggaagcggacgactggagcacctgtagaatcatcacagctcaaagggttcagcagttccgactggagctagcgggcaacatcatgatgaccaagcacgatatcgacgtctccatcgttgaacctagtgtacaaaacagattggagcagttctagataggcggaacattcgttttgtccagattcagagaagcaacagcctcttgttaatgcagtggaaattgttcagagacgaaggcgacccttgttttctctattagttcggtcagaatgggatgttctttcagatcaaggaaataaatcgggagtcatctcttgtaacaaagagaatcagagcatgatgtacataaggaaaaatcataggcacggtttatgctggatatggtagggattgcttctgtgtaaatatatgtatacaatgtaaacttgcaatggctatatttgcagcaacataagcaccaagctaactgaaaaatatcagttaaccgaatgaatgaggcgtatctatatatacatgatgtgagcttgcaatagcgtat

SEQ ID NO: 67442 - DNA, 2441 bp, Zea Mays
ctttctccaacttgaaaatggggcctactttatacggaattgggcgatttttaaaaaaacaagacttgttaaatcatcaagtctgtggttgatcccttgttctagcagaagaaaacttcaagatgtggaaatggtattctagctctagaactaggagagggaaatctcagctccatgcttcatggcaggtgaggattgtgaagcctgtgcgcgcccatgttctccacgaaaagacgaactcgttctccttcacgatttcgacagcattgacacgaaaacagttgttaatccctagcctaggtatccatagatccaacccagatgctgatgcgggggtgcaacagtgcaagaacaactctggattcctccggatgatgccatgccaccaatcctcactaaccaattattattatccaacaaatccacgagaaaaggacgtcctttttttctctctgaagagtgggagtgtacccggcggcctggcctaccgccttcatttcttggcacaaccaaccgggggctcggaagaggagaagagccgaccagccgggcatattctctcttcctccctccggtgctctctccagcggtccagccgcagcgccctgaaagagggaggcttccactcttctttctccccgagcacccgccgtacgtctcctgcaccttcttccagtttctcccatttcagtttgtccactccctgtcattcctgccgcctcgacctccccgctctggaaggtcaaatccttcgcccctaagcttttatttctgtttgtatttggttctggaatcgttgcctgctggctgctgctgctgcacattacccccgtattctgtgctccggccgtgggattgccctgctcgctttctttcaaaaaagaaaaggaaaaggagcaattgctctgctcgctttcagtttgtgtggttgacgtctctctctgagtctctgtgcttcagcaggttcagatttagcctgggtgcgtctgcaggttccggttcatggagagatggagcctgggtgccaaagtggtagctctcgcactcctgctgtctgctgcttctcatggaagagagttgcctgtcaagagtagtgaccgcagttttatctacaatcatactcttgcaaagacgcttgtggaatatgcatcagcggtgtatatgacagatttaaccgctctgtttacgtggacatgctcaagatgcaatgacttgactcaaggattcgagatgagatctctaattgttgatgtggagaactgcttgcaggcatttgttggtgtagatcatagtctgaattcgataattgttgcaatcaggggaactcaagagaacagtgtacagaattggataaaagacttgatatggaagcagcttgatctaagttatccaaacatgccaaatgcaaaggtgcacagtggatttttctcctcgtataacaatacaattttgcgtctagctatcacaagtgctgtgcacaaggcaagaaagtcatatggagatatcaatgtcatagtgacaggccactcgatgggaggagctatggcttctttttgcgcgctcgatcttgctatgaagcttggaggtggcagtgtgcaactcatgacttttgggcagcctcgtgttggcaatgctgcattcgcctcatacttcgccaaatatgtacccaacacaattcgagtgacacacgggcatgatattgtgccacatttgccaccttatttctcctttcttccccagctgacataccaccatttcccaagagaggtatgggtccaggattctgatggcaacacaactgaacggatttgtgacgacagcggtgaagacccagattgttgcaggtgcatctccatgttcggcttgaggattcaggaccatttcacttacctaggagttgatatggaagcggacgactggagcacctgtagaatcatcacagctcaaagggttcagcagttccgactggagctagcgggcaacatcatgatgaccaagcacgatatcgacgtctccatcgttgaacctagtgtacaaaacagattggagcagttctagataggcggaacattcgttttgtccagattcagagaagcaacagcctcttgttaatgcagtggaaattgttcagagacgaaggcgacccttgttttctctattagttcggtcagaatgggatgttctttcagatcaaggaaataaatcgggagtcatctcttgtaacaaagagaatcagagcatgatgtacataaggaaaaatcataggcacggtttatgctggatatggtagggattgcttctgtgtaaatatatgtatacaatgtaaacttgcaatggctatatttgcagcaacataagcaccaagctaactgaaaaatatcagttaaccgaatgaatgaggcgtatctatatatacatgatgtgagcttgcaatagcgtat

SEQ ID NO: 67443 - DNA, 2809 bp, Zea Mays
atgtggaaatggtattctagctctagaactaggagagggaaatctcagctccatgcttcatggcaggtgaggattgtgaagcctgtgcgcgcccatgttctccacgaaaagacgaactcgttctccttcacgatttcgacagcattgacacgaaaacagttgttaatccctagcctaggtatccatagatccaacccagatgctgatgcgggggtgcaacagtgcaagaacaactctggattcctccggatgatgccatgccaccaatcctcactaaccaattattattatccaacaaatccacgagaaaaggacgtcctttttttctctctgaagagtgggagtgtacccggcggcctggcctaccgccttcatttcttggcacaaccaaccgggggctcggaagaggagaagagccgaccagccgggcatattctctcttcctccctccggtgctctctccagcggtccagccgcagcgccctgaaagagggaggcttccactcttctttctccccgagcacccgccgtacgtctcctgcaccttcttccagtttctcccatttcagtttgtccactccctgtcattcctgccgcctcgacctccccgctctggaaggtcaaatccttcgcccctaagcttttatttctgtttgtatttggttctggaatcgttgcctgctggctgctgctgctgcacattacccccgtattctgtgctccggccgtgggattgccctgctcgctttctttcaaaaaagaaaaggaaaaggagcaattgctctgctcgctttcagtttgtgtggttgacgtctctctctgagtctctgtgcttcagcaggttcagatttagcctgggtgcgtctgcaggttccggttcatggagagatggagcctgggtgccaaagtggtagctctcgcactcctgctgtctgctgcttctcatggaagaggtagttccgtgcgattctctgttggttgctgggttgctgttttatgtaaattggcaccaaaggggtccccgacagcaagctagcttaatagtaacaaacaagataagtatcgagttttcatcgattgtgctaacatctaggaaaagctctgcgttgtggaggaggggggaagtaggtgacaggtgtgtatcagttgctgccatttgctagttcctgctacaggactttgttgttcatatcgtggtgtcctgtcctgattgctagaaaggaagccattattggtggccctacaaaacaaaacaagttaggaaattgcaaaagtagatggttgatgaaccgtaactgcacagaatcgttacaagttgtttttttaagttgacattgcactcaggattctagtcgctggccgcatccctaatattcagtctgccatattttatttcccttatcacagagttgcctgtcaagagtagtgaccgcagttttatctacaatcatactcttgcaaagacgcttgtggaatatgcatcagcggtaggctacaactttccctaattatctttttgacaggtgtatatgacagatttaaccgctctgtttacgtggacatgctcaagatgcaatgacttgactcaaggattcgagatgagatctctaattgttgatgtggagaactgcttgcaggcatttgttggtgtagatcatagtctgaattcgataattgttgcaatcaggggaactcaagagaacagtgtacagaattggataaaagacttgatatggaagcagcttgatctaagttatccaaacatgccaaatgcaaaggtgcacagtggatttttctcctcgtataacaatacaattttgcgtctagctatcacaagtgctgtgcacaaggcaagaaagtcatatggagatatcaatgtcatagtgacaggccactcgatgggaggagctatggcttctttttgcgcgctcgatcttgctatgaagcttggaggtggcagtgtgcaactcatgacttttgggcagcctcgtgttggcaatgctgcattcgcctcatacttcgccaaatatgtacccaacacaattcgagtgacacacgggcatgatattgtgccacatttgccaccttatttctcctttcttccccagctgacataccaccatttcccaagagaggtatgggtccaggattctgatggcaacacaactgaacggatttgtgacgacagcggtgaagacccagattgttgcaggtgcatctccatgttcggcttgaggattcaggaccatttcacttacctaggagttgatatggaagcggacgactggagcacctgtagaatcatcacagctcaaagggttcagcagttccgactggagctagcgggcaacatcatgatgaccaagcacgatatcgacgtctccatcgttgaacctagtgtacaaaacagattggagcagttctagataggcggaacattcgttttgtccagattcagagaagcaacagcctcttgttaatgcagtggaaattgttcagagacgaaggcgacccttgttttctctattagttcggtcagaatgggatgttctttcagatcaaggaaataaatcgggagtcatctcttgtaacaaagagaatcagagcatgatgtacataaggaaaaatcataggcacggtttatgctggatatggtagggattgcttctgtgtaaatatatgtatacaatgtaaacttgcaatggctatatttgcagcaacataagcaccaagctaactgaaaaatatcagttaaccgaatgaatgaggcgtatctatatatacatgatgtgagcttgcaatagcgtat

SEQ ID NO: 67444 - DNA, 2724 bp, Zea Mays
atgtggaaatggtattctagctctagaactaggagagggaaatctcagctccatgcttcatggcaggtgaggattgtgaagcctgtgcgcgcccatgttctccacgaaaagacgaactcgttctccttcacgatttcgacagcattgacacgaaaacagttgttaatccctagcctaggtatccatagatccaacccagatgctgatgcgggggtgcaacagtgcaagaacaactctggattcctccggatgatgccatgccaccaatcctcactaaccaattattattatccaacaaatccacgagaaaaggacgtcctttttttctctctgaagagtgggagtgtacccggcggcctggcctaccgccttcatttcttggcacaaccaaccgggggctcggaagaggagaagagccgaccagccgggcatattctctcttcctccctccggtgctctctccagcggtccagccgcagcgccctgaaagagggaggcttccactcttctttctccccgagcacccgccgtacgtctcctgcaccttcttccagtttctcccatttcagtttgtccactccctgtcattcctgccgcctcgacctccccgctctggaaggtcaaatccttcgcccctaagcttttatttctgtttgtatttggttctggaatcgttgcctgctggctgctgctgctgcacattacccccgtattctgtgctccggccgtgggattgccctgctcgctttctttcaaaaaagaaaaggaaaaggagcaattgctctgctcgctttcagtttgtgtggttgacgtctctctctgagtctctgtgcttcagcaggttcagatttagcctgggtgcgtctgcaggttccggttcatggagagatggagcctgggtgccaaagtggtagctctcgcactcctgctgtctgctgcttctcatggaagaggtagttccgtgcgattctctgttggttgctgggttgctgttttatgtaaattggcaccaaaggggtccccgacagcaagctagcttaatagtaacaaacaagataagtatcgagttttcatcgattgtgctaacatctaggaaaagctctgcgttgtggaggaggggggaagtaggtgacaggtgtgtatcagttgctgccatttgctagttcctgctacaggactttgttgttcatatcgtggtgtcctgtcctgattgctagaaaggaagccattattggtggccctacaaaacaaaacaagttaggaaattgcaaaagtagatggttgatgaaccgtaactgcacagaatcgttacaagttgtttttttaagttgacattgcactcaggattctagtcgctggccgcatccctaatattcagtctgccatattttatttcccttatcacagagttgcctgtcaagagtagtgaccgcagttttatctacaatcatactcttgcaaagacgcttgtggaatatgcatcagcggtgtatatgacagatttaaccgctctgtttacgtggacatgctcaagatgcaatgacttgactcaaggattcgagatgagatctctaattgttgatgtggagaactgcttgcaggcatttgttggtgtagatcatagtctgaattcgataattgttgcaatcaggggaactcaagagaacagtgtacagaattggataaaagacttgatatggaagcagcttgatctaagttatccaaacatgccaaatgcaaagctatcacaagtgctgtgcacaaggcaagaaagtcatatggagatatcaatgtcatagtgacaggccactcgatgggaggagctatggcttctttttgcgcgctcgatcttgctatgaagcttggaggtggcagtgtgcaactcatgacttttgggcagcctcgtgttggcaatgctgcattcgcctcatacttcgccaaatatgtacccaacacaattcgagtgacacacgggcatgatattgtgccacatttgccaccttatttctcctttcttccccagctgacataccaccatttcccaagagaggtatgggtccaggattctgatggcaacacaactgaacggatttgtgacgacagcggtgaagacccagattgttgcaggtgcatctccatgttcggcttgaggattcaggaccatttcacttacctaggagttgatatggaagcggacgactggagcacctgtagaatcatcacagctcaaagggttcagcagttccgactggagctagcgggcaacatcatgatgaccaagcacgatatcgacgtctccatcgttgaacctagtgtacaaaacagattggagcagttctagataggcggaacattcgttttgtccagattcagagaagcaacagcctcttgttaatgcagtggaaattgttcagagacgaaggcgacccttgttttctctattagttcggtcagaatgggatgttctttcagatcaaggaaataaatcgggagtcatctcttgtaacaaagagaatcagagcatgatgtacataaggaaaaatcataggcacggtttatgctggatatggtagggattgcttctgtgtaaatatatgtatacaatgtaaacttgcaatggctatatttgcagcaacataagcaccaagctaactgaaaaatatcagttaaccgaatgaatgaggcgtatctatatatacatgatgtgagcttgcaatagcgtat

SEQ ID NO: 67445 - DNA, 2862 bp, Zea Mays
atgtggaaatggtattctagctctagaactaggagagggaaatctcagctccatgcttcatggcaggtgaggattgtgaagcctgtgcgcgcccatgttctccacgaaaagacgaactcgttctccttcacgatttcgacagcattgacacgaaaacagttgttaatccctagcctaggtatccatagatccaacccagatgctgatgcgggggtgcaacagtgcaagaacaactctggattcctccggatgatgccatgccaccaatcctcactaaccaattattattatccaacaaatccacgagaaaaggacgtcctttttttctctctgaagagtgggagtgtacccggcggcctggcctaccgccttcatttcttggcacaaccaaccgggggctcggaagaggagaagagccgaccagccgggcatattctctcttcctccctccggtgctctctccagcggtccagccgcagcgccctgaaagagggaggcttccactcttctttctccccgagcacccgccgtacgtctcctgcaccttcttccagtttctcccatttcagtttgtccactccctgtcattcctgccgcctcgacctccccgctctggaaggtcaaatccttcgcccctaagcttttatttctgtttgtatttggttctggaatcgttgcctgctggctgctgctgctgcacattacccccgtattctgtgctccggccgtgggattgccctgctcgctttctttcaaaaaagaaaaggaaaaggagcaattgctctgctcgctttcagtttgtgtggttgacgtctctctctgagtctctgtgcttcagcaggttcagatttagcctgggtgcgtctgcaggttccggttcatggagagatggagcctgggtgccaaagtggtagctctcgcactcctgctgtctgctgcttctcatggaagaggtagttccgtgcgattctctgttggttgctgggttgctgttttatgtaaattggcaccaaaggggtccccgacagcaagctagcttaatagtaacaaacaagataagtatcgagttttcatcgattgtgctaacatctaggaaaagctctgcgttgtggaggaggggggaagtaggtgacaggtgtgtatcagttgctgccatttgctagttcctgctacaggactttgttgttcatatcgtggtgtcctgtcctgattgctagaaaggaagccattattggtggccctacaaaacaaaacaagttaggaaattgcaaaagtagatggttgatgaaccgtaactgcacagaatcgttacaagttgtttttttaagttgacattgcactcaggattctagtcgctggccgcatccctaatattcagtctgccatattttatttcccttatcacagagttgcctgtcaagagtagtgaccgcagttttatctacaatcatactcttgcaaagacgcttgtggaatatgcatcagcggtaggctacaactttccctaattatctttttgacaggtgtatatgacagatttaaccgctctgtttacgtggacatgctcaagatgcaatgacttgactcaaggattcgagatgagatctctaattgttgatgtggagaactgcttgcaggtacctatgcctcggcattttggattaacttatcataatttttcagtgaagttgcatttgttggtgtagatcatagtctgaattcgataattgttgcaatcaggggaactcaagagaacagtgtacagaattggataaaagacttgatatggaagcagcttgatctaagttatccaaacatgccaaatgcaaaggtgcacagtggatttttctcctcgtataacaatacaattttgcgtctagctatcacaagtgctgtgcacaaggcaagaaagtcatatggagatatcaatgtcatagtgacaggccactcgatgggaggagctatggcttctttttgcgcgctcgatcttgctatgaagcttggaggtggcagtgtgcaactcatgacttttgggcagcctcgtgttggcaatgctgcattcgcctcatacttcgccaaatatgtacccaacacaattcgagtgacacacgggcatgatattgtgccacatttgccaccttatttctcctttcttccccagctgacataccaccatttcccaagagaggtatgggtccaggattctgatggcaacacaactgaacggatttgtgacgacagcggtgaagacccagattgttgcaggtgcatctccatgttcggcttgaggattcaggaccatttcacttacctaggagttgatatggaagcggacgactggagcacctgtagaatcatcacagctcaaagggttcagcagttccgactggagctagcgggcaacatcatgatgaccaagcacgatatcgacgtctccatcgttgaacctagtgtacaaaacagattggagcagttctagataggcggaacattcgttttgtccagattcagagaagcaacagcctcttgttaatgcagtggaaattgttcagagacgaaggcgacccttgttttctctattagttcggtcagaatgggatgttctttcagatcaaggaaataaatcgggagtcatctcttgtaacaaagagaatcagagcatgatgtacataaggaaaaatcataggcacggtttatgctggatatggtagggattgcttctgtgtaaatatatgtatacaatgtaaacttgcaatggctatatttgcagcaacataagcaccaagctaactgaaaaatatcagttaaccgaatgaatgaggcgtatctatatatacatgatgtgagcttgcaatagcgtat

SEQ ID NO: 67446 - DNA, 2788 bp, Zea Mays
atgtggaaatggtattctagctctagaactaggagagggaaatctcagctccatgcttcatggcaggtgaggattgtgaagcctgtgcgcgcccatgttctccacgaaaagacgaactcgttctccttcacgatttcgacagcattgacacgaaaacagttgttaatccctagcctaggtatccatagatccaacccagatgctgatgcgggggtgcaacagtgcaagaacaactctggattcctccggatgatgccatgccaccaatcctcactaaccaattattattatccaacaaatccacgagaaaaggacgtcctttttttctctctgaagagtgggagtgtacccggcggcctggcctaccgccttcatttcttggcacaaccaaccgggggctcggaagaggagaagagccgaccagccgggcatattctctcttcctccctccggtgctctctccagcggtccagccgcagcgccctgaaagagggaggcttccactcttctttctccccgagcacccgccgtacgtctcctgcaccttcttccagtttctcccatttcagtttgtccactccctgtcattcctgccgcctcgacctccccgctctggaaggtcaaatccttcgcccctaagcttttatttctgtttgtatttggttctggaatcgttgcctgctggctgctgctgctgcacattacccccgtattctgtgctccggccgtgggattgccctgctcgctttctttcaaaaaagaaaaggaaaaggagcaattgctctgctcgctttcagtttgtgtggttgacgtctctctctgagtctctgtgcttcagcaggttcagatttagcctgggtgcgtctgcaggttccggttcatggagagatggagcctgggtgccaaagtggtagctctcgcactcctgctgtctgctgcttctcatggaagaggtagttccgtgcgattctctgttggttgctgggttgctgttttatgtaaattggcaccaaaggggtccccgacagcaagctagcttaatagtaacaaacaagataagtatcgagttttcatcgattgtgctaacatctaggaaaagctctgcgttgtggaggaggggggaagtaggtgacaggtgtgtatcagttgctgccatttgctagttcctgctacaggactttgttgttcatatcgtggtgtcctgtcctgattgctagaaaggaagccattattggtggccctacaaaacaaaacaagttaggaaattgcaaaagtagatggttgatgaaccgtaactgcacagaatcgttacaagttgtttttttaagttgacattgcactcaggattctagtcgctggccgcatccctaatattcagtctgccatattttatttcccttatcacagagttgcctgtcaagagtagtgaccgcagttttatctacaatcatactcttgcaaagacgcttgtggaatatgcatcagcggtgtatatgacagatttaaccgctctgtttacgtggacatgctcaagatgcaatgacttgactcaaggattcgagatgagatctctaattgttgatgtggagaactgcttgcaggcatttgttggtgtagatcatagtctgaattcgataattgttgcaatcaggggaactcaagagaacagtgtacagaattggataaaagacttgatatggaagcagcttgatctaagttatccaaacatgccaaatgcaaaggtgcacagtggatttttctcctcgtataacaatacaattttgcgtctagctatcacaagtgctgtgcacaaggcaagaaagtcatatggagatatcaatgtcatagtgacaggccactcgatgggaggagctatggcttctttttgcgcgctcgatcttgctaatatttctccatagatgaagcttggaggtggcagtgtgcaactcatgacttttgggcagcctcgtgttggcaatgctgcattcgcctcatacttcgccaaatatgtacccaacacaattcgagtgacacacgggcatgatattgtgccacatttgccaccttatttctcctttcttccccagctgacataccaccatttcccaagagaggtatgggtccaggattctgatggcaacacaactgaacggatttgtgacgacagcggtgaagacccagattgttgcaggtgcatctccatgttcggcttgaggattcaggaccatttcacttacctaggagttgatatggaagcggacgactggagcacctgtagaatcatcacagctcaaagggttcagcagttccgactggagctagcgggcaacatcatgatgaccaagcacgatatcgacgtctccatcgttgaacctagtgtacaaaacagattggagcagttctagataggcggaacattcgttttgtccagattcagagaagcaacagcctcttgttaatgcagtggaaattgttcagagacgaaggcgacccttgttttctctattagttcggtcagaatgggatgttctttcagatcaaggaaataaatcgggagtcatctcttgtaacaaagagaatcagagcatgatgtacataaggaaaaatcataggcacggtttatgctggatatggtagggattgcttctgtgtaaatatatgtatacaatgtaaacttgcaatggctatatttgcagcaacataagcaccaagctaactgaaaaatatcagttaaccgaatgaatgaggcgtatctatatatacatgatgtgagcttgcaatagcgtat

SEQ ID NO: 67447 - DNA, 2339 bp, Zea Mays
atgtggaaatggtattctagctctagaactaggagagggaaatctcagctccatgcttcatggcaggtgaggattgtgaagcctgtgcgcgcccatgttctccacgaaaagacgaactcgttctccttcacgatttcgacagcattgacacgaaaacagttgttaatccctagcctaggtatccatagatccaacccagatgctgatgcgggggtgcaacagtgcaagaacaactctggattcctccggatgatgccatgccaccaatcctcactaaccaattattattatccaacaaatccacgagaaaaggacgtcctttttttctctctgaagagtgggagtgtacccggcggcctggcctaccgccttcatttcttggcacaaccaaccgggggctcggaagaggagaagagccgaccagccgggcatattctctcttcctccctccggtgctctctccagcggtccagccgcagcgccctgaaagagggaggcttccactcttctttctccccgagcacccgccgttcagatttagcctgggtgcgtctgcaggttccggttcatggagagatggagcctgggtgccaaagtggtagctctcgcactcctgctgtctgctgcttctcatggaagaggtagttccgtgcgattctctgttggttgctgggttgctgttttatgtaaattggcaccaaaggggtccccgacagcaagctagcttaatagtaacaaacaagataagtatcgagttttcatcgattgtgctaacatctaggaaaagctctgcgttgtggaggaggggggaagtaggtgacaggtgtgtatcagttgctgccatttgctagttcctgctacaggactttgttgttcatatcgtggtgtcctgtcctgattgctagaaaggaagccattattggtggccctacaaaacaaaacaagttaggaaattgcaaaagtagatggttgatgaaccgtaactgcacagaatcgttacaagttgtttttttaagttgacattgcactcaggattctagtcgctggccgcatccctaatattcagtctgccatattttatttcccttatcacagagttgcctgtcaagagtagtgaccgcagttttatctacaatcatactcttgcaaagacgcttgtggaatatgcatcagcggtgtatatgacagatttaaccgctctgtttacgtggacatgctcaagatgcaatgacttgactcaaggattcgagatgagatctctaattgttgatgtggagaactgcttgcaggcatttgttggtgtagatcatagtctgaattcgataattgttgcaatcaggggaactcaagagaacagctatcacaagtgctgtgcacaaggcaagaaagtcatatggagatatcaatgtcatagtgacaggccactcgatgggaggagctatggcttctttttgcgcgctcgatcttgctatgaagcttggaggtggcagtgtgcaactcatgacttttgggcagcctcgtgttggcaatgctgcattcgcctcatacttcgccaaatatgtacccaacacaattcgagtgacacacgggcatgatattgtgccacatttgccaccttatttctcctttcttccccagctgacataccaccatttcccaagagaggtatgggtccaggattctgatggcaacacaactgaacggatttgtgacgacagcggtgaagacccagattgttgcaggtgcatctccatgttcggcttgaggattcaggaccatttcacttacctaggagttgatatggaagcggacgactggagcacctgtagaatcatcacagctcaaagggttcagcagttccgactggagctagcgggcaacatcatgatgaccaagcacgatatcgacgtctccatcgttgaacctagtgtacaaaacagattggagcagttctagataggcggaacattcgttttgtccagattcagagaagcaacagcctcttgttaatgcagtggaaattgttcagagacgaaggcgacccttgttttctctattagttcggtcagaatgggatgttctttcagatcaaggaaataaatcgggagtcatctcttgtaacaaagagaatcagagcatgatgtacataaggaaaaatcataggcacggtttatgctggatatggtagggattgcttctgtgtaaatatatgtatacaatgtaaacttgcaatggctatatttgcagcaacataagcaccaagctaactgaaaaatatcagttaaccgaatgaatgaggcgtatctatatatacatgatgtgagcttgcaatagcgtat

SEQ ID NO: 67448 - DNA, 2097 bp, Zea Mays
atgtggaaatggtattctagctctagaactaggagagggaaatctcagctccatgcttcatggcaggtgaggattgtgaagcctgtgcgcgcccatgttctccacgaaaagacgaactcgttctccttcacgatttcgacagcattgacacgaaaacagttgttaatccctagcctaggtatccatagatccaacccagatgctgatgcgggggtgcaacagtgcaagaacaactctggattcctccggatgatgccatgccaccaatcctcactaaccaattattattatccaacaaatccacgagaaaaggacgtcctttttttctctctgaagagtgggagtgtacccggcggcctggcctaccgccttcatttcttggcacaaccaaccgggggctcggaagaggagaagagccgaccagccgggcatattctctcttcctccctccggtgctctctccagcggtccagccgcagcgccctgaaagagggaggcttccactcttctttctccccgagcacccgccgtacgtctcctgcaccttcttccagtttctcccatttcagtttgtccactccctgtcattcctgccgcctcgacctccccgctctggaaggttcagatttagcctgggtgcgtctgcaggttccggttcatggagagatggagcctgggtgccaaagtggtagctctcgcactcctgctgtctgctgcttctcatggaagagagttgcctgtcaagagtagtgaccgcagttttatctacaatcatactcttgcaaagacgcttgtggaatatgcatcagcggtgtatatgacagatttaaccgctctgtttacgtggacatgctcaagatgcaatgacttgactcaaggattcgagatgagatctctaattgttgatgtggagaactgcttgcaggcatttgttggtgtagatcatagtctgaattcgataattgttgcaatcaggggaactcaagagaacagtgtacagaattggataaaagacttgatatggaagcagcttgatctaagttatccaaacatgccaaatgcaaaggtgcacagtggatttttctcctcgtataacaatacaattttgcgtctagctatcacaagtgctgtgcacaaggcaagaaagtcatatggagatatcaatgtcatagtgacaggccactcgatgggaggagctatggcttctttttgcgcgctcgatcttgctatgaagcttggaggtggcagtgtgcaactcatgacttttgggcagcctcgtgttggcaatgctgcattcgcctcatacttcgccaaatatgtacccaacacaattcgagtgacacacgggcatgatattgtgccacatttgccaccttatttctcctttcttccccagctgacataccaccatttcccaagagaggtatgggtccaggattctgatggcaacacaactgaacggatttgtgacgacagcggtgaagacccagattgttgcaggtgcatctccatgttcggcttgaggattcaggaccatttcacttacctaggagttgatatggaagcggacgactggagcacctgtagaatcatcacagctcaaagggttcagcagttccgactggagctagcgggcaacatcatgatgaccaagcacgatatcgacgtctccatcgttgaacctagtgtacaaaacagattggagcagttctagataggcggaacattcgttttgtccagattcagagaagcaacagcctcttgttaatgcagtggaaattgttcagagacgaaggcgacccttgttttctctattagttcggtcagaatgggatgttctttcagatcaaggaaataaatcgggagtcatctcttgtaacaaagagaatcagagcatgatgtacataaggaaaaatcataggcacggtttatgctggatatggtagggattgcttctgtgtaaatatatgtatacaatgtaaacttgcaatggctatatttgcagcaacataagcaccaagctaactgaaaaatatcagttaaccgaatgaatgaggcgtatctatatatacatgatgtgagcttgcaatagcgtat

SEQ ID NO: 67449 - DNA, 2551 bp, Zea Mays
atgtggaaatggtattctagctctagaactaggagagggaaatctcagctccatgcttcatggcaggtgaggattgtgaagcctgtgcgcgcccatgttctccacgaaaagacgaactcgttctccttcacgatttcgacagcattgacacgaaaacagttgttaatccctagcctaggtatccatagatccaacccagatgctgatgcgggggtgcaacagtgcaagaacaactctggattcctccggatgatgccatgccaccaatcctcactaaccaattattattatccaacaaatccacgagaaaaggacgtcctttttttctctctgaagagtgggagtgtacccggcggcctggcctaccgccttcatttcttggcacaaccaaccgggggctcggaagaggagaagagccgaccagccgggcatattctctcttcctccctccggtgctctctccagcggtccagccgcagcgccctgaaagagggaggcttccactcttctttctccccgagcacccgccgtacgtctcctgcaccttcttccagtttctcccatttcagtttgtccactccctgtcattcctgccgcctcgacctccccgctctggaaggttcagatttagcctgggtgcgtctgcaggttccggttcatggagagatggagcctgggtgccaaagtggtagctctcgcactcctgctgtctgctgcttctcatggaagaggtagttccgtgcgattctctgttggttgctgggttgctgttttatgtaaattggcaccaaaggggtccccgacagcaagctagcttaatagtaacaaacaagataagtatcgagttttcatcgattgtgctaacatctaggaaaagctctgcgttgtggaggaggggggaagtaggtgacaggtgtgtatcagttgctgccatttgctagttcctgctacaggactttgttgttcatatcgtggtgtcctgtcctgattgctagaaaggaagccattattggtggccctacaaaacaaaacaagttaggaaattgcaaaagtagatggttgatgaaccgtaactgcacagaatcgttacaagttgtttttttaagttgacattgcactcaggattctagtcgctggccgcatccctaatattcagtctgccatattttatttcccttatcacagagttgcctgtcaagagtagtgaccgcagttttatctacaatcatactcttgcaaagacgcttgtggaatatgcatcagcggtgtatatgacagatttaaccgctctgtttacgtggacatgctcaagatgcaatgacttgactcaaggattcgagatgagatctctaattgttgatgtggagaactgcttgcaggcatttgttggtgtagatcatagtctgaattcgataattgttgcaatcaggggaactcaagagaacagtgtacagaattggataaaagacttgatatggaagcagcttgatctaagttatccaaacatgccaaatgcaaaggtgcacagtggatttttctcctcgtataacaatacaattttgcgtctagctatcacaagtgctgtgcacaaggcaagaaagtcatatggagatatcaatgtcatagtgacaggccactcgatgggaggagctatggcttctttttgcgcgctcgatcttgctatgaagcttggaggtggcagtgtgcaactcatgacttttgggcagcctcgtgttggcaatgctgcattcgcctcatacttcgccaaatatgtacccaacacaattcgagtgacacacgggcatgatattgtgccacatttgccaccttatttctcctttcttccccagctgacataccaccatttcccaagagaggtatgggtccaggattctgatggcaacacaactgaacggatttgtgacgacagcggtgaagacccagattgttgcaggtgcatctccatgttcggcttgaggattcaggaccatttcacttacctaggagttgatatggaagcggacgactggagcacctgtagaatcatcacagctcaaagggttcagcagttccgactggagctagcgggcaacatcatgatgaccaagcacgatatcgacgtctccatcgttgaacctagtgtacaaaacagattggagcagttctagataggcggaacattcgttttgtccagattcagagaagcaacagcctcttgttaatgcagtggaaattgttcagagacgaaggcgacccttgttttctctattagttcggtcagaatgggatgttctttcagatcaaggaaataaatcgggagtcatctcttgtaacaaagagaatcagagcatgatgtacataaggaaaaatcataggcacggtttatgctggatatggtagggattgcttctgtgtaaatatatgtatacaatgtaaacttgcaatggctatatttgcagcaacataagcaccaagctaactgaaaaatatcagttaaccgaatgaatgaggcgtatctatatatacatgatgtgagcttgcaatagcgtat

SEQ ID NO: 67450 - DNA, 2318 bp, Zea Mays
atgtggaaatggtattctagctctagaactaggagagggaaatctcagctccatgcttcatggcaggtgaggattgtgaagcctgtgcgcgcccatgttctccacgaaaagacgaactcgttctccttcacgatttcgacagcattgacacgaaaacagttgttaatccctagcctaggtatccatagatccaacccagatgctgatgcgggggtgcaacagtgcaagaacaactctggattcctccggatgatgccatgccaccaatcctcactaaccaattattattatccaacaaatccacgagaaaaggacgtcctttttttctctctgaagagtgggagtgtacccggcggcctggcctaccgccttcatttcttggcacaaccaaccgggggctcggaagaggagaagagccgaccagccgggcatattctctcttcctccctccggtgctctctccagcggtccagccgcagcgccctgaaagagggaggcttccactcttctttctccccgagcacccgccgtacgtctcctgcaccttcttccagtttctcccatttcagtttgtccactccctgtcattcctgccgcctcgacctccccgctctggaaggtcaaatccttcgcccctaagcttttatttctgtttgtatttggttctggaatcgttgcctgctggctgctgctgctgcacattacccccgtattctgtgctccggccgtgggattgccctgctcgctttctttcaaaaaagaaaaggaaaaggagcaattgctctgctcgctttcagtttgtgtggttgacgtctctctctgagtctctgtgcttcagcaggttcagatttagcctgggtgcgtctgcaggttccggttcatggagagatggagcctgggtgccaaagtggtagctctcgcactcctgctgtctgctgcttctcatggaagagagttgcctgtcaagagtagtgaccgcagttttatctacaatcatactcttgcaaagacgcttgtggaatatgcatcagcggtgtatatgacagatttaaccgctctgtttacgtggacatgctcaagatgcaatgacttgactcaaggattcgagatgagatctctaattgttgatgtggagaactgcttgcagatcatagtctgaattcgataattgttgcaatcaggggaactcaagagaacagtgtacagaattggataaaagacttgatatggaagcagcttgatctaagttatccaaacatgccaaatgcaaaggtgcacagtggatttttctcctcgtataacaatacaattttgcgtctagctatcacaagtgctgtgcacaaggcaagaaagtcatatggagatatcaatgtcatagtgacaggccactcgatgggaggagctatggcttctttttgcgcgctcgatcttgctaatatttctccatagatgaagcttggaggtggcagtgtgcaactcatgacttttgggcagcctcgtgttggcaatgctgcattcgcctcatacttcgccaaatatgtacccaacacaattcgagtgacacacgggcatgatattgtgccacatttgccaccttatttctcctttcttccccagctgacataccaccatttcccaagagaggtatgggtccaggattctgatggcaacacaactgaacggatttgtgacgacagcggtgaagacccagattgttgcaggtgcatctccatgttcggcttgaggattcaggaccatttcacttacctaggagttgatatggaagcggacgactggagcacctgtagaatcatcacagctcaaagggttcagcagttccgactggagctagcgggcaacatcatgatgaccaagcacgatatcgacgtctccatcgttgaacctagtgtacaaaacagattggagcagttctagataggcggaacattcgttttgtccagattcagagaagcaacagcctcttgttaatgcagtggaaattgttcagagacgaaggcgacccttgttttctctattagttcggtcagaatgggatgttctttcagatcaaggaaataaatcgggagtcatctcttgtaacaaagagaatcagagcatgatgtacataaggaaaaatcataggcacggtttatgctggatatggtagggattgcttctgtgtaaatatatgtatacaatgtaaacttgcaatggctatatttgcagcaacataagcaccaagctaactgaaaaatatcagttaaccgaatgaatgaggcgtatctatatatacatgatgtgagcttgcaatagcgtat

SEQ ID NO: 67451 - DNA, 2285 bp, Zea Mays
atgtggaaatggtattctagctctagaactaggagagggaaatctcagctccatgcttcatggcaggtgaggattgtgaagcctgtgcgcgcccatgttctccacgaaaagacgaactcgttctccttcacgatttcgacagcattgacacgaaaacagttgttaatccctagcctaggtatccatagatccaacccagatgctgatgcgggggtgcaacagtgcaagaacaactctggattcctccggatgatgccatgccaccaatcctcactaaccaattattattatccaacaaatccacgagaaaaggacgtcctttttttctctctgaagagtgggagtgtacccggcggcctggcctaccgccttcatttcttggcacaaccaaccgggggctcggaagaggagaagagccgaccagccgggcatattctctcttcctccctccggtgctctctccagcggtccagccgcagcgccctgaaagagggaggcttccactcttctttctccccgagcacccgccgtacgtctcctgcaccttcttccagtttctcccatttcagtttgtccactccctgtcattcctgccgcctcgacctccccgctctggaaggtcaaatccttcgcccctaagcttttatttctgtttgtatttggttctggaatcgttgcctgctggctgctgctgctgcacattacccccgtattctgtgctccggccgtgggattgccctgctcgctttctttcaaaaaagaaaaggaaaaggagcaattgctctgctcgctttcagtttgtgtggttgacgtctctctctgagtctctgtgcttcagcaggttcagatttagcctgggtgcgtctgcaggttccggttcatggagagatggagcctgggtgccaaagtggtagctctcgcactcctgctgtctgctgcttctcatggaagagagttgcctgtcaagagtagtgaccgcagttttatctacaatcatactcttgcaaagacgcttgtggaatatgcatcagcggtgtatatgacagatttaaccgctctgtttacgtggacatgctcaagatgcaatgacttgactcaaggattcgagatgagatctctaattgttgatgtggagaactgcttgcaggcatttgttggtgtagatcatagtctgaattcgataattgttgcaatcaggggaactcaagagaacagtgtacagaattggataaaagacttgatatggaagcagcttgatctaagttatccaaacatgccaaatgcaaagctatcacaagtgctgtgcacaaggcaagaaagtcatatggagatatcaatgtcatagtgacaggccactcgatgggaggagctatggcttctttttgcgcgctcgatcttgctaatatttctccatagatgaagcttggaggtggcagtgtgcaactcatgacttttgggcagcctcgtgttggcaatgctgcattcgcctcatacttcgccaaatatgtacccaacacaattcgagtgacacacgggcatgatattgtgccacatttgccaccttatttctcctttcttccccagctgacataccaccatttcccaagagaggtatgggtccaggattctgatggcaacacaactgaacggatttgtgacgacagcggtgaagacccagattgttgcaggtgcatctccatgttcggcttgaggattcaggaccatttcacttacctaggagttgatatggaagcggacgactggagcacctgtagaatcatcacagctcaaagggttcagcagttccgactggagctagcgggcaacatcatgatgaccaagcacgatatcgacgtctccatcgttgaacctagtgtacaaaacagattggagcagttctagataggcggaacattcgttttgtccagattcagagaagcaacagcctcttgttaatgcagtggaaattgttcagagacgaaggcgacccttgttttctctattagttcggtcagaatgggatgttctttcagatcaaggaaataaatcgggagtcatctcttgtaacaaagagaatcagagcatgatgtacataaggaaaaatcataggcacggtttatgctggatatggtagggattgcttctgtgtaaatatatgtatacaatgtaaacttgcaatggctatatttgcagcaacataagcaccaagctaactgaaaaatatcagttaaccgaatgaatgaggcgtatctatatatacatgatgtgagcttgcaatagcgtat

SEQ ID NO: 67452 - DNA, 5382 bp, Zea Mays
gagcatcgtctcgctcgactactacatggctccgcccctcccgggcttcgccttctcccgcagccctttcctcggagaggaggtggaggaagtgccggtggtaaggatctacggctccacccccgcggggcagaagacttgcctccacatccaccgggtgctgccatatttttatataccttgttcggaggagctgctttgtaatctagaaaaaggtgattcatatataactggtctcttgagtgaccttgagaaagctttgcaggctcgcggtccatcaaaaaggaagcatgtgcatggatgtaaccttgttagagcaaagaagttgtacggctaccattcgtccgaggagctttttatgaagatctatctatattaccctcatgaagtttctcgagctgcttcccttgttttgagtggtgctgtttctaatagatcatttcagccttatgaatcccacattccatatcttcttcactttttggttgactacaacttgtatggaatggggcacatacatgtcaaaaacttcaagtttcgtcctccattgccagttgattttcatcctaagtcatctcttcgcaggaaggtatcctaaatgagaaatataagatgtacacttctctttctcaaacaacagaagatacaaaaatggttcagtcacttgtagcagtttgggaggaacttgaacgattaagactgttggaggaaacaaaatatgctgatctgggtagacctttaagggaagaagttcttaaagattttcttcatggtattaagtatgagagtgccctttctgtgttgttttcacaagaggggccacatcacaaagtttccaccatagaagagtctgaaaggctagaaaggtgcttaaaatcgttgactgatattattgggactgttacattctcacaggataactactgtggtaatattgatgttggtaattctgctgatgtgcaaaacgacaaacccgatgcaagtctttgctcagggtcattagaacaaaacatgcagattatatctccagagagaaacagtgaatatcctgtgtcttcatctgtacaccaaagaacactatctcagttatctgataaaggtgaaaagcatctggatgctgaggctcttggacttttaagctggctggcctcttcacaagctgcagaggaatcaactgatgatgaattaactaatgaagtcatcctcagccctttgtttgccaataagtccattgaagttgctgtggagtctgctcaattggattttgatagcgcttctcagcaggagtgtcaggatattcttgattcagttgaccccattagggcagtagaagaaccaaacatacatacatcttacctcgattctgtgaagtccaattctgctgcttctctgggcaattctattcctcagcttgatgggtcatctgatgagaacccaaaagtctcccaggaatatgatagaagtaaggtcactaggaaatcagtagtatcggcaagttacacatctactaagaagccttcaaaatcagccagtaagtattcaggaactgaacatctctggggttctttgcctctttcttccagaaaaaagaggcaacatggagatgctgatgattcatgcagtgcaatgtcaccgcagaaggatttaagtgcatctaagaagagtacaattgataaggactatcatgataccataggcagcactgattcagaatcttctagttttttaggtgtacatgattcagtttgtcattctgtgagggatttgatgaggcggaggagatcttttcggcgtgaacagttggagtttggttgttctggagctgcaacatgcaccatggataaagagagcgaaactgtgaattctgggggattggaatttcatgatttcacaagtgacatcccaaacttagcactgacacggatggcttttgttcagaagcctccattgaaggatgatgcatgttctggtttggagagcccttcagattgtgagcaacgtggatctgaaaaatcgggattagctgatcttctaccatttttcaatcagaatatggaggagaataagcagaatgaatcatttcaagatatggaaagcacaggggatgtattgggtgtcccaactcattttcaaaatgatggatcagccctatatttgctgacacatgcactttcgccaccatctgcaggagctgtgggccattggctaacccaacaatctagttccagtattttctcgggttacaccaactatgatggagtcgcagctgataaggaagaggcacacagttctactttatcacggaattctcctaccagatttaccaaggagaattctgcaaataaaatgcatggagatgtgatgggatcggctctatcttacaaagaaagtaaacatttggacgaatggcatgatttttcccagatatcagctggaaatgagaaggataggctcacacctctaagtcaaattggatttcgtgaccctgctagtataggtggcgggcaacaactgactatacttagcgtggaggttttaacagaaagcagaggagagctgcgtcctgatccacggtttgatgccattaatgctgtgtctttggccatcgaagatgatgctgacaatactgttgatgttcatgtgtttatacgtggcaacaatgtcaaatcacataggagaaatctggatggtattgctggctgtaatataaatgtcttccctgaagaaaaggacgttttgaacaatcttattagtgcaatatgttcaattgatcctgatatcctagtcggatgggagattcagttaggatctttaggatttcttgccgaaagagctgcttatctgggtataggcttactgaaaagaatttcaagaacaccacatgagttgaatcatccacctaagatcccagttgataactctagtcaggtgctttctgaaacatcttctgcggatgatattattgatgatgtcagtgagaatgattggagccatactcatgcgagcggtatacatgttggtggaagaattgtgcttaatttatggcgtctcatgcgtgcagaagttaagcttaataattactcccttgaagctgtagctgatgaagtactgaggcgaaagataccactgataccaagcaggatattgaaccgatggtttgcaacaggtcctggacgaggaagacaccgatgcatagaatacattagcaatagagctagaatcaaccttgaaataatgaatcaaatggacctggtgaatcgaacatctgaacttgctcgtgtatttggtattgattttttttctgttctttctcgggggtctcagtatcgtgttgaatctatgctcctgagattggctcatacacagaactaccttgcaatttctcctggaaatcaacaggttgcttctcagccagccatggagtgtttgccgcttgtaatggaaccagagtcggccttctaccctgatccagttgttgtgttggattttcagtccctctatccttcgatgataatagcatataacctttgttattctacatgcttgggaaaagttttcccatcaaagtcagatgtacttggtgtcagctcatattcagcagatccacatacacttgtagatctgaaaaatcagctgctgcttactccaaatggggtcctgtatgttcaacctgagataagaaaaggtgtacttcctcgccttctagaggagatattgtcaacaagaattatggtgaaacaagcaatgaaaaagttgagtccatcacagcaagttcttcacaggatattcaatgcacggcagcttgctttgaagctgatagctaatgtcacgtatggttacacagctgctggattcagtggtcgaatgccttgtgcagagcttgcagacagcattgttcagtgtggccgtagaacactcgaaacagcaatatcatttgtcaaccagcatcctttgtggaaagctagggttgtgtatggtgatactgacagtatgtttgttctcctaaaagggcgttctagggaagaagcattcaggatagggaaggagatcgcctcatcaataactgcaatgaatcctgatccagtcacattaaagtttgagaaagtgtaccagccatgcttccttcttacaaagaagagatatgttggctatagctacgagagtcctgaacagaatgagcctgtctttgatgcgaaggggatagaaacagttcggagggacacatgcccagcagttgcaaagattttggaacggtctatcagaataatgtttgaagaacaggatttgaccaaagtcaggacatatttggagcgtcagtggacacacatattatcaggaaaagtctctattctagatttcatttttgcgaaggaggtccgtttaggcacttatagtgcaagggcttccacgctgccccctgcagcaattgttgcaacaaaagctatgttgtctgacccaagggcagagcctcggtatgcagagagagtgccatatgttgtaatccatggggaaccaggagctcgtcttgccgacatggttattgatccttatggtctgctagaagttggctccccttatagattaaatgaacaatattacataaccaagcagattattcctgcattgcagcgtgtttttggacttcttggtgctgacctgaacaagtggtttaatgagatgcctcgccccatacgatcaactcttgcgaaacgccaatttgctgctgctcatggttcattctctcgtgatggcagtttcatccgattaggattgaataataaaacctcagccaaaggaggcagaatagatacatactacatgtcaagccactgctcaatttgtggtgatatgattcaaggatcagagtccttctgcaacaattgcttgaaaagcgaagctgttgttgccacagtagtcgctggcagaacttcaaagttggagcgagaaatccaacatcttgctgctatatgtggccattgtggcggtgcagactggattgttgaaagtggagtcaagtgtatttcccttgcatgcccagtcttctatgaacggaggaaagttcagagggagctggtagtcgtctcagagtcggcaggagaagcagggtattaccctttctgctgcgctgaactcttttgagaacatttttttggggctgcgtttctctgtccataccgtgtaaattgtggaatctgtaacctttacatcacacgtgtgtatagttgttgtatgtaacactgaagaacatgtactggtgaaagaatacatacaatgtataccgtgtcgctcgctgttcagttaagggtttgttcgattagctcccaatccacatggattaagtgagattaggtgggtttaaatcccagctaagtcaaacctttt

SEQ ID NO: 67453 - DNA, 5550 bp, Zea Mays
atcgtctcgctcgactactacatggctccgcccctcccgggcttcgccttctcccgcagccctttcctcggagaggaggtggaggaagtgccggtggtaaggatctacggctccacccccgcggggcagaagacttgcctccacatccaccgggtgctgccatatttttatataccttgttcggaggagctgctttgtaatctagaaaaaggtgattcatatataactggtctcttgagtgaccttgagaaagctttgcaggctcgcggtccatcaaaaaggaagcatgtgcatggatgtaaccttgttagagcaaagaagttgtacggctaccattcgtccgaggagctttttatgaagatctatctatattaccctcatgaagtttctcgagctgcttcccttgttttgagtggtgctgtttctaatagatcatttcagccttatgaatcccacattccatatcttcttcactttttggttgactacaacttgtatggaatggggcacatacatgtcaaaaacttcaagtttcgtcctccattgccagttgattttcatcctaagtcatctcttcgcaggaaggcacagtcagataatttagaaataaatagtccaacagtttggatatcttcaacagtgtcgcattcttctatcctgggtagttctgccccttcgcatcatttgggaggaaccaatttgagcttcgctattcgacagagttcttcaatgcttgaagctgattctagagtagaaggtatcctaaatgagaaatataagatgtacacttctctttctcaaacaacagaagatacaaaaatggttcagtcacttgtagcagtttgggaggaacttgaacgattaagactgttggaggaaacaaaatatgctgatctgggtagacctttaagggaagaagttcttaaagattttcttcatggtattaagtatgagagtgccctttctgtgttgttttcacaagaggggccacatcacaaagtttccaccatagaagagtctgaaaggctagaaaggtgcttaaaatcgttgactgatattattgggactgttacattctcacaggataactactgtggtaatattgatgttggtaattctgctgatgtgcaaaacgacaaacccgatgcaagtctttgctcagggtcattagaacaaaacatgcagattatatctccagagagaaacagtgaatatcctgtgtcttcatctgtacaccaaagaacactatctcagttatctgataaaggtgaaaagcatctggatgctgaggctcttggacttttaagctggctggcctcttcacaagctgcagaggaatcaactgatgatgaattaactaatgaagtcatcctcagccctttgtttgccaataagtccattgaagttgctgtggagtctgctcaattggattttgatagcgcttctcagcaggagtgtcaggatattcttgattcagttgaccccattagggcagtagaagaaccaaacatacatacatcttacctcgattctgtgaagtccaattctgctgcttctctgggcaattctattcctcagcttgatgggtcatctgatgagaacccaaaagtctcccaggaatatgatagaagtaaggtcactaggaaatcagtagtatcggcaagttacacatctactaagaagccttcaaaatcagccagtaagtattcaggaactgaacatctctggggttctttgcctctttcttccagaaaaaagaggcaacatggagatgctgatgattcatgcagtgcaatgtcaccgcagaaggatttaagtgcatctaagaagagtacaattgataaggactatcatgataccataggcagcactgattcagaatcttctagttttttaggtgtacatgattcagtttgtcattctgtgagggatttgatgaggcggaggagatcttttcggcgtgaacagttggagtttggttgttctggagctgcaacatgcaccatggataaagagagcgaaactgtgaattctgggggattggaatttcatgatttcacaagtgacatcccaaacttagcactgacacggatggcttttgttcagaagcctccattgaaggatgatgcatgttctggtttggagagcccttcagattgtgagcaacgtggatctgaaaaatcgggattagctgatcttctaccatttttcaatcagaatatggaggagaataagcagaatgaatcatttcaagatatggaaagcacaggggatgtattgggtgtcccaactcattttcaaaatgatggatcagccctatatttgctgacacatgcactttcgccaccatctgcaggagctgtgggccattggctaacccaacaatctagttccagtattttctcgggttacaccaactatgatggagtcgcagctgataaggaagaggcacacagttctactttatcacggaattctcctaccagatttaccaaggagaattctgcaaataaaatgcatggagatgtgatgggatcggctctatcttacaaagaaagtaaacatttggacgaatggcatgatttttcccagatatcagctggaaatgagaaggataggctcacacctctaagtcaaattggatttcgtgaccctgctagtataggtggcgggcaacaactgactatacttagcgtggaggttttaacagaaagcagaggagagctgcgtcctgatccacggtttgatgccattaatgctgtgtctttggccatcgaagatgatgctgacaatactgttgatgttcatgtgtttatacgtggcaacaatgtcaaatcacataggagaaatctggatggtattgctggctgtaatataaatgtcttccctgaagaaaaggacgttttgaacaatcttattagtgcaatatgttcaattgatcctgatatcctagtcggatgggagattcagttaggatctttaggatttcttgccgaaagagctgcttatctgggtataggcttactgaaaagaatttcaagaacaccacatgagttgaatcatccacctaagatcccagttgataactctagtcaggtgctttctgaaacatcttctgcggatgatattattgatgatgtcagtgagaatgattggagccatactcatgcgagcggtatacatgttggtggaagaattgtgcttaatttatggcgtctcatgcgtgcagaagttaagcttaataattactcccttgaagctgtagctgatgaagtactgaggcgaaagataccactgataccaagcaggatattgaaccgatggtttgcaacaggtcctggacgaggaagacaccgatgcatagaatacattagcaatagagctagaatcaaccttgaaataatgaatcaaatggacctggtgaatcgaacatctgaacttgctcgtgtatttggtattgattttttttctgttctttctcgggggtctcagtatcgtgttgaatctatgctcctgagattggctcatacacagaactaccttgcaatttctcctggaaatcaacaggttgcttctcagccagccatggagtgtttgccgcttgtaatggaaccagagtcggccttctaccctgatccagttgttgtgttggattttcagtccctctatccttcgatgataatagcatataacctttgttattctacatgcttgggaaaagttttcccatcaaagtcagatgtacttggtgtcagctcatattcagcagatccacatacacttgtagatctgaaaaatcagctgctgcttactccaaatggggtcctgtatgttcaacctgagataagaaaaggtgtacttcctcgccttctagaggagatattgtcaacaagaattatggtgaaacaagcaatgaaaaagttgagtccatcacagcaagttcttcacaggatattcaatgcacggcagcttgctttgaagctgatagctaatgtcacgtatggttacacagctgctggattcagtggtcgaatgccttgtgcagagcttgcagacagcattgttcagtgtggccgtagaacactcgaaacagcaatatcatttgtcaaccagcatcctttgtggaaagctagggttgtgtatggtgatactgacagtatgtttgttctcctaaaagggcgttctagggaagaagcattcaggatagggaaggagatcgcctcatcaataactgcaatgaatcctgatccagtcacattaaagtttgagaaagtgtaccagccatgcttccttcttacaaagaagagatatgttggctatagctacgagagtcctgaacagaatgagcctgtctttgatgcgaaggggatagaaacagttcggagggacacatgcccagcagttgcaaagattttggaacggtctatcagaataatgtttgaagaacaggatttgaccaaagtcaggacatatttggagcgtcagtggacacacatattatcaggaaaagtctctattctagatttcatttttgcgaaggaggtccgtttaggcacttatagtgcaagggcttccacgctgccccctgcagcaattgttgcaacaaaagctatgttgtctgacccaagggcagagcctcggtatgcagagagagtgccatatgttgtaatccatggggaaccaggagctcgtcttgccgacatggttattgatccttatggtctgctagaagttggctccccttatagattaaatgaacaatattacataaccaagcagattattcctgcattgcagcgtgtttttggacttcttggtgctgacctgaacaagtggtttaatgagatgcctcgccccatacgatcaactcttgcgaaacgccaatttgctgctgctcatggttcattctctcgtgatggcagtttcatccgattaggattgaataataaaacctcagccaaaggaggcagaatagatacatactacatgtcaagccactgctcaatttgtggtgatatgattcaaggatcagagtccttctgcaacaattgcttgaaaagcgaagctgttgttgccacagtagtcgctggcagaacttcaaagttggagcgagaaatccaacatcttgctgctatatgtggccattgtggcggtgcagactggattgttgaaagtggagtcaagtgtatttcccttgcatgcccagtcttctatgaacggaggaaagttcagagggagctggtagtcgtctcagagtcggcaggagaagcagggtattaccctttctgctgcgctgaactcttttgagaacatttttttggggctgcgtttctctgtccataccgtgtaaattgtggaatctgtaacctttacatcacacgtgtgtatagttgttgtatgtaacactgaagaacatgtactggtgaaagaatacatacaatgtataccgtgtcgctcgctgttcagttaagggtttgttcgattagctcccaatccacatggattaagtgagattaggtgggtttaaatcccagctaagtcaaacctttt

SEQ ID NO: 67454 - DNA, 5607 bp, Zea Mays
ctcgctcgactactacatggctccgcccctcccgggcttcgccttctcccgcagccctttcctcggagaggaggtggaggaagtgccggtggtaaggatctacggctccacccccgcggggcagaagacttgcctccacatccaccgggtgctgccatatttttatataccttgttcggaggagctgctttgtaatctagaaaaaggtagactaggtcttactattaacgtgacctggatgctgtaacacacctgctaattgtttactgagaaaaggcaaccatgtctagcaatcaaggacacatttgtcctatcaacgacatacatgtgattcatatataactggtctcttgagtgaccttgagaaagctttgcaggctcgcggtccatcaaaaaggaagcatgtgcatggatgtaaccttgttagagcaaagaagttgtacggctaccattcgtccgaggagctttttatgaagatctatctatattaccctcatgaagtttctcgagctgcttcccttgttttgagtggtgctgtttctaatagatcatttcagccttatgaatcccacattccatatcttcttcactttttggttgactacaacttgtatggaatggggcacatacatgtcaaaaacttcaagtttcgtcctccattgccagttgattttcatcctaagtcatctcttcgcaggaaggcacagtcagataatttagaaataaatagtccaacagtttggatatcttcaacagtgtcgcattcttctatcctgggtagttctgccccttcgcatcatttgggaggaaccaatttgagcttcgctattcgacagagttcttcaatgcttgaagctgattctagagtagaaggtatcctaaatgagaaatataagatgtacacttctctttctcaaacaacagaagatacaaaaatggttcagtcacttgtagcagtttgggaggaacttgaacgattaagactgttggaggaaacaaaatatgctgatctgggtagacctttaagggaagaagttcttaaagattttcttcatggtattaagtatgagagtgccctttctgtgttgttttcacaagaggggccacatcacaaagtttccaccatagaagagtctgaaaggctagaaaggtgcttaaaatcgttgactgatattattgggactgttacattctcacaggataactactgtggtaatattgatgttggtaattctgctgatgtgcaaaacgacaaacccgatgcaagtctttgctcagggtcattagaacaaaacatgcagattatatctccagagagaaacagtgaatatcctgtgtcttcatctgtacaccaaagaacactatctcagttatctgataaaggtgaaaagcatctggatgctgaggctcttggacttttaagctggctggcctcttcacaagctgcagaggaatcaactgatgatgaattaactaatgaagtcatcctcagccctttgtttgccaataagtccattgaagttgctgtggagtctgctcaattggattttgatagcgcttctcagcaggagtgtcaggatattcttgattcagttgaccccattagggcagtagaagaaccaaacatacatacatcttacctcgattctgtgaagtccaattctgctgcttctctgggcaattctattcctcagcttgatgggtcatctgatgagaacccaaaagtctcccaggaatatgatagaagtaaggtcactaggaaatcagtagtatcggcaagttacacatctactaagaagccttcaaaatcagccagtaagtattcaggaactgaacatctctggggttctttgcctctttcttccagaaaaaagaggcaacatggagatgctgatgattcatgcagtgcaatgtcaccgcagaaggatttaagtgcatctaagaagagtacaattgataaggactatcatgataccataggcagcactgattcagaatcttctagttttttaggtgtacatgattcagtttgtcattctgtgagggatttgatgaggcggaggagatcttttcggcgtgaacagttggagtttggttgttctggagctgcaacatgcaccatggataaagagagcgaaactgtgaattctgggggattggaatttcatgatttcacaagtgacatcccaaacttagcactgacacggatggcttttgttcagaagcctccattgaaggatgatgcatgttctggtttggagagcccttcagattgtgagcaacgtggatgtagaagtcctaggcctttagctgaaaaatcgggattagctgatcttctaccatttttcaatcagaatatggaggagaataagcagaatgaatcatttcaagatatggaaagcacaggggatgtattgggtgtcccaactcattttcaaaatgatggatcagccctatatttgctgacacatgcactttcgccaccatctgcaggagctgtgggccattggctaacccaacaatctagttccagtattttctcgggttacaccaactatgatggagtcgcagctgataaggaagaggcacacagttctactttatcacggaattctcctaccagatttaccaaggagaattctgcaaataaaatgcatggagatgttttaacagaaagcagaggagagctgcgtcctgatccacggtttgatgccattaatgctgtgtctttggccatcgaagatgatgctgacaatactgttgatgttcatgtgtttatacgtggcaacaatgtcaaatcacataggagaaatctggatggtattgctggctgtaatataaatgtcttccctgaagaaaaggacgttttgaacaatcttattagtgcaatatgttcaattgatcctgatatcctagtcggatgggagattcagttaggatctttaggatttcttgccgaaagagctgcttatctgggtataggcttactgaaaagaatttcaagaacaccacatgagttgaatcatccacctaagatcccagttgataactctagtcaggtgctttctgaaacatcttctgcggatgatattattgatgatgtcagtgagaatgattggagccatactcatgcgagcggtatacatgttggtggaagaattgtgcttaatttatggcgtctcatgcgtgcagaagttaagcttaataattactcccttgaagctgtagctgatgaagtactgaggcgaaagataccactgataccaagcaggatattgaaccgatggtttgcaacaggtcctggacgaggaagacaccgatgcatagaatacattagcaatagagctagaatcaaccttgaaataatgaatcaaatggacctggtgaatcgaacatctgaacttgctcgtgtatttggtattgattttttttctgttctttctcgggggtctcagtatcgtgttgaatctatgctcctgagattggctcatacacagaactaccttgcaatttctcctggaaatcaacaggttgcttctcagccagccatggagtgtttgccgcttgtaatggaaccagagtcggccttctaccctgatccagttgttgtgttggattttcagtccctctatccttcgatgataatagcatataacctttgttattctacatgcttgggaaaagttttcccatcaaagtcagatgtacttggtgtcagctcatattcagcagatccacatacacttgtagatctgaaaaatcagctgctgcttactccaaatggggtcctgtatgttcaacctgagataagaaaaggtgtacttcctcgccttctagaggagatattgtcaacaagaattatggtgaaacaagcaatgaaaaagttgagtccatcacagcaagttcttcacaggatattcaatgcacggcagcttgctttgaagctgatagctaatgtcacgtatggttacacagctgctggattcagtggtcgaatgccttgtgcagagcttgcagacagcattgttcagtgtggccgtagaacactcgaaacagcaatatcatttgtcaaccagcatcctttgtggaaagctagggttgtgtatggtgatactgacagtatgtttgttctcctaaaagggcgttctagggaagaagcattcaggatagggaaggagatcgcctcatcaataactgcaatgaatcctgatccagtcacattaaagtttgagaaagtgtaccagccatgcttccttcttacaaagaagagatatgttggctatagctacgagagtcctgaacagaatgagcctgtctttgatgcgaaggggatagaaacagttcggagggacacatgcccagcagttgcaaagattttggaacggtctatcagaataatgtttgaagaacaggatttgaccaaagtaaggggtattacttagtctcctcttgcaaggaccattttccttgttttttattattgtttcttgttgagttgacattcttctaccattgaaggtcaggacatatttggagcgtcagtggacacacatattatcaggaaaagtctctattctagatttcatttttgcgaaggaggtccgtttaggcacttatagtgcaagggcttccacgctgccccctgcagcaattgttgcaacaaaagctatgttgtctgacccaagggcagagcctcggtatgcagagagagtgccatatgttgtaatccatggggaaccaggagctcgtcttgccgacatggttattgatccttatggtctgctagaagttggctccccttatagattaaatgaacaatattacataaccaagcagattattcctgcattgcagcgtgtttttggacttcttggtgctgacctgaacaagtggtttaatgagatgcctcgccccatacgatcaactcttgcgaaacgccaatttgctgctgctcatggttcattctctcgtgatggcagtttcatccgattaggattgaataataaaacctcagccaaaggaggcagaatagatacatactacatgtcaagccactgctcaatttgtggtgatatgattcaaggatcagagtccttctgcaacaattgcttgaaaagcgaagctgttgttgccacagtagtcgctggcagaacttcaaagttggagcgagaaatccaacatcttgctgctatatgtggccattgtggcggtgcagactggattgttgaaagtggagtcaagtgtatttcccttgcatgcccagtcttctatgaacggaggaaagttcagagggagctggtagtcgtctcagagtcggcaggagaagcagggtattaccctttctgctgcgctgaactcttttgagaacatttttttggggctgcgtttctctgtccataccgtgtaaattgtggaatctgtaacctttacatcacacgtgtgtatagttgttgtatgtaacactgaagaacatgtactggtgaaagaatacatacaatgtataccgtgtcgctcgctgttcagttaagggtttgttcgattagctcccaatccacatggattaagtgagattaggtgggtttaaatcccagctaagtcaaacctttt

SEQ ID NO: 67455 - DNA, 5538 bp, Zea Mays
gcccctcccgggcttcgccttctcccgcagccctttcctcggagaggaggtggaggaagtgccggtggtaaggatctacggctccacccccgcggggcagaagacttgcctccacatccaccgggtgctgccatatttttatataccttgttcggaggagctgctttgtaatctagaaaaaggtagactaggtcttactattaacgtgacctggatgctgtaacacacctgctaattgtttactgagaaaaggcaaccatgtctagcaatcaaggacacatttgtcctatcaacgacatacatgtgattcatatataactggtctcttgagtgaccttgagaaagctttgcaggctcgcggtccatcaaaaaggaagcatgtgcatggatgtaaccttgttagagcaaagaagttgtacggctaccattcgtccgaggagctttttatgaagatctatctatattaccctcatgaagtttctcgagctgcttcccttgttttgagtggtgctgtttctaatagatcatttcagccttatgaatcccacattccatatcttcttcactttttggttgactacaacttgtatggaatggggcacatacatgtcaaaaacttcaagtttcgtcctccattgccagttgattttcatcctaagtcatctcttcgcaggaagtcagataatttagaaataaatagtccaacagtttggatatcttcaacagtgtcgcattcttctatcctgggtagttctgccccttcgcatcatttgggaggaaccaatttgagcttcgctattcgacagagttcttcaatgcttgaagctgattctagagtagaaggtctcgctatcacattctaacactattgtttggtaatatccttaacatgcattataaatttcagttccaccttcaggtatcctaaatgagaaatataagatgtacacttctctttctcaaacaacagaagatacaaaaatggttcagtcacttgtagcagtttgggaggaacttgaacgattaagactgttggaggaaacaaaatatgctgatctgggtagacctttaagggaagaagttcttaaagattttcttcatggtattaagtatgagagtgccctttctgtgttgttttcacaagaggggccacatcacaaagtttccaccatagaagagtctgaaaggctagaaaggtgcttaaaatcgttgactgatattattgggactgttacattctcacaggataactactgtggtaatattgatgttggtaattctgctgatgtgcaaaacgacaaacccgatgcaagtctttgctcagggtcattagaacaaaacatgcagattatatctccagagagaaacagtgaatatcctgtgtcttcatctgtacaccaaagaacactatctcagttatctgataaaggtgaaaagcatctggatgctgaggctcttggacttttaagctggctggcctcttcacaagctgcagaggaatcaactgatgatgaattaactaatgaagtcatcctcagccctttgtttgccaataagtccattgaagttgctgtggagtctgctcaattggattttgatagcgcttctcagcaggagtgtcaggatattcttgattcagttgaccccattagggcagtagaagaaccaaacatacatacatcttacctcgattctgtgaagtccaattctgctgcttctctgggcaattctattcctcagcttgatgggtcatctgatgagaacccaaaagtctcccaggaatatgatagaagtaaggtcactaggaaatcagtagtatcggcaagttacacatctactaagaagccttcaaaatcagccagtaagtattcaggaactgaacatctctggggttctttgcctctttcttccagaaaaaagaggcaacatggagatgctgatgattcatgcagtgcaatgtcaccgcagaaggatttaagtgcatctaagaagagtacaattgataaggactatcatgataccataggcagcactgattcagaatcttctagttttttaggtgtacatgattcagtttgtcattctgtgagggatttgatgaggcggaggagatcttttcggcgtgaacagttggagtttggttgttctggagctgcaacatgcaccatggataaagagagcgaaactgtgaattctgggggattggaatttcatgatttcacaagtgacatcccaaacttagcactgacacggatggcttttgttcagaagcctccattgaaggatgatgcatgttctggtttggagagcccttcagattgtgagcaacgtggatctgaaaaatcgggattagctgatcttctaccatttttcaatcagaatatggaggagaataagcagaatgaatcatttcaagatatggaaagcacaggggatgtattgggtgtcccaactcattttcaaaatgatggatcagccctatatttgctgacacatgcactttcgccaccatctgcaggagctgtgggccattggctaacccaacaatctagttccagtattttctcgggttacaccaactatgatggagtcgcagctgataaggaagaggcacacagttctactttatcacggaattctcctaccagatttaccaaggagaattctgcaaataaaatgcatggagatgttttaacagaaagcagaggagagctgcgtcctgatccacggtttgatgccattaatgctgtgtctttggccatcgaagatgatgctgacaatactgttgatgttcatgtgtttatacgtggcaacaatgtcaaatcacataggagaaatctggatggtattgctggctgtaatataaatgtcttccctgaagaaaaggacgttttgaacaatcttattagtgcaatatgttcaattgatcctgatatcctagtcggatgggagattcagttaggatctttaggatttcttgccgaaagagctgcttatctgggtataggcttactgaaaagaatttcaagaacaccacatgagttgaatcatccacctaagatcccagttgataactctagtcaggtgctttctgaaacatcttctgcggatgatattattgatgatgtcagtgagaatgattggagccatactcatgcgagcggtatacatgttggtggaagaattgtgcttaatttatggcgtctcatgcgtgcagaagttaagcttaataattactcccttgaagctgtagctgatgaagtactgaggcgaaagataccactgataccaagcaggatattgaaccgatggtttgcaacaggtcctggacgaggaagacaccgatgcatagaatacattagcaatagagctagaatcaaccttgaaataatgaatcaaatggacctggtgaatcgaacatctgaacttgctcgtgtatttggtattgattttttttctgttctttctcgggggtctcagtatcgtgttgaatctatgctcctgagattggctcatacacagaactaccttgcaatttctcctggaaatcaacaggttgcttctcagccagccatggagtgtttgccgcttgtaatggaaccagagtcggccttctaccctgatccagttgttgtgttggattttcagtccctctatccttcgatgataatagcatataacctttgttattctacatgcttgggaaaagttttcccatcaaagtcagatgtacttggtgtcagctcatattcagcagatccacatacacttgtagatctgaaaaatcagctgctgcttactccaaatggggtcctgtatgttcaacctgagataagaaaaggtgtacttcctcgccttctagaggagatattgtcaacaagaattatggtgaaacaagcaatgaaaaagttgagtccatcacagcaagttcttcacaggatattcaatgcacggcagcttgctttgaagctgatagctaatgtcacgtatggttacacagctgctggattcagtggtcgaatgccttgtgcagagcttgcagacagcattgttcagtgtggccgtagaacactcgaaacagcaatatcatttgtcaaccagcatcctttgtggaaagctagggttgtgtatggtgatactgacagtatgtttgttctcctaaaagggcgttctagggaagaagcattcaggatagggaaggagatcgcctcatcaataactgcaatgaatcctgatccagtcacattaaagtttgagaaagtgtaccagccatgcttccttcttacaaagaagagatatgttggctatagctacgagagtcctgaacagaatgagcctgtctttgatgcgaaggggatagaaacagttcggagggacacatgcccagcagttgcaaagattttggaacggtctatcagaataatgtttgaagaacaggatttgaccaaagtcaggacatatttggagcgtcagtggacacacatattatcaggaaaagtctctattctagatttcatttttgcgaaggaggtccgtttaggcacttatagtgcaagggcttccacgctgccccctgcagcaattgttgcaacaaaagctatgttgtctgacccaagggcagagcctcggtatgcagagagagtgccatatgttgtaatccatggggaaccaggagctcgtcttgccgacatggttattgatccttatggtctgctagaagttggctccccttatagattaaatgaacaatattacataaccaagcagattattcctgcattgcagcgtgtttttggacttcttggtgctgacctgaacaagtggtttaatgagatgcctcgccccatacgatcaactcttgcgaaacgccaatttgctgctgctcatggttcattctctcgtgatggcagtttcatccgattaggattgaataataaaacctcagccaaaggaggcagaatagatacatactacatgtcaagccactgctcaatttgtggtgatatgattcaaggatcagagtccttctgcaacaattgcttgaaaagcgaagctgttgttgccacagtagtcgctggcagaacttcaaagttggagcgagaaatccaacatcttgctgctatatgtggccattgtggcggtgcagactggattgttgaaagtggagtcaagtgtatttcccttgcatgcccagtcttctatgaacggaggaaagttcagagggagctggtagtcgtctcagagtcggcaggagaagcagggtattaccctttctgctgcgctgaactcttttgagaacatttttttggggctgcgtttctctgtccataccgtgtaaattgtggaatctgtaacctttacatcacacgtgtgtatagttgttgtatgtaacactgaagaacatgtactggtgaaagaatacatacaatgtataccgtgtcgctcgctgttcagttaagggtttgttcgattagctcccaatccacatggattaagtgagattaggtgggtttaaatcccagctaagtcaaacctttt

SEQ ID NO: 67456 - DNA, 5514 bp, Zea Mays
cgggcttcgccttctcccgcagccctttcctcggagaggaggtggaggaagtgccggtggtaaggatctacggctccacccccgcggggcagaagacttgcctccacatccaccgggtgctgccatatttttatataccttgttcggaggagctgctttgtaatctagaaaaaggtagactaggtcttactattaacgtgacctggatgctgtaacacacctgctaattgtttactgagaaaaggcaaccatgtctagcaatcaaggacacatttgtcctatcaacgacatacatgtgattcatatataactggtctcttgagtgaccttgagaaagctttgcaggctcgcggtccatcaaaaaggaagcatgtgcatggatgtaaccttgttagagcaaagaagttgtacggctaccattcgtccgaggagctttttatgaagatctatctatattaccctcatgaagtttctcgagctgcttcccttgttttgagtggtgctgtttctaatagatcatttcagccttatgaatcccacattccatatcttcttcactttttggttgactacaacttgtatggaatggggcacatacatgtcaaaaacttcaagtttcgtcctccattgccagttgattttcatcctaagtcatctcttcgcaggaaggcacagtcagataatttagaaataaatagtccaacagtttggatatcttcaacagtgtcgcattcttctatcctgggtagttctgccccttcgcatcatttgggaggaaccaatttgagcttcgctattcgacagagttcttcaatgcttgaagctgattctagagtagaaggtctcgctatcacattctaacactattgtttggtaatatccttaacatgcattataaatttcagttccaccttcaggtatcctaaatgagaaatataagatgtacacttctctttctcaaacaacagaagatacaaaaatggttcagtcacttgtagcagtttgggaggaacttgaacgattaagactgttggaggaaacaaaatatgctgatctgggtagacctttaagggaagaagttcttaaagattttcttcatggtattaagtatgagagtgccctttctgtgttgttttcacaagaggggccacatcacaaagtttccaccatagaagagtctgaaaggctagaaaggtgcttaaaatcgttgactgatattattgggactgttacattctcacaggataactactgtggtaatattgatgttggtaattctgctgatgtgcaaaacgacaaacccgatgcaagtctttgctcagggtcattagaacaaaacatgcagattatatctccagagagaaacagtgaatatcctgtgtcttcatctgtacaccaaagaacactatctcagttatctgataaaggtgaaaagcatctggatgctgaggctcttggacttttaagctggctggcctcttcacaagctgcagaggaatcaactgatgatgaattaactaatgaagtcatcctcagccctttgtttgccaataagtccattgaagttgctgtggagtctgctcaattggattttgatagcgcttctcagcaggagtgtcaggatattcttgattcagttgaccccattagggcagtagaagaaccaaacatacatacatcttacctcgattctgtgaagtccaattctgctgcttctctgggcaattctattcctcagcttgatgggtcatctgatgagaacccaaaagtctcccaggaatatgatagaagtaaggtcactaggaaatcagtagtatcggcaagttacacatctactaagaagccttcaaaatcagccatgcaatgtcaccgcagaaggatttaagtgcatctaagaagagtacaattgataaggactatcatgataccataggcagcactgattcagaatcttctagttttttaggtgtacatgattcagtttgtcattctgtgagggatttgatgaggcggaggagatcttttcggcgtgaacagttggagtttggttgttctggagctgcaacatgcaccatggataaagagagcgaaactgtgaattctgggggattggaatttcatgatttcacaagtgacatcccaaacttagcactgacacggatggcttttgttcagaagcctccattgaaggatgatgcatgttctggtttggagagcccttcagattgtgagcaacgtggataatatggaggagaataagcagaatgaatcatttcaagatatggaaagcacaggggatgtattgggtgtcccaactcattttcaaaatgatggatcagccctatatttgctgacacatgcactttcgccaccatctgcaggagctgtgggccattggctaacccaacaatctagttccagtattttctcgggttacaccaactatgatggagtcgcagctgataaggaagaggcacacagttctactttatcacggaattctcctaccagatttaccaaggagaattctgcaaataaaatgcatggagatgtgatgggatcggctctatcttacaaagaaagtaaacatttggacgaatggcatgatttttcccagatatcagctggaaatgagaaggataggctcacacctctaagtcaaattggatttcgtgaccctgctagtataggtggcgggcaacaactgactatacttagcgtggaggttttaacagaaagcagaggagagctgcgtcctgatccacggtttgatgccattaatgctgtgtctttggccatcgaagatgatgctgacaatactgttgatgttcatgtgtttatacgtggcaacaatgtcaaatcacataggagaaatctggatggtattgctggctgtaatataaatgtcttccctgaagaaaaggacgttttgaacaatcttattagtgcaatatgttcaattgatcctgatatcctagtcggatgggagattcagttaggatctttaggatttcttgccgaaagagctgcttatctgggtataggcttactgaaaagaatttcaagaacaccacatgagttgaatcatccacctaagatcccagttgataactctagtcaggtgctttctgaaacatcttctgcggatgatattattgatgatgtcagtgagaatgattggagccatactcatgcgagcggtatacatgttggtggaagaattgtgcttaatttatggcgtctcatgcgtgcagaagttaagcttaataattactcccttgaagctgtagctgatgaagtactgaggcgaaagataccactgataccaagcaggatattgaaccgatggtttgcaacaggtcctggacgaggaagacaccgatgcatagaatacattagcaatagagctagaatcaaccttgaaataatgaatcaaatggacctggtgaatcgaacatctgaacttgctcgtgtatttggtattgattttttttctgttctttctcgggggtctcagtatcgtgttgaatctatgctcctgagattggctcatacacagaactaccttgcaatttctcctggaaatcaacaggttgcttctcagccagccatggagtgtttgccgcttgtaatggaaccagagtcggccttctaccctgatccagttgttgtgttggattttcagtccctctatccttcgatgataatagcatataacctttgttattctacatgcttgggaaaagttttcccatcaaagtcagatgtacttggtgtcagctcatattcagcagatccacatacacttgtagatctgaaaaatcagctgctgcttactccaaatggggtcctgtatgttcaacctgagataagaaaaggtgtacttcctcgccttctagaggagatattgtcaacaagaattatggtgaaacaagcaatgaaaaagttgagtccatcacagcaagttcttcacaggctgctggattcagtggtcgaatgccttgtgcagagcttgcagacagcattgttcagtgtggccgtagaacactcgaaacagcaatatcatttgtcaaccagcatcctttgtggaaagctagggttgtgtatggtgatactgacagtatgtttgttctcctaaaagggcgttctagggaagaagcattcaggatagggaaggagatcgcctcatcaataactgcaatgaatcctgatccagtcacattaaagtttgagaaagtgtaccagccatgcttccttcttacaaagaagagatatgttggctatagctacgagagtcctgaacagaatgagcctgtctttgatgcgaaggggatagaaacagttcggagggacacatgcccagcagttgcaaagattttggaacggtctatcagaataatgtttgaagaacaggatttgaccaaagtcaggacatatttggagcgtcagtggacacacatattatcaggaaaagtctctattctagatttcatttttgcgaaggaggtccgtttaggcacttatagtgcaagggcttccacgctgccccctgcagcaattgttgcaacaaaagctatgttgtctgacccaagggcagagcctcggtatgcagagagagtgccatatgttgtaatccatggggaaccaggagctcgtcttgccgacatggttattgatccttatggtctgctagaagttggctccccttatagattaaatgaacaatattacataaccaagcagattattcctgcattgcagcgtgtttttggacttcttggtgctgacctgaacaagtggtttaatgagatgcctcgccccatacgatcaactcttgcgaaacgccaatttgctgctgctcatggttcattctctcgtgatggcagtttcatccgattaggattgaataataaaacctcagccaaaggaggcagaatagatacatactacatgtcaagccactgctcaatttgtggtgatatgattcaaggatcagagtccttctgcaacaattgcttgaaaagcgaagctgttgttgccacagtagtcgctggcagaacttcaaagttggagcgagaaatccaacatcttgctgctatatgtggccattgtggcggtgcagactggattgttgaaagtggagtcaagtgtatttcccttgcatgcccagtcttctatgaacggaggaaagttcagagggagctggtagtcgtctcagagtcggcaggagaagcagggtattaccctttctgctgcgctgaactcttttgagaacatttttttggggctgcgtttctctgtccataccgtgtaaattgtggaatctgtaacctttacatcacacgtgtgtatagttgttgtatgtaacactgaagaacatgtactggtgaaagaatacatacaatgtataccgtgtcgctcgctgttcagttaagggtttgttcgattagctcccaatccacatggattaagtgagattaggtgggtttaaatcccagctaagtcaaacctttt

SEQ ID NO: 67457 - DNA, 5947 bp, Zea Mays
tcgccttctcccgcagccctttcctcggagaggaggtggaggaagtgccggtggtaaggatctacggctccacccccgcggggcagaagacttgcctccacatccaccgggtgctgccatatttttatataccttgttcggaggagctgctttgtaatctagaaaaaggtgattcatatataactggtctcttgagtgaccttgagaaagctttgcaggctcgcggtccatcaaaaaggaagcatgtgcatggatgtaaccttgttagagcaaagaagttgtacggctaccattcgtccgaggagctttttatgaagatctatctgtatccactgtttactcgtttttataaacccaacattgcttctacaaatgtgtatattgtcaacattacttgtcacatcttttctatctcatatcgagcggatttagaaattttgaatatagcttgctccatcctctcattaccaagcaaatcaacataaatgtgctgaattagagttaatgctttggtcatctggtccacctcttgaattctaacaagtgccttgcttgtccagaccaaaatggtttcacataaatcctctattgctgatgtaattttggggtatcatggcaacaaccttatagagtggtgttttgattataaaacttcattatgcaatcgacttccttgatctagtctctagatattaccctcatgaagtttctcgagctgcttcccttgttttgagtggtgctgtttctaatagatcatttcagccttatgaatcccacattccatatcttcttcactttttggttgactacaacttgtatggaatggggcacatacatgtcaaaaacttcaagtttcgtcctccattgccagttgattttcatcctaagtcatctcttcgcaggaaggcacagtcagataatttagaaataaatagtccaacagtttggatatcttcaacagtgtcgcattcttctatcctgggtagttctgccccttcgcatcatttgggaggaaccaatttgagcttcgctattcgacagagttcttcaatgcttgaagctgattctagagtagaaggtctcgctatcacattctaacactattgtttggtaatatccttaacatgcattataaatttcagttccaccttcaggtatcctaaatgagaaatataagatgtacacttctctttctcaaacaacagaagatacaaaaatggttcagtcacttgtagcagtttgggaggaacttgaacgattaagactgttggaggaaacaaaatatgctgatctgggtagacctttaagggaagaagttcttaaagattttcttcatggtattaagtatgagagtgccctttctgtgttgttttcacaagaggggccacatcacaaagtttccaccatagaagagtctgaaaggctagaaaggtgcttaaaatcgttgactgatattattgggactgttacattctcacaggataactactgtggtaatattgatgttggtaattctgctgatgtgcaaaacgacaaacccgatgcaagtctttgctcagggtcattagaacaaaacatgcagattatatctccagagagaaacagtgaatatcctgtgtcttcatctgtacaccaaagaacactatctcagttatctgataaaggtgaaaagcatctggatgctgaggctcttggacttttaagctggctggcctcttcacaagctgcagaggaatcaactgatgatgaattaactaatgaagtcatcctcagccctttgtttgccaataagtccattgaagttgctgtggagtctgctcaattggattttgatagcgcttctcagcaggagtgtcaggatattcttgattcagttgaccccattagggcagtagaagaaccaaacatacatacatcttacctcgattctgtgaagtccaattctgctgcttctctgggcaattctattcctcagcttgatgggtcatctgatgagaacccaaaagtctcccaggaatatgatagaagtaaggtcactaggaaatcagtagtatcggcaagttacacatctactaagaagccttcaaaatcagccagtaagtattcaggaactgaacatctctggggttctttgcctctttcttccagaaaaaagaggcaacatggagatgctgatgattcatgcagtgcaatgtcaccgcagaaggatttaagtgcatctaagaagagtacaattgataaggactatcatgataccataggcagcactgattcagaatcttctagttttttaggtgtacatgattcagtttgtcattctgtgagggatttgatgaggcggaggagatcttttcggcgtgaacagttggagtttggttgttctggagctgcaacatgcaccatggataaagagagcgaaactgtgaattctgggggattggaatttcatgatttcacaagtgacatcccaaacttagcactgacacggatggcttttgttcagaagcctccattgaaggatgatgcatgttctggtttggagagcccttcagattgtgagcaacgtggatctgaaaaatcgggattagctgatcttctaccatttttcaatcagaatatggaggagaataagcagaatgaatcatttcaagatatggaaagcacaggggatgtattgggtgtcccaactcattttcaaaatgatggatcagccctatatttgctgacacatgcactttcgccaccatctgcaggagctgtgggccattggctaacccaacaatctagttccagtattttctcgggttacaccaactatgatggagtcgcagctgataaggaagaggcacacagttctactttatcacggaattctcctaccagatttaccaaggagaattctgcaaataaaatgcatggagatgtgatgggatcggctctatcttacaaagaaagtaaacatttggacgaatggcatgatttttcccagatatcagctggaaatgagaaggataggctcacacctctaagtcaaattggatttcgtgaccctgctagtataggtggcgggcaacaactgactatacttagcgtggaggttttaacagaaagcagaggagagctgcgtcctgatccacggtttgatgccattaatgctgtgtctttggccatcgaagatgatgctgacaatactgttgatgttcatgtgtttatacgtggcaacaatgtcaaatcacataggagaaatctggatggtattgctggctgtaatataaatgtcttccctgaagaaaaggacgttttgaacaatcttattagtgcaatatgttcaattgatcctgatatcctagtcggatgggagattcagttaggatctttaggatttcttgccgaaagagctgcttatctgggtataggcttactgaaaagaatttcaagaacaccacatgagttgaatcatccacctaagatcccagttgataactctagtcaggtgctttctgaaacatcttctgcggatgatattattgatgatgtcagtgagaatgattggagccatactcatgcgagcggtatacatgttggtggaagaattgtgcttaatttatggcgtctcatgcgtgcagaagttaagcttaataattactcccttgaagctgtagctgatgaagtactgaggcgaaagataccactgataccaagcaggatattgaaccgatggtttgcaacaggtcctggacgaggaagacaccgatgcatagaatacattagcaatagagctagaatcaaccttgaaataatgaatcaaatggacctggtgaatcgaacatctgaacttgctcgtgtatttggtattgattttttttctgttctttctcgggggtctcagtatcgtgttgaatctatgctcctgagattggctcatacacagaactaccttgcaatttctcctggaaatcaacaggttgcttctcagccagccatggagtgtttgccgcttgtaatggaaccagagtcggccttctaccctgatccagttgttgtgttggattttcagtccctctatccttcgatgataatagcatataacctttgttattctacatgcttgggaaaagttttcccatcaaagtcagatgtacttggtgtcagctcatattcagcagatccacatacacttgtagatctgaaaaatcagctgctgcttactccaaatggggtcctgtatgttcaacctgagataagaaaaggtgtacttcctcgccttctagaggagatattgtcaacaagaattatggtgaaacaagcaatgaaaaagttgagtccatcacagcaagttcttcacaggatattcaatgcacggcagcttgctttgaagctgatagctaatgtcacgtatggttacacagctgctggattcagtggtcgaatgccttgtgcagagcttgcagacagcattgttcagtgtggccgtagaacactcgaaacagcaatatcatttgtcaaccagcatcctttgtggaaagctagggttgtgtatggtgatactgacagtatgtttgttctcctaaaagggcgttctagggaagaagcattcaggatagggaaggagatcgcctcatcaataactgcaatgaatcctgatccagtcacattaaagtttgagaaagtgtaccagccatgcttccttcttacaaagaagagatatgttggctatagctacgagagtcctgaacagaatgagcctgtctttgatgcgaaggggatagaaacagttcggagggacacatgcccagcagttgcaaagattttggaacggtctatcagaataatgtttgaagaacaggatttgaccaaagtcaggacatatttggagcgtcagtggacacacatattatcaggaaaagtctctattctagatttcatttttgcgaaggaggtccgtttaggcacttatagtgcaagggcttccacgctgccccctgcagcaattgttgcaacaaaagctatgttgtctgacccaagggcagagcctcggtatgcagagagagtgccatatgttgtaatccatggggaaccaggagctcgtcttgccgacatggttattgatccttatggtctgctagaagttggctccccttatagattaaatgaacaatattacataaccaagcagattattcctgcattgcagcgtgtttttggacttcttggtgctgacctgaacaagtggtttaatgagatgcctcgccccatacgatcaactcttgcgaaacgccaatttgctgctgctcatggttcattctctcgtgatggcagtttcatccgattaggattgaataataaaacctcagccaaaggaggcagaatagatacatactacatgtcaagccactgctcaatttgtggtgatatgattcaaggatcagagtccttctgcaacaattgcttgaaaagcgaagctgttgttgccacagtagtcgctggcagaacttcaaagttggagcgagaaatccaacatcttgctgctatatgtggccattgtggcggtgcagactggattgttgaaagtggagtcaagtgtatttcccttgcatgcccagtcttctatgaacggaggaaagttcagagggagctggtagtcgtctcagagtcggcaggagaagcagggtattaccctttctgctgcgctgaactcttttgagaacatttttttggggctgcgtttctctgtccataccgtgtaaattgtggaatctgtaacctttacatcacacgtgtgtatagttgttgtatgtaacactgaagaacatgtactggtgaaagaatacatacaatgtataccgtgtcgctcgctgttcagttaagggtttgttcgattagctcccaatccacatggattaagtgagattaggtgggtttaaatcccagctaagtcaaacctttt

SEQ ID NO: 67458 - DNA, 5362 bp, Zea Mays
atgacgccaaaggctccaagaataactagagaattgaagcctgattggagatcacggggaatcttctccacagccctgctccaccagtcatcaaggctgcaaagagcattgtctggtgattcatatataactggtctcttgagtgaccttgagaaagctttgcagagtggtgttttgattataaaacttcattatgcaatcgacttccttgatctagtctctagatattaccctcatgaagtttctcgagctgcttcccttgttttgagtggtgctgtttctaatagatcatttcagccttatgaatcccacattccatatcttcttcactttttggttgactacaacttgtatggaatggggcacatacatgtcaaaaacttcaagtttcgtcctccattgccagttgattttcatcctaagtcatctcttcgcaggaaggcacagtcagataatttagaaataaatagtccaacagtttggatatcttcaacagtgtcgcattcttctatcctgggtagttctgccccttcgcatcatttgggaggaaccaatttgagcttcgctattcgacagagttcttcaatgcttgaagctgattctagagtagaaggtatcctaaatgagaaatataagatgtacacttctctttctcaaacaacagaagatacaaaaatggttcagtcacttgtagcagtttgggaggaacttgaacgattaagactgttggaggaaacaaaatatgctgatctgggtagacctttaagggaagaagttcttaaagattttcttcatggtattaagtatgagagtgccctttctgtgttgttttcacaagaggggccacatcacaaagtttccaccatagaagagtctgaaaggctagaaaggtgcttaaaatcgttgactgatattattgggactgttacattctcacaggataactactgtggtaatattgatgttggtaattctgctgatgtgcaaaacgacaaacccgatgcaagtctttgctcagggtcattagaacaaaacatgcagattatatctccagagagaaacagtgaatatcctgtgtcttcatctgtacaccaaagaacactatctcagttatctgataaaggtgaaaagcatctggatgctgaggctcttggacttttaagctggctggcctcttcacaagctgcagaggaatcaactgatgatgaattaactaatgaagtcatcctcagccctttgtttgccaataagtccattgaagttgctgtggagtctgctcaattggattttgatagcgcttctcagcaggagtgtcaggatattcttgattcagttgaccccattagggcagtagaagaaccaaacatacatacatcttacctcgattctgtgaagtccaattctgctgcttctctgggcaattctattcctcagcttgatgggtcatctgatgagaacccaaaagtctcccaggaatatgatagaagtaaggtcactaggaaatcagtagtatcggcaagttacacatctactaagaagccttcaaaatcagccagtaagtattcaggaactgaacatctctggggttctttgcctctttcttccagaaaaaagaggcaacatggagatgctgatgattcatgcagtgcaatgtcaccgcagaaggatttaagtgcatctaagaagagtacaattgataaggactatcatgataccataggcagcactgattcagaatcttctagttttttaggtgtacatgattcagtttgtcattctgtgagggatttgatgaggcggaggagatcttttcggcgtgaacagttggagtttggttgttctggagctgcaacatgcaccatggataaagagagcgaaactgtgaattctgggggattggaatttcatgatttcacaagtgacatcccaaacttagcactgacacggatggcttttgttcagaagcctccattgaaggatgatgcatgttctggtttggagagcccttcagattgtgagcaacgtggataatatggaggagaataagcagaatgaatcatttcaagatatggaaagcacaggggatgtattgggtgtcccaactcattttcaaaatgatggatcagccctatatttgctgacacatgcactttcgccaccatctgcaggagctgtgggccattggctaacccaacaatctagttccagtattttctcgggttacaccaactatgatggagtcgcagctgataaggaagaggcacacagttctactttatcacggaattctcctaccagatttaccaaggagaattctgcaaataaaatgcatggagatgtgatgggatcggctctatcttacaaagaaagtaaacatttggacgaatggcatgatttttcccagatatcagctggaaatgagaaggataggctcacacctctaagtcaaattggatttcgtgaccctgctagtataggtggcgggcaacaactgactatacttagcgtggaggttttaacagaaagcagaggagagctgcgtcctgatccacggtttgatgccattaatgctgtgtctttggccatcgaagatgatgctgacaatactgttgatgttcatgtgtttatacgtggcaacaatgtcaaatcacataggagaaatctggatggtattgctggctgtaatataaatgtcttccctgaagaaaaggacgttttgaacaatcttattagtgcaatatgttcaattgatcctgatatcctagtcggatgggagattcagttaggatctttaggatttcttgccgaaagagctgcttatctgggtataggcttactgaaaagaatttcaagaacaccacatgagttgaatcatccacctaagatcccagttgataactctagtcaggtgctttctgaaacatcttctgcggatgatattattgatgatgtcagtgagaatgattggagccatactcatgcgagcggtatacatgttggtggaagaattgtgcttaatttatggcgtctcatgcgtgcagaagttaagcttaataattactcccttgaagctgtagctgatgaagtactgaggcgaaagataccactgataccaagcaggatattgaaccgatggtttgcaacaggtcctggacgaggaagacaccgatgcatagaatacattagcaatagagctagaatcaaccttgaaataatgaatcaaatggacctggtgaatcgaacatctgaacttgctcgtgtatttggtattgattttttttctgttctttctcgggggtctcagtatcgtgttgaatctatgctcctgagattggctcatacacagaactaccttgcaatttctcctggaaatcaacaggttgcttctcagccagccatggagtgtttgccgcttgtaatggaaccagagtcggccttctaccctgatccagttgttgtgttggattttcagtccctctatccttcgatgataatagcatataacctttgttattctacatgcttgggaaaagttttcccatcaaagtcagatgtacttggtgtcagctcatattcagcagatccacatacacttgtagatctgaaaaatcagctgctgcttactccaaatggggtcctgtatgttcaacctgagataagaaaaggtgtacttcctcgccttctagaggagatattgtcaacaagaattatggtgaaacaagcaatgaaaaagttgagtccatcacagcaagttcttcacaggatattcaatgcacggcagcttgctttgaagctgatagctaatgtcacgtatggttacacagctgctggattcagtggtcgaatgccttgtgcagagcttgcagacagcattgttcagtgtggccgtagaacactcgaaacagcaatatcatttgtcaaccagcatcctttgtggaaagctagggttgtgtatggtgatactgacagtatgtttgttctcctaaaagggcgttctagggaagaagcattcaggatagggaaggagatcgcctcatcaataactgcaatgaatcctgatccagtcacattaaagtttgagaaagtgtaccagccatgcttccttcttacaaagaagagatatgttggctatagctacgagagtcctgaacagaatgagcctgtctttgatgcgaaggggatagaaacagttcggagggacacatgcccagcagttgcaaagattttggaacggtctatcagaataatgtttgaagaacaggatttgaccaaagtcaggacatatttggagcgtcagtggacacacatattatcaggaaaagtctctattctagatttcatttttgcgaaggaggtccgtttaggcacttatagtgcaagggcttccacgctgccccctgcagcaattgttgcaacaaaagctatgttgtctgacccaagggcagagcctcggtatgcagagagagtgccatatgttgtaatccatggggaaccaggagctcgtcttgccgacatggttattgatccttatggtctgctagaagttggctccccttatagattaaatgaacaatattacataaccaagcagattattcctgcattgcagcgtgtttttggacttcttggtgctgacctgaacaagtggtttaatgagatgcctcgccccatacgatcaactcttgcgaaacgccaatttgctgctgctcatggttcattctctcgtgatggcagtttcatccgattaggattgaataataaaacctcagccaaaggaggcagaatagatacatactacatgtcaagccactgctcaatttgtggtgatatgattcaaggatcagagtccttctgcaacaattgcttgaaaagcgaagctgttgttgccacagtagtcgctggcagaacttcaaagttggagcgagaaatccaacatcttgctgctatatgtggccattgtggcggtgcagactggattgttgaaagtggagtcaagtgtatttcccttgcatgcccagtcttctatgaacggaggaaagttcagagggagctggtagtcgtctcagagtcggcaggagaagcagggtattaccctttctgctgcgctgaactcttttgagaacatttttttggggctgcgtttctctgtccataccgtgtaaattgtggaatctgtaacctttacatcacacgtgtgtatagttgttgtatgtaacactgaagaacatgtactggtgaaagaatacatacaatgtataccgtgtcgctcgctgttcagttaagggtttgttcgattagctcccaatccacatggattaagtgagattaggtgggtttaaatcccagctaagtcaaacctttt

SEQ ID NO: 67459 - DNA, 5343 bp, Zea Mays
atgacgccaaaggctccaagaataactagagaattgaagcctgattggagatcacggggaatcttctccacagccctgctccaccagtcatcaaggctgcaaagagcattgtctggtgattcatatataactggtctcttgagtgaccttgagaaagctttgcagagtggtgttttgattataaaacttcattatgcaatcgacttccttgatctagtctctagatattaccctcatgaagtttctcgagctgcttcccttgttttgagtggtgctgtttctaatagatcatttcagccttatgaatcccacattccatatcttcttcactttttggttgactacaacttgtatggaatggggcacatacatgtcaaaaacttcaagtttcgtcctccattgccagttgattttcatcctaagtcatctcttcgcaggaaggcacagtcagataatttagaaataaatagtccaacagtttggatatcttcaacagtgtcgcattcttctatcctgggtagttctgccccttcgcatcatttgggaggaaccaatttgagcttcgctattcgacagagttcttcaatgcttgaagctgattctagagtagaaggtctcgctatcacattctaacactattgtttgaagatacaaaaatggttcagtcacttgtagcagtttgggaggaacttgaacgattaagactgttggaggaaacaaaatatgctgatctgggtagacctttaagggaagaagttcttaaagattttcttcatggtattaagtatgagagtgccctttctgtgttgttttcacaagaggggccacatcacaaagtttccaccatagaagagtctgaaaggctagaaaggtgcttaaaatcgttgactgatattattgggactgttacattctcacaggataactactgtggtaatattgatgttggtaattctgctgatgtgcaaaacgacaaacccgatgcaagtctttgctcagggtcattagaacaaaacatgcagattatatctccagagagaaacagtgaatatcctgtgtcttcatctgtacaccaaagaacactatctcagttatctgataaaggtgaaaagcatctggatgctgaggctcttggacttttaagctggctggcctcttcacaagctgcagaggaatcaactgatgatgaattaactaatgaagtcatcctcagccctttgtttgccaataagtccattgaagttgctgtggagtctgctcaattggattttgatagcgcttctcagcaggagtgtcaggatattcttgattcagttgaccccattagggcagtagaagaaccaaacatacatacatcttacctcgattctgtgaagtccaattctgctgcttctctgggcaattctattcctcagcttgatgggtcatctgatgagaacccaaaagtctcccaggaatatgatagaagtaaggtcactaggaaatcagtagtatcggcaagttacacatctactaagaagccttcaaaatcagccagtaagtattcaggaactgaacatctctggggttctttgcctctttcttccagaaaaaagaggcaacatggagatgctgatgattcatgcagtgcaatgtcaccgcagaaggatttaagtgcatctaagaagagtacaattgataaggactatcatgataccataggcagcactgattcagaatcttctagttttttaggtgtacatgattcagtttgtcattctgtgagggatttgatgaggcggaggagatcttttcggcgtgaacagttggagtttggttgttctggagctgcaacatgcaccatggataaagagagcgaaactgtgaattctgggggattggaatttcatgatttcacaagtgacatcccaaacttagcactgacacggatggcttttgttcagaagcctccattgaaggatgatgcatgttctggtttggagagcccttcagattgtgagcaacgtggataatatggaggagaataagcagaatgaatcatttcaagatatggaaagcacaggggatgtattgggtgtcccaactcattttcaaaatgatggatcagccctatatttgctgacacatgcactttcgccaccatctgcaggagctgtgggccattggctaacccaacaatctagttccagtattttctcgggttacaccaactatgatggagtcgcagctgataaggaagaggcacacagttctactttatcacggaattctcctaccagatttaccaaggagaattctgcaaataaaatgcatggagatgtgatgggatcggctctatcttacaaagaaagtaaacatttggacgaatggcatgatttttcccagatatcagctggaaatgagaaggataggctcacacctctaagtcaaattggatttcgtgaccctgctagtataggtggcgggcaacaactgactatacttagcgtggaggttttaacagaaagcagaggagagctgcgtcctgatccacggtttgatgccattaatgctgtgtctttggccatcgaagatgatgctgacaatactgttgatgttcatgtgtttatacgtggcaacaatgtcaaatcacataggagaaatctggatggtattgctggctgtaatataaatgtcttccctgaagaaaaggacgttttgaacaatcttattagtgcaatatgttcaattgatcctgatatcctagtcggatgggagattcagttaggatctttaggatttcttgccgaaagagctgcttatctgggtataggcttactgaaaagaatttcaagaacaccacatgagttgaatcatccacctaagatcccagttgataactctagtcaggtgctttctgaaacatcttctgcggatgatattattgatgatgtcagtgagaatgattggagccatactcatgcgagcggtatacatgttggtggaagaattgtgcttaatttatggcgtctcatgcgtgcagaagttaagcttaataattactcccttgaagctgtagctgatgaagtactgaggcgaaagataccactgataccaagcaggatattgaaccgatggtttgcaacaggtcctggacgaggaagacaccgatgcatagaatacattagcaatagagctagaatcaaccttgaaataatgaatcaaatggacctggtgaatcgaacatctgaacttgctcgtgtatttggtattgattttttttctgttctttctcgggggtctcagtatcgtgttgaatctatgctcctgagattggctcatacacagaactaccttgcaatttctcctggaaatcaacaggttgcttctcagccagccatggagtgtttgccgcttgtaatggaaccagagtcggccttctaccctgatccagttgttgtgttggattttcagtccctctatccttcgatgataatagcatataacctttgttattctacatgcttgggaaaagttttcccatcaaagtcagatgtacttggtgtcagctcatattcagcagatccacatacacttgtagatctgaaaaatcagctgctgcttactccaaatggggtcctgtatgttcaacctgagataagaaaaggtgtacttcctcgccttctagaggagatattgtcaacaagaattatggtgaaacaagcaatgaaaaagttgagtccatcacagcaagttcttcacaggatattcaatgcacggcagcttgctttgaagctgatagctaatgtcacgtatggttacacagctgctggattcagtggtcgaatgccttgtgcagagcttgcagacagcattgttcagtgtggccgtagaacactcgaaacagcaatatcatttgtcaaccagcatcctttgtggaaagctagggttgtgtatggtgatactgacagtatgtttgttctcctaaaagggcgttctagggaagaagcattcaggatagggaaggagatcgcctcatcaataactgcaatgaatcctgatccagtcacattaaagtttgagaaagtgtaccagccatgcttccttcttacaaagaagagatatgttggctatagctacgagagtcctgaacagaatgagcctgtctttgatgcgaaggggatagaaacagttcggagggacacatgcccagcagttgcaaagattttggaacggtctatcagaataatgtttgaagaacaggatttgaccaaagtcaggacatatttggagcgtcagtggacacacatattatcaggaaaagtctctattctagatttcatttttgcgaaggaggtccgtttaggcacttatagtgcaagggcttccacgctgccccctgcagcaattgttgcaacaaaagctatgttgtctgacccaagggcagagcctcggtatgcagagagagtgccatatgttgtaatccatggggaaccaggagctcgtcttgccgacatggttattgatccttatggtctgctagaagttggctccccttatagattaaatgaacaatattacataaccaagcagattattcctgcattgcagcgtgtttttggacttcttggtgctgacctgaacaagtggtttaatgagatgcctcgccccatacgatcaactcttgcgaaacgccaatttgctgctgctcatggttcattctctcgtgatggcagtttcatccgattaggattgaataataaaacctcagccaaaggaggcagaatagatacatactacatgtcaagccactgctcaatttgtggtgatatgattcaaggatcagagtccttctgcaacaattgcttgaaaagcgaagctgttgttgccacagtagtcgctggcagaacttcaaagttggagcgagaaatccaacatcttgctgctatatgtggccattgtggcggtgcagactggattgttgaaagtggagtcaagtgtatttcccttgcatgcccagtcttctatgaacggaggaaagttcagagggagctggtagtcgtctcagagtcggcaggagaagcagggtattaccctttctgctgcgctgaactcttttgagaacatttttttggggctgcgtttctctgtccataccgtgtaaattgtggaatctgtaacctttacatcacacgtgtgtatagttgttgtatgtaacactgaagaacatgtactggtgaaagaatacatacaatgtataccgtgtcgctcgctgttcagttaagggtttgttcgattagctcccaatccacatggattaagtgagattaggtgggtttaaatcccagctaagtcaaacctttt

SEQ ID NO: 67460 - DNA, 5623 bp, Zea Mays
atataccttgttcggaggagctgctttgtaatctagaaaaaggtgattcatatataactggtctcttgagtgaccttgagaaagctttgcaggctcgcggtccatcaaaaaggaagcatgtgcatggatgtaaccttgttagagcaaagaagttgtacggctaccattcgtccgaggagctttttatgaagatctatctatattaccctcatgaagtttctcgagctgcttcccttgttttgagtggtgctgtttctaatagatcatttcagccttatgaatcccacattccatatcttcttcactttttggttgactacaacttgtatggaatggggcacatacatgtcaaaaacttcaagtttcgtcctccattgccagttgattttcatcctaagtcatctcttcgcaggaaggtgggattgttttactgcattagagctcaaatatgctgtacctccgtcttgaaaaattgcagttctagttctgtcccttagtcaaactatctaaaatttggccaagtttaccagagcaatatataatgaaaatatattccatgacaaatctaatgatacttatttataataaatattgatcctttgtttgtaaaaaattggtcaaacttcagatggtttgaatcgtactttgctagaactgcttctggacggagggagcatttgtttatgtcgtaatattcattttattttgagttcagactttattctttgttcgtactaaaaacttcattttttcttctggactaacaatggtaggcacagtcagataatttagaaataaatagtccaacagtttggatatcttcaacagtgtcgcattcttctatcctgggtagttctgccccttcgcatcatttgggaggaaccaatttgagcttcgctattcgacagagttcttcaatgcttgaagctgattctagagtagaaggtatcctaaatgagaaatataagatgtacacttctctttctcaaacaacagaagatacaaaaatggttcagtcacttgtagcagtttgggaggtttgttttctactttgtttgtgtacatgtgctatgaaatgttaataactgctaaacctctatgttattatgttcaggaacttgaacgattaagactgttggaggaaacaaaatatgctgatctgggtagacctttaagggaagaagttcttaaagattttcttcatggtattaagtatgagagtgccctttctgtgttgttttcacaagaggggccacatcacaaagtttccaccatagaagagtctgaaaggctagaaaggtgcttaaaatcgttgactgatattattgggactgttacattctcacaggataactactgtggtaatattgatgttggtaattctgctgatgtgcaaaacgacaaacccgatgcaagtctttgctcagggtcattagaacaaaacatgcagattatatctccagagagaaacagtgaatatcctgtgtcttcatctgtacaccaaagaacactatctcagttatctgataaaggtgaaaagcatctggatgctgaggctcttggacttttaagctggctggcctcttcacaagctgcagaggaatcaactgatgatgaattaactaatgaagtcatcctcagccctttgtttgccaataagtccattgaagttgctgtggagtctgctcaattggattttgatagcgcttctcagcaggagtgtcaggatattcttgattcagttgaccccattagggcagtagaagaaccaaacatacatacatcttacctcgattctgtgaaaaaaaagaggcaacatggagatgctgatgattcatgcagtgcaatgtcaccgcagaaggatttaagtgcatctaagaagagtacaattgataaggactatcatgataccataggcagcactgattcagaatcttctagttttttaggtgtacatgattcagtttgtcattctgtgagggatttgatgaggcggaggagatcttttcggcgtgaacagttggagtttggttgttctggagctgcaacatgcaccatggataaagagagcgaaactgtgaattctgggggattggaatttcatgatttcacaagtgacatcccaaacttagcactgacacggatggcttttgttcagaagcctccattgaaggatgatgcatgttctggtttggagagcccttcagattgtgagcaacgtggatgtagaagtcctaggcctttagctgaaaaatcgggattagctgatcttctaccatttttcaatcagaatatggaggagaataagcagaatgaatcatttcaagatatggaaagcacaggggatgtattgggtgtcccaactcattttcaaaatgatggatcagccctatatttgctgacacatgcactttcgccaccatctgcaggagctgtgggccattggctaacccaacaatctagttccagtattttctcgggttacaccaactatgatggagtcgcagctgataaggaagaggcacacagttctactttatcacggaattctcctaccagatttaccaaggagaattctgcaaataaaatgcatggagatgtgatgggatcggctctatcttacaaagaaagtaaacatttggacgaatggcatgatttttcccagatatcagctggaaatgagaaggataggctcacacctctaagtcaaattggatttcgtgaccctgctagtataggtggcgggcaacaactgactatacttagcgtggaggttttaacagaaagcagaggagagctgcgtcctgatccacggtttgatgccattaatgctgtgtctttggccatcgaagatgatgctgacaatactgttgatgttcatgtgtttatacgtggcaacaatgtcaaatcacataggagaaatctggatggtattgctggctgtaatataaatgtcttccctgaagaaaaggacgttttgaacaatcttattagtgcaatatgttcaattgatcctgatatcctagtcggatgggagattcagttaggatctttaggatttcttgccgaaagagctgcttatctgggtataggcttactgaaaagaatttcaagaacaccacatgagttgaatcatccacctaagatcccagttgataactctagtcaggtgctttctgaaacatcttctgcggatgatattattgatgatgtcagtgagaatgattggagccatactcatgcgagcggtatacatgttggtggaagaattgtgcttaatttatggcgtctcatgcgtgcagaagttaagcttaataattactcccttgaagctgtagctgatgaagtactgaggcgaaagataccactgataccaagcaggatattgaaccgatggtttgcaacaggtcctggacgaggaagacaccgatgcatagaatacattagcaatagagctagaatcaaccttgaaataatgaatcaaatggacctggtgaatcgaacatctgaacttgctcgtgtatttggtattgattttttttctgttctttctcgggggtctcagtatcgtgttgaatctatgctcctgagattggctcatacacagaactaccttgcaatttctcctggaaatcaacaggttgcttctcagccagccatggagtgtttgccgcttgtaatggaaccagagtcggccttctaccctgatccagttgttgtgttggattttcagtccctctatccttcgatgataatagcatataacctttgttattctacatgcttgggaaaagttttcccatcaaagtcagatgtacttggtgtcagctcatattcagcagatccacatacacttgtagatctgaaaaatcagctgctgcttactccaaatggggtcctgtatgttcaacctgagataagaaaaggtgtacttcctcgccttctagaggagatattgtcaacaagaattatggtgaaacaagcaatgaaaaagttgagtccatcacagcaagttcttcacaggatattcaatgcacggcagcttgctttgaagctgatagctaatgtcacgtatggttacacagctgctggattcagtggtcgaatgccttgtgcagagcttgcagacagcattgttcagtgtggccgtagaacactcgaaacagcaatatcatttgtcaaccagcatcctttgtggaaagctagggttgtgtatggtgatactgacagtatgtttgttctcctaaaagggcgttctagggaagaagcattcaggatagggaaggagatcgcctcatcaataactgcaatgaatcctgatccagtcacattaaagtttgagaaagtgtaccagccatgcttccttcttacaaagaagagatatgttggctatagctacgagagtcctgaacagaatgagcctgtctttgatgcgaaggggatagaaacagttcggagggacacatgcccagcagttgcaaagattttggaacggtctatcagaataatgtttgaagaacaggatttgaccaaagtcaggacatatttggagcgtcagtggacacacatattatcaggaaaagtctctattctagatttcatttttgcgaaggaggtccgtttaggcacttatagtgcaagggcttccacgctgccccctgcagcaattgttgcaacaaaagctatgttgtctgacccaagggcagagcctcggtatgcagagagagtgccatatgttgtaatccatggggaaccaggagctcgtcttgccgacatggttattgatccttatggtctgctagaagttggctccccttatagattaaatgaacaatattacataaccaagcagattattcctgcattgcagcgtgtttttggacttcttggtgctgacctgaacaagtggtttaatgagatgcctcgccccatacgatcaactcttgcgaaacgccaatttgctgctgctcatggttcattctctcgtgatggcagtttcatccgattaggattgaataataaaacctcagccaaaggaggcagaatagatacatactacatgtcaagccactgctcaatttgtggtgatatgattcaaggatcagagtccttctgcaacaattgcttgaaaagcgaagctgttgttgccacagtagtcgctggcagaacttcaaagttggagcgagaaatccaacatcttgctgctatatgtggccattgtggcggtgcagactggattgttgaaagtggagtcaagtgtatttcccttgcatgcccagtcttctatgaacggaggaaagttcagagggagctggtagtcgtctcagagtcggcaggagaagcagggtattaccctttctgctgcgctgaactcttttgagaacatttttttggggctgcgtttctctgtccataccgtgtaaattgtggaatctgtaacctttacatcacacgtgtgtatagttgttgtatgtaacactgaagaacatgtactggtgaaagaatacatacaatgtataccgtgtcgctcgctgttcagttaagggtttgttcgattagctcccaatccacatggattaagtgagattaggtgggtttaaatcccagctaagtcaaacctttt

SEQ ID NO: 67461 - DNA, 5560 bp, Zea Mays
atataccttgttcggaggagctgctttgtaatctagaaaaaggtgattcatatataactggtctcttgagtgaccttgagaaagctttgcaggctcgcggtccatcaaaaaggaagcatgtgcatggatgtaaccttgttagagcaaagaagttgtacggctaccattcgtccgaggagctttttatgaagatctatctgtaatattaccctcatgaagtttctcgagctgcttcccttgttttgagtggtgctgtttctaatagatcatttcagccttatgaatcccacattccatatcttcttcactttttggttgactacaacttgtatggaatggggcacatacatgtcaaaaacttcaagtttcgtcctccattgccagttgattttcatcctaagtcatctcttcgcaggaaggtgggattgttttactgcattagagctcaaatatgctgtacctccgtcttgaaaaattgcagttctagttctgtcccttagtcaaactatctaaaatttggccaagtttaccagagcaatatataatgaaaatatattccatgacaaatctaatgatacttatttataataaatattgatcctttgtttgtaaaaaattggtcaaacttcagatggtttgaatcgtactttgctagaactgcttctggacggagggagcatttgtttatgtcgtaatattcattttattttgagttcagactttattctttgttcgtactaaaaacttcattttttcttctggactaacaatggtaggcacagtcagataatttagaaataaatagtccaacagtttggatatcttcaacagtgtcgcattcttctatcctgggtagttctgccccttcgcatcatttgggaggaaccaatttgagcttcgctattcgacagagttcttcaatgcttgaagctgattctagagtagaaggtctcgctatcacattctaacactattgtttggtaatatccttaacatgcattataaatttcagttccaccttcaggtatcctaaatgagaaatataagatgtacacttctctttctcaaacaacagaagatacaaaaatggttcagtcacttgtagcagtttgggaggaacttgaacgattaagactgttggaggaaacaaaatatgctgatctgggtagacctttaagggaagaagttcttaaagattttcttcatggtattaagtatgagagtgccctttctgtgttgttttcacaagaggggccacatcacaaagtttccaccatagaagagtctgaaaggctagaaaggtgcttaaaatcgttgactgatattattgggactgttacattctcacaggataactactgtggtaatattgatgttggtaattctgctgatgtgcaaaacgacaaacccgatgcaagtctttgctcagggtcattagaacaaaacatgcagattatatctccagagagaaacagtgaatatcctgtgtcttcatctgtacaccaaagaacactatctcagttatctgataaaggtgaaaagcatctggatgctgaggctcttggacttttaagctggctggcctcttcacaagctgcagaggaatcaactgatgatgaattaactaatgaagtcatcctcagccctttgtttgccaataagtccattgaagttgctgtggagtctgctcaattggattttgatagcgcttctcagcaggagtgtcaggatattcttgattcagttgaccccattagggcagtagaagaaccaaacatacatacatcttacctcgattctgtgaaaaaaaagaggcaacatggagatgctgatgattcatgcagtgcaatgtcaccgcagaaggatttaagtgcatctaagaagagtacaattgataaggactatcatgataccataggcagcactgattcagaatcttctagttttttaggtgtacatgattcagtttgtcattctgtgagggatttgatgaggcggaggagatcttttcggcgtgaacagttggagtttggttgttctggagctgcaacatgcaccatggataaagagagcgaaactgtgaattctgggggattggaatttcatgatttcacaagtgacatcccaaacttagcactgacacggatggcttttgttcagaagcctccattgaaggatgatgcatgttctggtttggagagcccttcagattgtgagcaacgtggataatatggaggagaataagcagaatgaatcatttcaagatatggaaagcacaggggatgtattgggtgtcccaactcattttcaaaatgatggatcagccctatatttgctgacacatgcactttcgccaccatctgcaggagctgtgggccattggctaacccaacaatctagttccagtattttctcgggttacaccaactatgatggagtcgcagctgataaggaagaggcacacagttctactttatcacggaattctcctaccagatttaccaaggagaattctgcaaataaaatgcatggagatgtgatgggatcggctctatcttacaaagaaagtaaacatttggacgaatggcatgatttttcccagatatcagctggaaatgagaaggataggctcacacctctaagtcaaattggatttcgtgaccctgctagtataggtggcgggcaacaactgactatacttagcgtggaggttttaacagaaagcagaggagagctgcgtcctgatccacggtttgatgccattaatgctgtgtctttggccatcgaagatgatgctgacaatactgttgatgttcatgtgtttatacgtggcaacaatgtcaaatcacataggagaaatctggatggtattgctggctgtaatataaatgtcttccctgaagaaaaggacgttttgaacaatcttattagtgcaatatgttcaattgatcctgatatcctagtcggatgggagattcagttaggatctttaggatttcttgccgaaagagctgcttatctgggtataggcttactgaaaagaatttcaagaacaccacatgagttgaatcatccacctaagatcccagttgataactctagtcaggtgctttctgaaacatcttctgcggatgatattattgatgatgtcagtgagaatgattggagccatactcatgcgagcggtatacatgttggtggaagaattgtgcttaatttatggcgtctcatgcgtgcagaagttaagcttaataattactcccttgaagctgtagctgatgaagtactgaggcgaaagataccactgataccaagcaggatattgaaccgatggtttgcaacaggtcctggacgaggaagacaccgatgcatagaatacattagcaatagagctagaatcaaccttgaaataatgaatcaaatggacctggtgaatcgaacatctgaacttgctcgtgtatttggtattgattttttttctgttctttctcgggggtctcagtatcgtgttgaatctatgctcctgagattggctcatacacagaactaccttgcaatttctcctggaaatcaacaggttgcttctcagccagccatggagtgtttgccgcttgtaatggaaccagagtcggccttctaccctgatccagttgttgtgttggattttcagtccctctatccttcgatgataatagcatataacctttgttattctacatgcttgggaaaagttttcccatcaaagtcagatgtacttggtgtcagctcatattcagcagatccacatacacttgtagatctgaaaaatcagctgctgcttactccaaatggggtcctgtatgttcaacctgagataagaaaaggtgtacttcctcgccttctagaggagatattgtcaacaagaattatggtgaaacaagcaatgaaaaagttgagtccatcacagcaagttcttcacaggatattcaatgcacggcagcttgctttgaagctgatagctaatgtcacgtatggttacacagctgctggattcagtggtcgaatgccttgtgcagagcttgcagacagcattgttcagtgtggccgtagaacactcgaaacagcaatatcatttgtcaaccagcatcctttgtggaaagctagggttgtgtatggtgatactgacagtatgtttgttctcctaaaagggcgttctagggaagaagcattcaggatagggaaggagatcgcctcatcaataactgcaatgaatcctgatccagtcacattaaagtttgagaaagtgtaccagccatgcttccttcttacaaagaagagatatgttggctatagctacgagagtcctgaacagaatgagcctgtctttgatgcgaaggggatagaaacagttcggagggacacatgcccagcagttgcaaagattttggaacggtctatcagaataatgtttgaagaacaggatttgaccaaagtcaggacatatttggagcgtcagtggacacacatattatcaggaaaagtctctattctagatttcatttttgcgaaggaggtccgtttaggcacttatagtgcaagggcttccacgctgccccctgcagcaattgttgcaacaaaagctatgttgtctgacccaagggcagagcctcggtatgcagagagagtgccatatgttgtaatccatggggaaccaggagctcgtcttgccgacatggttattgatccttatggtctgctagaagttggctccccttatagattaaatgaacaatattacataaccaagcagattattcctgcattgcagcgtgtttttggacttcttggtgctgacctgaacaagtggtttaatgagatgcctcgccccatacgatcaactcttgcgaaacgccaatttgctgctgctcatggttcattctctcgtgatggcagtttcatccgattaggattgaataataaaacctcagccaaaggaggcagaatagatacatactacatgtcaagccactgctcaatttgtggtgatatgattcaaggatcagagtccttctgcaacaattgcttgaaaagcgaagctgttgttgccacagtagtcgctggcagaacttcaaagttggagcgagaaatccaacatcttgctgctatatgtggccattgtggcggtgcagactggattgttgaaagtggagtcaagtgtatttcccttgcatgcccagtcttctatgaacggaggaaagttcagagggagctggtagtcgtctcagagtcggcaggagaagcagggtattaccctttctgctgcgctgaactcttttgagaacatttttttggggctgcgtttctctgtccataccgtgtaaattgtggaatctgtaacctttacatcacacgtgtgtatagttgttgtatgtaacactgaagaacatgtactggtgaaagaatacatacaatgtataccgtgtcgctcgctgttcagttaagggtttgttcgattagctcccaatccacatggattaagtgagattaggtgggtttaaatcccagctaagtcaaacctttt

SEQ ID NO: 67462 - DNA, 5380 bp, Zea Mays
gacacatttgtcctatcaacgacatacatgtgattcatatataactggtctcttgagtgaccttgagaaagctttgcaggctcgcggtccatcaaaaaggaagcatgtgcatggatgtaaccttgttagagcaaagaagttgtacggctaccattcgtccgaggagctttttatgaagatctatctatattaccctcatgaagtttctcgagctgcttcccttgttttgagtggtgctgtttctaatagatcatttcagccttatgaatcccacattccatatcttcttcactttttggttgactacaacttgtatggaatggggcacatacatgtcaaaaacttcaagtttcgtcctccattgccagttgattttcatcctaagtcatctcttcgcaggaaggcacagtcagataatttagaaataaatagtccaacagtttggatatcttcaacagtgtcgcattcttctatcctgggtagttctgccccttcgcatcatttgggaggaaccaatttgagcttcgctattcgacagagttcttcaatgcttgaagctgattctagagtagaagttccaccttcaggtatcctaaatgagaaatataagatgtacacttctctttctcaaacaacagaagatacaaaaatggttcagtcacttgtagcagtttgggaggaacttgaacgattaagactgttggaggaaacaaaatatgctgatctgggtagacctttaagggaagaagttcttaaagattttcttcatggtattaagtatgagagtgccctttctgtgttgttttcacaagaggggccacatcacaaagtttccaccatagaagagtctgaaaggctagaaaggtgcttaaaatcgttgactgatattattgggactgttacattctcacaggataactactgtggtaatattgatgttggtaattctgctgatgtgcaaaacgacaaacccgatgcaagtctttgctcagggtcattagaacaaaacatgcagattatatctccagagagaaacagtgaatatcctgtgtcttcatctgtacaccaaagaacactatctcagttatctgataaaggtgaaaagcatctggatgctgaggctcttggacttttaagctggctggcctcttcacaagctgcagaggaatcaactgatgatgaattaactaatgaagtcatcctcagccctttgtttgccaataagtccattgaagttgctgtggagtctgctcaattggattttgatagcgcttctcagcaggagtgtcaggatattcttgattcagttgaccccattagggcagtagaagaaccaaacatacatacatcttacctcgattctgtgaagtccaattctgctgcttctctgggcaattctattcctcagcttgatgggtcatctgatgagaacccaaaagtctcccaggaatatgatagaagtaaggtcactaggaaatcagtagtatcggcaagttacacatctactaagaagccttcaaaatcagccagtaagtattcaggaactgaacatctctggggttctttgcctctttcttccagaaaaaagaggcaacatggagatgctgatgattcatgcagtgcaatgtcaccgcagaaggatttaagtgcatctaagaagagtacaattgataaggactatcatgataccataggcagcactgattcagaatcttctagttttttaggtgtacatgattcagtttgtcattctgtgagggatttgatgaggcggaggagatcttttcggcgtgaacagttggagtttggttgttctggagctgcaacatgcaccatggataaagagagcgaaactgtgaattctgggggattggaatttcatgatttcacaagtgacatcccaaacttagcactgacacggatggcttttgttcagaagcctccattgaaggatgatgcatgttctggtttggagagcccttcagattgtgagcaacgtggatctgaaaaatcgggattagctgatcttctaccatttttcaatcagaatatggaggagaataagcagaatgaatcatttcaagatatggaaagcacaggggatgtattgggtgtcccaactcattttcaaaatgatggatcagccctatatttgctgacacatgcactttcgccaccatctgcaggagctgtgggccattggctaacccaacaatctagttccagtattttctcgggttacaccaactatgatggagtcgcagctgataaggaagaggcacacagttctactttatcacggaattctcctaccagatttaccaaggagaattctgcaaataaaatgcatggagatgtgatgggatcggctctatcttacaaagaaagtaaacatttggacgaatggcatgatttttcccagatatcagctggaaatgagaaggataggctcacacctctaagtcaaattggatttcgtgaccctgctagtataggtggcgggcaacaactgactatacttagcgtggaggttttaacagaaagcagaggagagctgcgtcctgatccacggtttgatgccattaatgctgtgtctttggccatcgaagatgatgctgacaatactgttgatgttcatgtgtttatacgtggcaacaatgtcaaatcacataggagaaatctggatggtattgctggctgtaatataaatgtcttccctgaagaaaaggacgttttgaacaatcttattagtgcaatatgttcaattgatcctgatatcctagtcggatgggagattcagttaggatctttaggatttcttgccgaaagagctgcttatctgggtataggcttactgaaaagaatttcaagaacaccacatgagttgaatcatccacctaagatcccagttgataactctagtcaggtgctttctgaaacatcttctgcggatgatattattgatgatgtcagtgagaatgattggagccatactcatgcgagcggtatacatgttggtggaagaattgtgcttaatttatggcgtctcatgcgtgcagaagttaagcttaataattactcccttgaagctgtagctgatgaagtactgaggcgaaagataccactgataccaagcaggatattgaaccgatggtttgcaacaggtcctggacgaggaagacaccgatgcatagaatacattagcaatagagctagaatcaaccttgaaataatgaatcaaatggacctggtgaatcgaacatctgaacttgctcgtgtatttggtattgattttttttctgttctttctcgggggtctcagtatcgtgttgaatctatgctcctgagattggctcatacacagaactaccttgcaatttctcctggaaatcaacaggttgcttctcagccagccatggagtgtttgccgcttgtaatggaaccagagtcggccttctaccctgatccagttgttgtgttggattttcagtccctctatccttcgatgataatagcatataacctttgttattctacatgcttgggaaaagttttcccatcaaagtcagatgtacttggtgtcagctcatattcagcagatccacatacacttgtagatctgaaaaatcagctgctgcttactccaaatggggtcctgtatgttcaacctgagataagaaaaggtgtacttcctcgccttctagaggagatattgtcaacaagaattatggtgaaacaagcaatgaaaaagttgagtccatcacagcaagttcttcacaggatattcaatgcacggcagcttgctttgaagctgatagctaatgtcacgtatggttacacagctgctggattcagtggtcgaatgccttgtgcagagcttgcagacagcattgttcagtgtggccgtagaacactcgaaacagcaatatcatttgtcaaccagcatcctttgtggaaagctagggttgtgtatggtgatactgacagtatgtttgttctcctaaaagggcgttctagggaagaagcattcaggatagggaaggagatcgcctcatcaataactgcaatgaatcctgatccagtcacattaaagtttgagaaagtgtaccagccatgcttccttcttacaaagaagagatatgttggctatagctacgagagtcctgaacagaatgagcctgtctttgatgcgaaggggatagaaacagttcggagggacacatgcccagcagttgcaaagattttggaacggtctatcagaataatgtttgaagaacaggatttgaccaaagtcaggacatatttggagcgtcagtggacacacatattatcaggaaaagtctctattctagatttcatttttgcgaaggaggtccgtttaggcacttatagtgcaagggcttccacgctgccccctgcagcaattgttgcaacaaaagctatgttgtctgacccaagggcagagcctcggtatgcagagagagtgccatatgttgtaatccatggggaaccaggagctcgtcttgccgacatggttattgatccttatggtctgctagaagttggctccccttatagattaaatgaacaatattacataaccaagcagattattcctgcattgcagcgtgtttttggacttcttggtgctgacctgaacaagtggtttaatgagatgcctcgccccatacgatcaactcttgcgaaacgccaatttgctgctgctcatggttcattctctcgtgatggcagtttcatccgattaggattgaataataaaacctcagccaaaggaggcagaatagatacatactacatgtcaagccactgctcaatttgtggtgatatgattcaaggatcagagtccttctgcaacaattgcttgaaaagcgaagctgttgttgccacagtagtcgctggcagaacttcaaagttggagcgagaaatccaacatcttgctgctatatgtggccattgtggcggtgcagactggattgttgaaagtggagtcaagtgtatttcccttgcatgcccagtcttctatgaacggaggaaagttcagagggagctggtagtcgtctcagagtcggcaggagaagcagggtattaccctttctgctgcgctgaactcttttgagaacatttttttggggctgcgtttctctgtccataccgtgtaaattgtggaatctgtaacctttacatcacacgtgtgtatagttgttgtatgtaacactgaagaacatgtactggtgaaagaatacatacaatgtataccgtgtcgctcgctgttcagttaagggtttgttcgattagctcccaatccacatggattaagtgagattaggtgggtttaaatcccagctaagtcaaacctttt

SEQ ID NO: 67463 - DNA, 5100 bp, Zea Mays
gatgtaaccttgttagagcaaagaagttgtacggctaccattcgtccgaggagctttttatgaagatctatcttctctagatattaccctcatgaagtttctcgagctgcttcccttgttttgagtggtgctgtttctaatagatcatttcagccttatgaatcccacattccatatcttcttcactttttggttgactacaacttgtatggaatggggcacatacatgtcaaaaacttcaagtttcgtcctccattgccagttgattttcatcctaagtcatctcttcgcaggaaggcacagtcagataatttagaaataaatagtccaacagtttggatatcttcaacagtgtcgcattcttctatcctgggtagttctgccccttcgcatcatttgggaggaaccaatttgagcttcgctattcgacagagttcttcaatgcttgaagctgattctagagtagaagttccaccttcaggtatcctaaatgagaaatataagatgtacacttctctttctcaaacaacagaagatacaaaaatggttcagtcacttgtagcagtttgggaggaacttgaacgattaagactgttggaggaaacaaaatatgctgatctgggtagacctttaagggaagaagttcttaaagattttcttcatggtattaagtatgagagtgccctttctgtgttgttttcacaagaggggccacatcacaaagtttccaccatagaagagtctgaaaggctagaaaggtgcttaaaatcgttgactgatattattgggactgttacattctcacaggataactactgtggtaatattgatgttggtaattctgctgatgtgcaaaacgacaaacccgatgcaagtctttgctcagggtcattagaacaaaacatgcagattatatctccagagagaaacagtgaatatcctgtgtcttcatctgtacaccaaagaacactatctcagttatctgataaaggtgaaaagcatctggatgctgaggctcttggacttttaagctggctggcctcttcacaagctgcagaggaatcaactgatgatgaattaactaatgaagtcatcctcagccctttgtttgccaataagtccattgaagttgctgtggagtctgctcaattggattttgatagcgcttctcagcaggagtgtcaggatattcttgattcagttgaccccattagggcagtagaagaaccaaacatacatacatcttacctcgattctgtgaagtccaattctgctgcttctctgggcaattctattcctcagcttgatgggtcatctgatgagaacccaaaagtctcccaggaatatgatagaagtaaggtcactaggaaatcagtagtatcggcaagttacacatctactaagaagccttcaaaatcagccagtaagtattcaggaactgaacatctctggggttctttgcctctttcttccagaaaaaagaggcaacatggagatgctgatgattcatgcagtgcaatgtcaccgcagaaggatttaagtgcatctaagaagagtacaattgataaggactatcatgataccataggcagcactgattcagaatcttctagttttttaggtgtacatgattcagtttgtcattctgtgagggatttgatgaggcggaggagatcttttcggcgtgaacagttggagtttggttgttctggagctgcaacatgcaccatggataaagagagcgaaactgtgaattctgggggattggaatttcatgatttcacaagtgacatcccaaacttagcactgacacggatggcttttgttcagaagcctccattgaaggatgatgcatgttctggtttggagagcccttcagattgtgagcaacgtggatctgaaaaatcgggattagctgatcttctaccatttttcaatcagaatatggaggagaataagcagaatgaatcatttcaagatatggaaagcacaggggatgtattgggtgtcccaactcattttcaaaatgatggatcagccctatatttgctgacacatgcactttcgccaccatctgcaggagctgtgggccattggctaacccaacaatctagttccagtattttctcgggttacaccaactatgatggagtcgcagctgataaggaagaggcacacagttctactttatcacggaattctcctaccagatttaccaaggagaattctgcaaataaaatgcatggagatgttttaacagaaagcagaggagagctgcgtcctgatccacggtttgatgccattaatgctgtgtctttggccatcgaagatgatgctgacaatactgttgatgttcatgtgtttatacgtggcaacaatgtcaaatcacataggagaaatctggatggtattgctggctgtaatataaatgtcttccctgaagaaaaggacgttttgaacaatcttattagtgcaatatgttcaattgatcctgatatcctagtcggatgggagattcagttaggatctttaggatttcttgccgaaagagctgcttatctgggtataggcttactgaaaagaatttcaagaacaccacatgagttgaatcatccacctaagatcccagttgataactctagtcaggtgctttctgaaacatcttctgcggatgatattattgatgatgtcagtgagaatgattggagccatactcatgcgagcggtatacatgttggtggaagaattgtgcttaatttatggcgtctcatgcgtgcagaagttaagcttaataattactcccttgaagctgtagctgatgaagtactgaggcgaaagataccactgataccaagcaggatattgaaccgatggtttgcaacaggtcctggacgaggaagacaccgatgcatagaatacattagcaatagagctagaatcaaccttgaaataatgaatcaaatggacctggtgaatcgaacatctgaacttgctcgtgtatttggtattgattttttttctgttctttctcgggggtctcagtatcgtgttgaatctatgctcctgagattggctcatacacagaactaccttgcaatttctcctggaaatcaacaggttgcttctcagccagccatggagtgtttgccgcttgtaatggaaccagagtcggccttctaccctgatccagttgttgtgttggattttcagtccctctatccttcgatgataatagcatataacctttgttattctacatgcttgggaaaagttttcccatcaaagtcagatgtacttggtgtcagctcatattcagcagatccacatacacttgtagatctgaaaaatcagctgctgcttactccaaatggggtcctgtatgttcaacctgagataagaaaaggtgtacttcctcgccttctagaggagatattgtcaacaagaattatggtgaaacaagcaatgaaaaagttgagtccatcacagcaagttcttcacaggatattcaatgcacggcagcttgctttgaagctgatagctaatgtcacgtatggttacacagctgctggattcagtggtcgaatgccttgtgcagagcttgcagacagcattgttcagtgtggccgtagaacactcgaaacagcaatatcatttgtcaaccagcatcctttgtggaaagctagggttgtgtatggtgatactgacagtatgtttgttctcctaaaagggcgttctagggaagaagcattcaggatagggaaggagatcgcctcatcaataactgcaatgaatcctgatccagtcacattaaagtttgagaaagtgtaccagccatgcttccttcttacaaagaagagatatgttggctatagctacgagagtcctgaacagaatgagcctgtctttgatgcgaaggggatagaaacagttcggagggacacatgcccagcagttgcaaagattttggaacggtctatcagaataatgtttgaagaacaggatttgaccaaagtcaggacatatttggagcgtcagtggacacacatattatcaggaaaagtctctattctagatttcatttttgcgaaggaggtccgtttaggcacttatagtgcaagggcttccacgctgccccctgcagcaattgttgcaacaaaagctatgttgtctgacccaagggcagagcctcggtatgcagagagagtgccatatgttgtaatccatggggaaccaggagctcgtcttgccgacatggttattgatccttatggtctgctagaagttggctccccttatagattaaatgaacaatattacataaccaagcagattattcctgcattgcagcgtgtttttggacttcttggtgctgacctgaacaagtggtttaatgagatgcctcgccccatacgatcaactcttgcgaaacgccaatttgctgctgctcatggttcattctctcgtgatggcagtttcatccgattaggattgaataataaaacctcagccaaaggaggcagaatagatacatactacatgtcaagccactgctcaatttgtggtgatatgattcaaggatcagagtccttctgcaacaattgcttgaaaagcgaagctgttgttgccacagtagtcgctggcagaacttcaaagttggagcgagaaatccaacatcttgctgctatatgtggccattgtggcggtgcagactggattgttgaaagtggagtcaagtgtatttcccttgcatgcccagtcttctatgaacggaggaaagttcagagggagctggtagtcgtctcagagtcggcaggagaagcagggtattaccctttctgctgcgctgaactcttttgagaacatttttttggggctgcgtttctctgtccataccgtgtaaattgtggaatctgtaacctttacatcacacgtgtgtatagttgttgtatgtaacactgaagaacatgtactggtgaaagaatacatacaatgtataccgtgtcgctcgctgttcagttaagggtttgttcgattagctcccaatccacatggattaagtgagattaggtgggtttaaatcccagctaagtcaaacctttt

SEQ ID NO: 67464 - DNA, 5269 bp, Zea Mays
ctcagagcaggctctcatgccaacaccgccttcgctccgctccactccacttcatgtgtcccagccatccttggcgtgggatcaagcaggactggttgctgccctcaactagttttctttcgagaacccttagctgtgggtgatggactccgagccatatgacgtctgatgatgagtggtgctgtttctaatagatcatttcagccttatgaatcccacattccatatcttcttcactttttggttgactacaacttgtatggaatggggcacatacatgtcaaaaacttcaagtttcgtcctccattgccagttgattttcatcctaagtcatctcttcgcaggaaggcacagtcagataatttagaaataaatagtccaacagtttggatatcttcaacagtgtcgcattcttctatcctgggtagttctgccccttcgcatcatttgggaggaaccaatttgagcttcgctattcgacagagttcttcaatgcttgaagctgattctagagtagaaggtatcctaaatgagaaatataagatgtacacttctctttctcaaacaacagaagatacaaaaatggttcagtcacttgtagcagtttgggaggaacttgaacgattaagactgttggaggaaacaaaatatgctgatctgggtagacctttaagggaagaagttcttaaagattttcttcatggtattaagtatgagagtgccctttctgtgttgttttcacaagaggggccacatcacaaagtttccaccatagaagagtctgaaaggctagaaaggtgcttaaaatcgttgactgatattattgggactgttacattctcacaggataactactgtggtaatattgatgttggtaattctgctgatgtgcaaaacgacaaacccgatgcaagtctttgctcagggtcattagaacaaaacatgcagattatatctccagagagaaacagtgaatatcctgtgtcttcatctgtacaccaaagaacactatctcagttatctgataaaggtgaaaagcatctggatgctgaggctcttggacttttaagctggctggcctcttcacaagctgcagaggaatcaactgatgatgaattaactaatgaagtcatcctcagccctttgtttgccaataagtccattgaagttgctgtggagtctgctcaattggattttgatagcgcttctcagcaggagtgtcaggatattcttgattcagttgaccccattagggcagtagaagaaccaaacatacatacatcttacctcgattctgtgaagtccaattctgctgcttctctgggcaattctattcctcagcttgatgggtcatctgatgagaacccaaaagtctcccaggaatatgatagaagtaaggtcactaggaaatcagtagtatcggcaagttacacatctactaagaagccttcaaaatcagccagtaagtattcaggaactgaacatctctggggttctttgcctctttcttccagaaaaaagaggcaacatggagatgctgatgattcatgcagtgcaatgtcaccgcagaaggatttaagtgcatctaagaagagtacaattgataaggactatcatgataccataggcagcactgattcagaatcttctagttttttaggtgtacatgattcagtttgtcattctgtgagggatttgatgaggcggaggagatcttttcggcgtgaacagttggagtttggttgttctggagctgcaacatgcaccatggataaagagagcgaaactgtgaattctgggggattggaatttcatgatttcacaagtgacatcccaaacttagcactgacacggatggcttttgttcagaagcctccattgaaggatgatgcatgttctggtttggagagcccttcagattgtgagcaacgtggataatatggaggagaataagcagaatgaatcatttcaagatatggaaagcacaggggatgtattgggtgtcccaactcattttcaaaatgatggatcagccctatatttgctgacacatgcactttcgccaccatctgcaggagctgtgggccattggctaacccaacaatctagttccagtattttctcgggttacaccaactatgatggagtcgcagctgataaggaagaggcacacagttctactttatcacggaattctcctaccagatttaccaaggagaattctgcaaataaaatgcatggagatgtgatgggatcggctctatcttacaaagaaagtaaacatttggacgaatggcatgatttttcccagatatcagctggaaatgagaaggataggctcacacctctaagtcaaattggatttcgtgaccctgctagtataggtggcgggcaacaactgactatacttagcgtggaggttttaacagaaagcagaggagagctgcgtcctgatccacggtttgatgccattaatgctgtgtctttggccatcgaagatgatgctgacaatactgttgatgttcatgtgtttatacgtggcaacaatgtcaaatcacataggagaaatctggatggtattgctggctgtaatataaatgtcttccctgaagaaaaggacgttttgaacaatcttattagtgcaatatgttcaattgatcctgatatcctagtcggatgggagattcagttaggatctttaggatttcttgccgaaagagctgcttatctgggtataggcttactgaaaagaatttcaagaacaccacatgagttgaatcatccacctaagatcccagttgataactctagtcaggtgctttctgaaacatcttctgcggatgatattattgatgatgtcagtgagaatgattggagccatactcatgcgagcggtatacatgttggtggaagaattgtgcttaatttatggcgtctcatgcgtgcagaagttaagcttaataattactcccttgaagctgtagctgatgaagtactgaggcgaaagataccactgataccaagcaggatattgaaccgatggtttgcaacaggtcctggacgaggaagacaccgatgcatagaatacattagcaatagagctagaatcaaccttgaaataatgaatcaaatggacctggtgaatcgaacatctgaacttgctcgtgtatttggtattgattttttttctgttctttctcgggggtctcagtatcgtgttgaatctatgctcctgagattggctcatacacagaactaccttgcaatttctcctggaaatcaacaggttgcttctcagccagccatggagtgtttgccgcttgtaatggaaccagagtcggccttctaccctgatccagttgttgtgttggattttcagtccctctatccttcgatgataatagcatataacctttgttattctacatgcttgggaaaagttttcccatcaaagtcagatgtacttggtgtcagctcatattcagcagatccacatacacttgtagatctgaaaaatcagctgctgcttactccaaatggggtcctgtatgttcaacctgagataagaaaaggtgtacttcctcgccttctagaggagatattgtcaacaagaattatggtgaaacaagcaatgaaaaagttgagtccatcacagcaagttcttcacaggatattcaatgcacggcagcttgctttgaagctgatagctaatgtcacgtatggttacacagctgctggattcagtggtcgaatgccttgtgcagagcttgcagacagcattgttcagtgtggccgtagaacactcgaaacagcaatatcatttgtcaaccagcatcctttgtggaaagctagggttgtgtatggtgatactgacagtatgtttgttctcctaaaagggcgttctagggaagaagcattcaggatagggaaggagatcgcctcatcaataactgcaatgaatcctgatccagtcacattaaagtttgagaaagtgtaccagccatgcttccttcttacaaagaagagatatgttggctatagctacgagagtcctgaacagaatgagcctgtctttgatgcgaaggggatagaaacagttcggagggacacatgcccagcagttgcaaagattttggaacggtctatcagaataatgtttgaagaacaggatttgaccaaagtcaggacatatttggagcgtcagtggacacacatattatcaggaaaagtctctattctagatttcatttttgcgaaggaggtccgtttaggcacttatagtgcaagggcttccacgctgccccctgcagcaattgttgcaacaaaagctatgttgtctgacccaagggcagagcctcggtatgcagagagagtgccatatgttgtaatccatggggaaccaggagctcgtcttgccgacatggttattgatccttatggtctgctagaagttggctccccttatagattaaatgaacaatattacataaccaagcagattattcctgcattgcagcgtgtttttggacttcttggtgctgacctgaacaagtggtttaatgagatgcctcgccccatacgatcaactcttgcgaaacgccaatttgctgctgctcatggttcattctctcgtgatggcagtttcatccgattaggattgaataataaaacctcagccaaaggaggcagaatagatacatactacatgtcaagccactgctcaatttgtggtgatatgattcaaggatcagagtccttctgcaacaattgcttgaaaagcgaagctgttgttgccacagtagtcgctggcagaacttcaaagttggagcgagaaatccaacatcttgctgctatatgtggccattgtggcggtgcagactggattgttgaaagtggagtcaagtgtatttcccttgcatgcccagtcttctatgaacggaggaaagttcagagggagctggtagtcgtctcagagtcggcaggagaagcagggtattaccctttctgctgcgctgaactcttttgagaacatttttttggggctgcgtttctctgtccataccgtgtaaattgtggaatctgtaacctttacatcacacgtgtgtatagttgttgtatgtaacactgaagaacatgtactggtgaaagaatacatacaatgtataccgtgtcgctcgctgttcagttaagggtttgttcgattagctcccaatccacatggattaagtgagattaggtgggtttaaatcccagctaagtcaaacctttt

SEQ ID NO: 67465 - DNA, 4877 bp, Zea Mays
ctcagagcaggctctcatgccaacaccgccttcgctccgctccactccacttcatgtgtcccagccatccttggcgtgggatcaagcaggactggttgctgccctcaactagttttctttcgagaacccttagctgtgggtgatggactccgagccatatgacgtctgatgatgagtggtgctgtttctaatagatcatttcagccttatgaatcccacattccatatcttcttcactttttggttgactacaacttgtatggaatggggcacatacatgtcaaaaacttcaagtttcgtcctccattgccagttgattttcatcctaagtcatctcttcgcaggaaggcacagtcagataatttagaaataaatagtccaacagtttggatatcttcaacagtgtcgcattcttctatcctgggtagttctgccccttcgcatcatttgggaggaaccaatttgagcttcgctattcgacagagttcttcaatgcttgaagctgattctagagtagaagttccaccttcaggtatcctaaatgagaaatataagatgtacacttctctttctcaaacaacagaagatacaaaaatggttcagtcacttgtagcagtttgggaggaacttgaacgattaagactgttggaggaaacaaaatatgctgatctgggtagacctttaagggaagaagttcttaaagattttcttcatggtattaagtatgagagtgccctttctgtgttgttttcacaagaggggccacatcacaaagtttccaccatagaagagtctgaaaggctagaaaggtgcttaaaatcgttgactgatattattgggactgttacattctcacaggataactactgtggtaatattgatgttggtaattctgctgatgtgcaaaacgacaaacccgatgcaagtctttgctcagggtcattagaacaaaacatgcagattatatctccagagagaaacagtgaatatcctgtgtcttcatctgtacaccaaagaacactatctcagttatctgataaaggtgaaaagcatctggatgctgaggctcttggacttttaagctggctggcctcttcacaagctgcagaggaatcaactgatgatgaattaactaatgaagtcatcctcagccctttgtttgccaataagtccattgaagttgctgtggagtctgctcaattggattttgatagcgcttctcagcaggagtgtcaggatattcttgattcagttgaccccattagggcagtagaagaaccaaacatacatacatcttacctcgattctgtgaaaaaaaagaggcaacatggagatgctgatgattcatgcagtgcaatgtcaccgcagaaggatttaagtgcatctaagaagagtacaattgataaggactatcatgataccataggcagcactgattcagaatcttctagttttttaggtgtacatgattcagtttgtcattctgtgagggatttgatgaggcggaggagatcttttcggcgtgaacagttggagtttggttgttctggagctgcaacatgcaccatggataaagagagcgaaactgtgaattctgggggattggaatttcatgatttcacaagtgacatcccaaacttagcactgacacggatggcttttgttcagaagcctccattgaaggatgatgcatgttctggtttggagagcccttcagattgtgagcaacgtggatctgaaaaatcgggattagctgatcttctaccatttttcaatcagaatatggaggagaataagcagaatgaatcatttcaagatatggaaagcacaggggatgtattgggtgtcccaactcattttcaaaatgatggatcagccctatatttgctgacacatgcactttcgccaccatctgcaggagctgtgggccattggctaacccaacaatctagttccagtattttctcgggttacaccaactatgatggagtcgcagctgataaggaagaggcacacagttctactttatcacggaattctcctaccagatttaccaaggagaattctgcaaataaaatgcatggagatgttttaacagaaagcagaggagagctgcgtcctgatccacggtttgatgccattaatgctgtgtctttggccatcgaagatgatgctgacaatactgttgatgttcatgtgtttatacgtggcaacaatgtcaaatcacataggagaaatctggatggtattgctggctgtaatataaatgtcttccctgaagaaaaggacgttttgaacaatcttattagtgcaatatgttcaattgatcctgatatcctagtcggatgggagattcagttaggatctttaggatttcttgccgaaagagctgcttatctgggtataggcttactgaaaagaatttcaagaacaccacatgagttgaatcatccacctaagatcccagttgataactctagtcaggtgctttctgaaacatcttctgcggatgatattattgatgatgtcagtgagaatgattggagccatactcatgcgagcggtatacatgttggtggaagaattgtgcttaatttatggcgtctcatgcgtgcagaagttaagcttaataattactcccttgaagctgtagctgatgaagtactgaggcgaaagataccactgataccaagcaggatattgaaccgatggtttgcaacaggtcctggacgaggaagacaccgatgcatagaatacattagcaatagagctagaatcaaccttgaaataatgaatcaaatggacctggtgaatcgaacatctgaacttgctcgtgtatttggtattgattttttttctgttctttctcgggggtctcagtatcgtgttgaatctatgctcctgagattggctcatacacagaactaccttgcaatttctcctggaaatcaacaggttgcttctcagccagccatggagtgtttgccgcttgtaatggaaccagagtcggccttctaccctgatccagttgttgtgttggattttcagtccctctatccttcgatgataatagcatataacctttgttattctacatgcttgggaaaagttttcccatcaaagtcagatgtacttggtgtcagctcatattcagcagatccacatacacttgtagatctgaaaaatcagctgctgcttactccaaatggggtcctgtatgttcaacctgagataagaaaaggtgtacttcctcgccttctagaggagatattgtcaacaagaattatggtgaaacaagcaatgaaaaagttgagtccatcacagcaagttcttcacaggctgctggattcagtggtcgaatgccttgtgcagagcttgcagacagcattgttcagtgtggccgtagaacactcgaaacagcaatatcatttgtcaaccagcatcctttgtggaaagctagggttgtgtatggtgatactgacagtatgtttgttctcctaaaagggcgttctagggaagaagcattcaggatagggaaggagatcgcctcatcaataactgcaatgaatcctgatccagtcacattaaagtttgagaaagtgtaccagccatgcttccttcttacaaagaagagatatgttggctatagctacgagagtcctgaacagaatgagcctgtctttgatgcgaaggggatagaaacagttcggagggacacatgcccagcagttgcaaagattttggaacggtctatcagaataatgtttgaagaacaggatttgaccaaagtcaggacatatttggagcgtcagtggacacacatattatcaggaaaagtctctattctagatttcatttttgcgaaggaggtccgtttaggcacttatagtgcaagggcttccacgctgccccctgcagcaattgttgcaacaaaagctatgttgtctgacccaagggcagagcctcggtatgcagagagagtgccatatgttgtaatccatggggaaccaggagctcgtcttgccgacatggttattgatccttatggtctgctagaagttggctccccttatagattaaatgaacaatattacataaccaagcagattattcctgcattgcagcgtgtttttggacttcttggtgctgacctgaacaagtggtttaatgagatgcctcgccccatacgatcaactcttgcgaaacgccaatttgctgctgctcatggttcattctctcgtgatggcagtttcatccgattaggattgaataataaaacctcagccaaaggaggcagaatagatacatactacatgtcaagccactgctcaatttgtggtgatatgattcaaggatcagagtccttctgcaacaattgcttgaaaagcgaagctgttgttgccacagtagtcgctggcagaacttcaaagttggagcgagaaatccaacatcttgctgctatatgtggccattgtggcggtgcagactggattgttgaaagtggagtcaagtgtatttcccttgcatgcccagtcttctatgaacggaggaaagttcagagggagctggtagtcgtctcagagtcggcaggagaagcagggtattaccctttctgctgcgctgaactcttttgagaacatttttttggggctgcgtttctctgtccataccgtgtaaattgtggaatctgtaacctttacatcacacgtgtgtatagttgttgtatgtaacactgaagaacatgtactggtgaaagaatacatacaatgtataccgtgtcgctcgctgttcagttaagggtttgttcgattagctcccaatccacatggattaagtgagattaggtgggtttaaatcccagctaagtcaaacctttt

SEQ ID NO: 67466 - DNA, 5312 bp, Zea Mays
cttcgctccgctccactccacttcatgtgtcccagccatccttggcgtgggatcaagcaggactggttgctgccctcaactagttttctttcgagaacccttagctgtgggtgatggactccgagccatatgacgtctgatgatgagtggtgctgtttctaatagatcatttcagccttatgaatcccacattccatatcttcttcactttttggttgactacaacttgtatggaatggggcacatacatgtcaaaaacttcaagtttcgtcctccattgccagttgattttcatcctaagtcatctcttcgcaggaaggcacagtcagataatttagaaataaatagtccaacagtttggatatcttcaacagtgtcgcattcttctatcctgggtagttctgccccttcgcatcatttgggaggaaccaatttgagcttcgctattcgacagagttcttcaatgcttgaagctgattctagagtagaagttccaccttcaggtatcctaaatgagaaatataagatgtacacttctctttctcaaacaacagaagatacaaaaatggttcagtcacttgtagcagtttgggaggtttgttttctactttgtttgtgtacatgtgctatgaaatgttaataactgctaaacctctatgttattatgttcaggaacttgaacgattaagactgttggaggaaacaaaatatgctgatctgggtagacctttaagggaagaagttcttaaagattttcttcatggtattaagtatgagagtgccctttctgtgttgttttcacaagaggggccacatcacaaagtttccaccatagaagagtctgaaaggctagaaaggtgcttaaaatcgttgactgatattattgggactgttacattctcacaggataactactgtggtaatattgatgttggtaattctgctgatgtgcaaaacgacaaacccgatgcaagtctttgctcagggtcattagaacaaaacatgcagattatatctccagagagaaacagtgaatatcctgtgtcttcatctgtacaccaaagaacactatctcagttatctgataaaggtgaaaagcatctggatgctgaggctcttggacttttaagctggctggcctcttcacaagctgcagaggaatcaactgatgatgaattaactaatgaagtcatcctcagccctttgtttgccaataagtccattgaagttgctgtggagtctgctcaattggattttgatagcgcttctcagcaggagtgtcaggatattcttgattcagttgaccccattagggcagtagaagaaccaaacatacatacatcttacctcgattctgtgaagtccaattctgctgcttctctgggcaattctattcctcagcttgatgggtcatctgatgagaacccaaaagtctcccaggaatatgatagaagtaaggtcactaggaaatcagtagtatcggcaagttacacatctactaagaagccttcaaaatcagccagtaagtattcaggaactgaacatctctggggttctttgcctctttcttccagaaaaaagaggcaacatggagatgctgatgattcatgcagtgcaatgtcaccgcagaaggatttaagtgcatctaagaagagtacaattgataaggactatcatgataccataggcagcactgattcagaatcttctagttttttaggtgtacatgattcagtttgtcattctgtgagggatttgatgaggcggaggagatcttttcggcgtgaacagttggagtttggttgttctggagctgcaacatgcaccatggataaagagagcgaaactgtgaattctgggggattggaatttcatgatttcacaagtgacatcccaaacttagcactgacacggatggcttttgttcagaagcctccattgaaggatgatgcatgttctggtttggagagcccttcagattgtgagcaacgtggatctgaaaaatcgggattagctgatcttctaccatttttcaatcagaatatggaggagaataagcagaatgaatcatttcaagatatggaaagcacaggggatgtattgggtgtcccaactcattttcaaaatgatggatcagccctatatttgctgacacatgcactttcgccaccatctgcaggagctgtgggccattggctaacccaacaatctagttccagtattttctcgggttacaccaactatgatggagtcgcagctgataaggaagaggcacacagttctactttatcacggaattctcctaccagatttaccaaggagaattctgcaaataaaatgcatggagatgtgatgggatcggctctatcttacaaagaaagtaaacatttggacgaatggcatgatttttcccagatatcagctggaaatgagaaggataggctcacacctctaagtcaaattggatttcgtgaccctgctagtataggtggcgggcaacaactgactatacttagcgtggaggttttaacagaaagcagaggagagctgcgtcctgatccacggtttgatgccattaatgctgtgtctttggccatcgaagatgatgctgacaatactgttgatgttcatgtgtttatacgtggcaacaatgtcaaatcacataggagaaatctggatggtattgctggctgtaatataaatgtcttccctgaagaaaaggacgttttgaacaatcttattagtgcaatatgttcaattgatcctgatatcctagtcggatgggagattcagttaggatctttaggatttcttgccgaaagagctgcttatctgggtataggcttactgaaaagaatttcaagaacaccacatgagttgaatcatccacctaagatcccagttgataactctagtcaggtgctttctgaaacatcttctgcggatgatattattgatgatgtcagtgagaatgattggagccatactcatgcgagcggtatacatgttggtggaagaattgtgcttaatttatggcgtctcatgcgtgcagaagttaagcttaataattactcccttgaagctgtagctgatgaagtactgaggcgaaagataccactgataccaagcaggatattgaaccgatggtttgcaacaggtcctggacgaggaagacaccgatgcatagaatacattagcaatagagctagaatcaaccttgaaataatgaatcaaatggacctggtgaatcgaacatctgaacttgctcgtgtatttggtattgattttttttctgttctttctcgggggtctcagtatcgtgttgaatctatgctcctgagattggctcatacacagaactaccttgcaatttctcctggaaatcaacaggttgcttctcagccagccatggagtgtttgccgcttgtaatggaaccagagtcggccttctaccctgatccagttgttgtgttggattttcagtccctctatccttcgatgataatagcatataacctttgttattctacatgcttgggaaaagttttcccatcaaagtcagatgtacttggtgtcagctcatattcagcagatccacatacacttgtagatctgaaaaatcagctgctgcttactccaaatggggtcctgtatgttcaacctgagataagaaaaggtgtacttcctcgccttctagaggagatattgtcaacaagaattatggtgaaacaagcaatgaaaaagttgagtccatcacagcaagttcttcacaggctgctggattcagtggtcgaatgccttgtgcagagcttgcagacagcattgttcagtgtggccgtagaacactcgaaacagcaatatcatttgtcaaccagcatcctttgtggaaagctagggttgtgtatggtgatactgacagtatgtttgttctcctaaaagggcgttctagggaagaagcattcaggatagggaaggagatcgcctcatcaataactgcaatgaatcctgatccagtcacattaaagtttgagaaagtgtaccagccatgcttccttcttacaaagaagagatatgttggctatagctacgagagtcctgaacagaatgagcctgtctttgatgcgaaggggatagaaacagttcggagggacacatgcccagcagttgcaaagattttggaacggtctatcagaataatgtttgaagaacaggatttgaccaaagtcaggacatatttggagcgtcagtggacacacatattatcaggaaaagtctctattctagatttcatttttgcgaaggaggtccgtttaggcacttatagtgcaagggcttccacgctgccccctgcagcaattgttgcaacaaaagctatgttgtctgacccaagggcagagcctcggtatgcagagagagtgccatatgttgtaatccatggggaaccaggagctcgtcttgccgacatggttattgatccttatggtctgctagaagttggctccccttatagattaaatgaacaatattacataaccaagcagattattcctgcattgcagcgtgtttttggacttcttggtgctgacctgaacaagtggtttaatgagatgcctcgccccatacgatcaactcttgcgaaacgccaatttgctgctgctcatggttcattctctcgtgatggcagtttcatccgattaggattgaataataaaacctcagccaaaggaggcagaatagatacatactacatgtcaagccactgctcaatttgtggtgatatgattcaaggatcagagtccttctgcaacaattgcttgaaaagcgaagctgttgttgccacagtagtcgctggcagaacttcaaagttggagcgagaaatccaacatcttgctgctatatgtggccattgtggcggtgcagactggattgttgaaagtggagtcaagtgtatttcccttgcatgcccagtcttctatgaacggaggaaagttcagagggagctggtagtcgtctcagagtcggcaggagaagcagggtattaccctttctgctgcgctgaactcttttgagaacatttttttggggctgcgtttctctgtccataccgtgtaaattgtggaatctgtaacctttacatcacacgtgtgtatagttgttgtatgtaacactgaagaacatgtactggtgaaagaatacatacaatgtataccgtgtcgctcgctgttcagttaagggtttgttcgattagctcccaatccacatggattaagtgagattaggtgggtttaaatcccagctaagtcaaacctttt

SEQ ID NO: 67467 - DNA, 4957 bp, Zea Mays
gttttctttcgagaacccttagctgtgggtgatggactccgagccatatgacgtctgatgatgagtggtgctgtttctaatagatcatttcagccttatgaatcccacattccatatcttcttcactttttggttgactacaacttgtatggaatggggcacatacatgtcaaaaacttcaagtttcgtcctccattgccagttgattttcatcctaagtcatctcttcgcaggaaggcacagtcagataatttagaaataaatagtccaacagtttggatatcttcaacagtgtcgcattcttctatcctgggtagttctgccccttcgcatcatttgggaggaaccaatttgagcttcgctattcgacagagttcttcaatgcttgaagctgattctagagtagaagttccaccttcaggtatcctaaatgagaaatataagatgtacacttctctttctcaaacaacagaagatacaaaaatggttcagtcacttgtagcagtttgggaggaacttgaacgattaagactgttggaggaaacaaaatatgctgatctgggtagacctttaagggaagaagttcttaaagattttcttcatggtattaagtatgagagtgccctttctgtgttgttttcacaagaggggccacatcacaaagtttccaccatagaagagtctgaaaggctagaaaggtgcttaaaatcgttgactgatattattgggactgttacattctcacaggataactactgtggtaatattgatgttggtaattctgctgatgtgcaaaacgacaaacccgatgcaagtctttgctcagggtcattagaacaaaacatgcagattatatctccagagagaaacagtgaatatcctgtgtcttcatctgtacaccaaagaacactatctcagttatctgataaaggtgaaaagcatctggatgctgaggctcttggacttttaagctggctggcctcttcacaagctgcagaggaatcaactgatgatgaattaactaatgaagtcatcctcagccctttgtttgccaataagtccattgaagttgctgtggagtctgctcaattggattttgatagcgcttctcagcaggagtgtcaggatattcttgattcagttgaccccattagggcagtagaagaaccaaacatacatacatcttacctcgattctgtgaaaaaaaagaggcaacatggagatgctgatgattcatgcagtgcaatgtcaccgcagaaggatttaagtgcatctaagaagagtacaattgataaggactatcatgataccataggcagcactgattcagaatcttctagttttttaggtgtacatgattcagtttgtcattctgtgagggatttgatgaggcggaggagatcttttcggcgtgaacagttggagtttggttgttctggagctgcaacatgcaccatggataaagagagcgaaactgtgaattctgggggattggaatttcatgatttcacaagtgacatcccaaacttagcactgacacggatggcttttgttcagaagcctccattgaaggatgatgcatgttctggtttggagagcccttcagattgtgagcaacgtggataatatggaggagaataagcagaatgaatcatttcaagatatggaaagcacaggggatgtattgggtgtcccaactcattttcaaaatgatggatcagccctatatttgctgacacatgcactttcgccaccatctgcaggagctgtgggccattggctaacccaacaatctagttccagtattttctcgggttacaccaactatgatggagtcgcagctgataaggaagaggcacacagttctactttatcacggaattctcctaccagatttaccaaggagaattctgcaaataaaatgcatggagatgtgatgggatcggctctatcttacaaagaaagtaaacatttggacgaatggcatgatttttcccagatatcagctggaaatgagaaggataggctcacacctctaagtcaaattggatttcgtgaccctgctagtataggtggcgggcaacaactgactatacttagcgtggaggttttaacagaaagcagaggagagctgcgtcctgatccacggtttgatgccattaatgctgtgtctttggccatcgaagatgatgctgacaatactgttgatgttcatgtgtttatacgtggcaacaatgtcaaatcacataggagaaatctggatggtattgctggctgtaatataaatgtcttccctgaagaaaaggacgttttgaacaatcttattagtgcaatatgttcaattgatcctgatatcctagtcggatgggagattcagttaggatctttaggatttcttgccgaaagagctgcttatctgggtataggcttactgaaaagaatttcaagaacaccacatgagttgaatcatccacctaagatcccagttgataactctagtcaggtgctttctgaaacatcttctgcggatgatattattgatgatgtcagtgagaatgattggagccatactcatgcgagcggtatacatgttggtggaagaattgtgcttaatttatggcgtctcatgcgtgcagaagttaagcttaataattactcccttgaagctgtagctgatgaagtactgaggcgaaagataccactgataccaagcaggatattgaaccgatggtttgcaacaggtcctggacgaggaagacaccgatgcatagaatacattagcaatagagctagaatcaaccttgaaataatgaatcaaatggacctggtgaatcgaacatctgaacttgctcgtgtatttggtattgattttttttctgttctttctcgggggtctcagtatcgtgttgaatctatgctcctgagattggctcatacacagaactaccttgcaatttctcctggaaatcaacaggttgcttctcagccagccatggagtgtttgccgcttgtaatggaaccagagtcggccttctaccctgatccagttgttgtgttggattttcagtccctctatccttcgatgataatagcatataacctttgttattctacatgcttgggaaaagttttcccatcaaagtcagatgtacttggtgtcagctcatattcagcagatccacatacacttgtagatctgaaaaatcagctgctgcttactccaaatggggtcctgtatgttcaacctgagataagaaaaggtgtacttcctcgccttctagaggagatattgtcaacaagaattatggtgaaacaagcaatgaaaaagttgagtccatcacagcaagttcttcacaggatattcaatgcacggcagcttgctttgaagctgatagctaatgtcacgtatggttacacagctgctggattcagtggtcgaatgccttgtgcagagcttgcagacagcattgttcagtgtggccgtagaacactcgaaacagcaatatcatttgtcaaccagcatcctttgtggaaagctagggttgtgtatggtgatactgacagtatgtttgttctcctaaaagggcgttctagggaagaagcattcaggatagggaaggagatcgcctcatcaataactgcaatgaatcctgatccagtcacattaaagtttgagaaagtgtaccagccatgcttccttcttacaaagaagagatatgttggctatagctacgagagtcctgaacagaatgagcctgtctttgatgcgaaggggatagaaacagttcggagggacacatgcccagcagttgcaaagattttggaacggtctatcagaataatgtttgaagaacaggatttgaccaaagtcaggacatatttggagcgtcagtggacacacatattatcaggaaaagtctctattctagatttcatttttgcgaaggaggtccgtttaggcacttatagtgcaagggcttccacgctgccccctgcagcaattgttgcaacaaaagctatgttgtctgacccaagggcagagcctcggtatgcagagagagtgccatatgttgtaatccatggggaaccaggagctcgtcttgccgacatggttattgatccttatggtctgctagaagttggctccccttatagattaaatgaacaatattacataaccaagcagattattcctgcattgcagcgtgtttttggacttcttggtgctgacctgaacaagtggtttaatgagatgcctcgccccatacgatcaactcttgcgaaacgccaatttgctgctgctcatggttcattctctcgtgatggcagtttcatccgattaggattgaataataaaacctcagccaaaggaggcagaatagatacatactacatgtcaagccactgctcaatttgtggtgatatgattcaaggatcagagtccttctgcaacaattgcttgaaaagcgaagctgttgttgccacagtagtcgctggcagaacttcaaagttggagcgagaaatccaacatcttgctgctatatgtggccattgtggcggtgcagactggattgttgaaagtggagtcaagtgtatttcccttgcatgcccagtcttctatgaacggaggaaagttcagagggagctggtagtcgtctcagagtcggcaggagaagcagggtattaccctttctgctgcgctgaactcttttgagaacatttttttggggctgcgtttctctgtccataccgtgtaaattgtggaatctgtaacctttacatcacacgtgtgtatagttgttgtatgtaacactgaagaacatgtactggtgaaagaatacatacaatgtataccgtgtcgctcgctgttcagttaagggtttgttcgattagctcccaatccacatggattaagtgagattaggtgggtttaaatcccagctaagtcaaacctttt

SEQ ID NO: 67468 - DNA, 2754 bp, Zea Mays
ttgacaggagggcatattggctgactaggatggtgacaatggcaactgataaatctggatggtattgctggctgtaatataaatgtcttccctgaagaaaaggacgttttgaacaatcttattagtgcaatatgttcaattgatcctgatatcctagtcggatgggagattcagttaggatctttaggatttcttgccgaaagagctgcttatctgggtataggcttactgaaaagaatttcaagaacaccacatgagttgaatcatccacctaagatcccagttgataactctagtcaggtgctttctgaaacatcttctgcggatgatattattgatgatgtcagtgagaatgattggagccatactcatgcgagcggtatacatgttggtggaagaattgtgcttaatttatggcgtctcatgcgtgcagaagttaagcttaataattactcccttgaagctgtagctgatgaagtactgaggcgaaagataccactgataccaagcaggatattgaaccgatggtttgcaacaggtcctggacgaggaagacaccgatgcatagaatacattagcaatagagctagaatcaaccttgaaataatgaatcaaatggacctggtgaatcgaacatctgaacttgctcgtgtatttggtattgattttttttctgttctttctcgggggtctcagtatcgtgttgaatctatgctcctgagattggctcatacacagaactaccttgcaatttctcctggaaatcaacaggttgcttctcagccagccatggagtgtttgccgcttgtaatggaaccagagtcggccttctaccctgatccagttgttgtgttggattttcagtccctctatccttcgatgataatagcatataacctttgttattctacatgcttgggaaaagttttcccatcaaagtcagatgtacttggtgtcagctcatattcagcagatccacatacacttgtagatctgaaaaatcagctgctgcttactccaaatggggtcctgtatgttcaacctgagataagaaaaggtgtacttcctcgccttctagaggagatattgtcaacaagaattatggtgaaacaagcaatgaaaaagttgagtccatcacagcaagttcttcacaggatattcaatgcacggcagcttgctttgaagctgatagctaatgtcacgtatggttacacagctgctggattcagtggtcgaatgccttgtgcagagcttgcagacagcattgttcagtgtggccgtagaacactcgaaacagcaatatcatttgtcaaccagcatcctttgtggaaagctagggttgtgtatggtgatactgacagtatgtttgttctcctaaaagggcgttctagggaagaagcattcaggatagggaaggagatcgcctcatcaataactgcaatgaatcctgatccagtcacattaaagtttgagaaagtgtaccagccatgcttccttcttacaaagaagagatatgttggctatagctacgagagtcctgaacagaatgagcctgtctttgatgcgaaggggatagaaacagttcggagggacacatgcccagcagttgcaaagattttggaacggtctatcagaataatgtttgaagaacaggatttgaccaaagtcaggacatatttggagcgtcagtggacacacatattatcaggaaaagtctctattctagatttcatttttgcgaaggaggtccgtttaggcacttatagtgcaagggcttccacgctgccccctgcagcaattgttgcaacaaaagctatgttgtctgacccaagggcagagcctcggtatgcagagagagtgccatatgttgtaatccatggggaaccaggagctcgtcttgccgacatggttattgatccttatggtctgctagaagttggctccccttatagattaaatgaacaatattacataaccaagcagattattcctgcattgcagcgtgtttttggacttcttggtgctgacctgaacaagtggtttaatgagatgcctcgccccatacgatcaactcttgcgaaacgccaatttgctgctgctcatggttcattctctcgtgatggcagtttcatccgattaggattgaataataaaacctcagccaaaggaggcagaatagatacatactacatgtcaagccactgctcaatttgtggtgatatgattcaaggatcagagtccttctgcaacaattgcttgaaaagcgaagctgttgttgccacagtagtcgctggcagaacttcaaagttggagcgagaaatccaacatcttgctgctatatgtggccattgtggcggtgcagactggattgttgaaagtggagtcaagtgtatttcccttgcatgcccagtcttctatgaacggaggaaagttcagagggagctggtagtcgtctcagagtcggcaggagaagcagggtattaccctttctgctgcgctgaactcttttgagaacatttttttggggctgcgtttctctgtccataccgtgtaaattgtggaatctgtaacctttacatcacacgtgtgtatagttgttgtatgtaacactgaagaacatgtactggtgaaagaatacatacaatgtataccgtgtcgctcgctgttcagttaagggtttgttcgattagctcccaatccacatggattaagtgagattaggtgggtttaaatcccagctaagtcaaacctttt

SEQ ID NO: 67469 - DNA, 526 bp, Zea Mays
aaacagggccaaaatataaaaacaaaaagataccaactaacctaaataatctgtcgaaaagcaagcaaatactgtttgcgggccagcgttgggcatggcccacctgccattgttagaggcgttagcccacaggcggacccgaatccagaattcctgtcactgctcgaaatcgatccgatctccgctcgcgctgaagcctgatctccaccgggttcgcagcaggggcgcaggacctcgatcacgaggaggcaggggagcagcatccacaaccacaagccatggcggggagggccaacatccccactaacaactccgccctcatcgcaatcatcgccgacgaggacaccgtcactggcttcttgatggccggcgttggcaatgttgatctgcgcaagaaaaccaactacctcctcgtcgacaacaagacgacagttaaacaaatcgaggatgcgttcaaagaatttactacgagggaggatattgctattgtgctcatcagtcagtatattaatttactgaacctttc

SEQ ID NO: 67470 - DNA, 604 bp, Zea Mays
tgcgattgagcagtagaggcgtgcccccgaggacaccgtcactggcttcttgatggccggcgttggcaatgttgatctgcgcaagaaaaccaactacctcctcgtcgacaacaagacgacagttaaacaaatcgaggatgcgttcaaagaatttactacgagggaggatattgctattgtgctcatcagtcagtatattgccaacatgataaggtttctggtggatagctacaacaagcccgtccctgctattctggagatcccatccaaggaccatccatatgatccagcgcacgactctgtgctctctcgagtgaaatatctgttctctgcagaatcggtggcgtctgataggcgatgaaggcatccttgcgtagcagtacccttcgatgcatctattttgttatggtattgaaaagaagatggcacgtaccattgggtgcgagcgagccagcatgaataataatgagcttgcaaacaatgattggttgaactaaaccaacacaattttttttcataaatggttcgaatgatattttggtgcttgtgtttgattggttattagggaataaaatgcgattgttatgacgaattgattgcccag

SEQ ID NO: 67471 - DNA, 444 bp, Zea Mays
gtaaatcatgaacagtagtaccactgtaccagctagattgccaacatgataaggtttctggtggatagctacaacaagcccgtccctgctattctggagatcccatccaaggaccatccatatgatccagcgcacgactctgtgctctctcgagtgaaatatctgttctctgcagaatcggtggcgtctgataggcgatgaaggcatccttgcgtagcagtacccttcgatgcatctattttgttatggtattgaaaagaagatggcacgtaccattgggtgcgagcgagccagcatgaataataatgagcttgcaaacaatgattggttgaactaaaccaacacaattttttttcataaatggttcgaatgatattttggtgcttgtgtttgattggttattagggaataaaatgcgattgttatgacgaattgattgcccag

SEQ ID NO: 67472 - DNA, 607 bp, Zea Mays
tgacatcagacaggtggtgacaaacatcacagtgatgcacgcgagacctgaaatcatcataccaacgaagggagcggtattcaccgatggttgattcagtgtgaggaattcgtgaaaaatatgatggcagagaatatcgatgtaatgtgcatcaagatatggagagaatgctagaaccaacaaactgactatccacctccaaagttatgagcaccgtacttacaacctatccaagaaaattggcagctttggtttctaatatagaaaggaaaaaaaataacagctggccttcataagttgcaaaacgcagtaattgcctagtgcaaaatatagagttgcacatttcattgatatttgatttgtttaactaaaagtgacggtacaaatgtacggggtatatgatagcaattagtggtcaaaatgagagggtgcactgtctatatcaaccacaaagttgaaaacggcttaaacttagggtcttgaatgaaatggagaatttgcaggtgacgtaaacggaagcaccatatggttccaaaataaaatccatgcgcttggtaggacttgcccagtttatgcagtactgaaatggtcaggggcttaccataag

SEQ ID NO: 67473 - DNA, 6275 bp, Zea Mays
agagagtatatataataattttttttatcggtcctcactagagcccgcgggcaattttggcatccataggccgaacggacgttccagttcgcttcgctctcctcctcaggcgaaaagccgcgggccgcgggccagcccataacgaaaaccagcgtctagtccacccagctaagccaggggaggcgaacgcaaccgcaagagactaccgagggaggaggcagccgcaaaaaggaaccaattaactagaaaatttattctcgcgtgcgacgaaacctcgagacgccgaggcagacgagacgagggaagggggagaccgagggcaaccaagcctgcgaggagcccgcgtccgaatctcgcgatccccaatccgcaggcctcgattcgccgatccggccgcggcagggggagagatcccgcagatcggggacctcgtgctgcttcgattcgagcttcttccagctgacagtcgcccgtccgccccccgtgctggtccgcgagctgctgtgtgctgcctggtggtaggtaggtggttaggcgaagcgggccgtgcccgggtgatgctgtccgtgaggcggcggcaggaggatgcgggcggccgcgtagcggcagcgcagacgcagcagctccggggcggactcggcatggacgacgacgccgagctcgaggagggggaggcctgcggggacgacaccgccttcgtcgaccccgacgtcgcgctctcttacattgacgaaaaacttcaagatgtacttggccattttcagaaggacttcgaaggaggcgtgtctgcagagaatctagggtccaaatttggtggatatggttcatttttacctacgtaccagcgctcccctctcccccaaactagaagtccacttaaggcagcaaatgctacctcaaaatctcccttccaccagtctagcgagggcatgtctcaaaagcctcctgctgtgacagtttcatctaccccccaaagtaatggtcctatggtgcctttttctggcgattcaattaaaaaggaaatacgcccaaccacaaaggctgaagggggttccgtctcccatgattcgtatggaccattgaaatgtcatgaccaaaatagacttaaagtccggataaaagttggctctgataatgttttggcaagaaataatgcggatatctacagtggtctgggccttgatatttcttcaccttcatccatcgaggatagccccgatggccgtgggagcctatcccctgaagttaacaatgtgccacatgaatctccacaaaccatccttcagatcatgacatgcttttcagttcctggaggcttcctgttatcccctctaccagccaatatcttgcaattgacaaaaaaggttgtggcttcgtcaaagaagtgggaatcaaatgtgcacatagaaagtgtacaagaaccatatgaaggccacacgactaaaaaggtaaaatctgatgctaagaaaaagaagctgatagatgcaaaaaattcaaagaacagaaatgatattagtgcagttatgaaaaaggagattgatatagaaacagttgctggtcaaaagatcgtatccgaagctctcaacatatcattgctgtctgatcccagagccatggatgcaaaaggtgagaatcgacttgaagtggaaccagcagaaaacaacttggcgggaactagagatgcccgattgaaagagcggtccactaagaccaactccatgccaatcatagttgaacctgccaaagcagaggcgacggaatgcttagagaacagtagttttggtagttcagaaatggatttttcagcagtaaaagcggaatcaaaatccaaggcagaaaagggagaggcaactttagaagagaggaatacaactaatggcaaagacctaatatcggataggaagcaagaaaagaaaatgaaacctgagagtaaatataacgcctctaactttgaagttagcaatgttataaacgaaagaggtccagctgtttcccggagcatgggcaaagtttctggtaaagaagccttaccttatgacacaaatgaggaaaatagctccaagaatgaggtcaaaaaaatgcagagagaacaaaagaccaatgcttcgagatcttctgatttcctggaggatgagaaacacattcgttcttctgctgcagttaaggagaggaaaagtgacatgcaatccaaatctagccatactggaaagaaacccaaaacaaaatcacatagagatgttagggacaacctgcctgaaggatctcacggaagcaaggaaaaagacacattggagaatgaaagtgcctttggagatctccgaccaaaggaaaagccatggaaatatgacatcgagagggattctgatgcacctgggatctctaggagggagatttcttctagtgtaaagcatgataagcacttggcttctgaggagcagaagatgcatatacctccaccttccactgtatcaactgcaaatgcagctccagttgtgataaaggagcattgggtgagctgtgacatatgtgataaatggcgtctcctaccttatgagatgaatccttcagatcttcctaagaagtggaaatgtagcatgctatattggctacccgggatgaataggtgtgagattagtgaagaggagactacgaatgctctgaatgcactttatgtccctgcccctgcaaatggtattcctgcagttggtcatcctcatgttgcttcaacaggactagtaacatccagcactcccaacatgaatggacatattgagcagaatagaaaaagaaaaaatattccaagtgatggaaattttgtggctgagggttctcacctaacacaggtttcaggtcatccaatgagcaaccaacatgctcctagtaaaactaaaacttatactgatggtatccagtattcggctgagaggcattctgtaagcaaatcagttgacccaataattgaaaagaaaaggtccaagagcaagcatcacagtagctattctgatggaggagatcttgttgaaagacctaagaagcattctaaagtgaaaaacaagagagacttagatcatgatgaatacaaagcttctaagaaaattaggaaagaagagcgacaccattttgatgtagatcggatccttggatctgatttagctagcggagatgttcctgatgaggccaaggctttgcctgcgaagtcagcaacctcaaagggttcaggtgaaaggactgacctttcttcatcaaagcaaaaaagtgcctcacggcataatcgtttggaaacttccaagaaagcaagacaagatgatttagttggtcctgaagacgagagcaagggatattttcaccagtcagatgtacaaagatcagatttgtctagtaagaagaggatagtgaaggaatgggaggagagccagcacaattcagtagctcatgtaagcaaaggagctgtcaaagaaacctatagggaccagaacttaaaggaagcaaagttgaaatcattgaattctgaagagctgttttctatgacgagcaccaaaccaccaaaagttcaacatgctgatcaggttttgtcttatgatggggggcgtatgaacagtgagttagttgaggataacacactctttagtggcaaaagaggtctgcctgaacaagaaaagagcctttctgatcaggctttggacttgggtgaacctgctagtgatgtggcctatattcagacttcagctgtaacttcaagttcttcaaaggcttcggtctcacaaaaaaagaagcagaccactcaagctatgaagacttcaccaattgagcctctttcttcatcaccacggaggaactccaacattgacaaggtctctgtccctcatagtagaatttcaggtaaggatggatctctgaatgctaactcagccactgtgccaatcatggcaaaacaactaaatactgaagttcgcgtagcaagcaatgatcaacggtctagtgaacctgtttcggttggttctccccgaagaaaatctgatagggataatggactggttcagttaactcaaggtcatgcctctgatggttttcatcttgaaaggggtttcaatgaggacctgcagcctgaatctgggagaaaggattccaatgtaaagagctcccatattcctaaagcttctcaccatttgcattctggtgaaaaaaacaactacaatacagatggctctcctatgcaaccaggaaagcatcctgttgatccaaagacatcagtcttggataaatgtgattcaagcatgcatgaaagtaacaaaagcacaaattctcttcaggatagaaatggatcaactcattgcccaccagatggaaatcctctgctcggtttaccatctggaaaagagaaatcatatatcaacagcaacaagcaagattcacagaagcctaaaccccagatggtctgctcacctttgaaagaaaacaaactggattctcactccacaccattaaaacctaatgggtcaaaattgactccacaatcaagacaatacaatgctcaaaatggaggacgacatggcactgcaaagcatgcaattcctagtcctgctgatacttctagtccagctaggaaggacaatacttcaactgcatatgctctcaaagaagcccgggatttaaagcataaggctaatcgtttgaagggagaaggaaaagagcttgaaagtacaagactctactttgagtctgccctaaaatttttgcatgttgcatcacttttggaacctcctagctttgatggattgaaacaaggtgatgcagcccagagcatgtattcagatactgcaaaactttgcaactttgttggtcatgcatatgaaaaatgcaagaagatggctgctgctgctttagcatacaaatgtgttgaagttgcttatctgaaggctgcatactacaaacacccaactgcaagcaaagatagacaagtgttacaggcagttgtacagactgcaccaggtgaatcaccatcatcttcagcctcagacattgataatttaaataacaatggattatccaaggcctcttcaagcaaggatgctaattcaccacaagtggctggaaatcatttgttgctggccgctcgaaatcaaccacacttgatgcggttactagcttatacaaatgatgtcaatagtgcctttgaggctactcggaagtcacacatggcaattgcttctgctgctggcaatcatgaaaatggagtcgatggtcttccttcagtaaaaacagtactggattttaacttccgaagtgtgaatgatctactaaggcttgtgcgaatttcaatggagtccatcagctgctgacgtgttcagaatctgagaaagtgccacccgttggaagttcctgttggatgtttaatccaattaacttttcttgatgaagtagcatgaaactgaatagttcaacagtgaacagtgtaaaagcataggtcttctcatttgagcttgctggtcaatttgtacagagactgatcgtggaattcttccttctttcttattttgatggcacccagttagtatacaaagttgcatatccacttggatgatttagttagtgaggccacaggttaagatgagctttgcactgctcaatgctcgtaatagttttgaggaagaaggatgctcttgcgcatgcagttgatgattcatttgagcagtgcaaaatggtgtgtccctatcttgcgcatgcagttaatgattcatctggaaagcggcttgctactgagcattctcttccgaccgtatcatagtttcctttgagcagtacaagatggtgtgtcgccacttcaattttgatgggagaggacagcaaagccaactaattgtgctaaccaagaaatcagctactatgccatgtcttctggatgaagttcacgcagccagcgcatgtacatggtggggcatttgttaccacgtgctggtctctatgtatgacgcctttggttctgccaagcctgtctttcattattcttcaaattttgtgatatttagttgtttattaaggtatataacgtttagtactgggaatttgttgcagaatgcaaaaatgaattccgtgctgtgcaacttgtatcttaacttgagtttcagctttcagtagggatgataatttaatccaaaacctgacaggtacctgacccactggtgcacccgcatttgacccgagcttttatgagttgtgggtgcgggtttctattttaaaccgtggttgcaagtgtcctaaattttggtttatttttt

SEQ ID NO: 67474 - DNA, 6126 bp, Zea Mays
aattaactagaaaatttattctcgcgtgcgacgaaacctcgagacgccgaggcagacgagacgagggaagggggagaccgagggcaaccaagcctgcgaggagcccgcgtccgaatctcgcgatccccaatccgcaggcctcgattcgccgatccggccgcggcagggggagagatcccgcagatcggggacctcgtgctgcttcgattcgagcttcttccagctgacagtcgcccgtccgccccccgtgctggtccgcgagctgctgtgtgctgcctggtggtaggtaggtggttaggcgaagcgggccgtgcccgggtgatgctgtccgtgaggcggcggcaggaggatgcgggcggccgcgtagcggcagcgcagacgcagcagctccggggcggactcggcatggacgacgacgccgagctcgaggagggggaggcctgcggggacgacaccgccttcgtcgaccccgacgtcgcgctctcttacattgacgaaaaacttcaagatgtacttggccattttcagaaggacttcgaaggaggcgtgtctgcagagaatctagggtccaaatttggtggatatggttcatttttacctacgtaccagcgctcccctctcccccaaactagaagtccacttaaggcagcaaatgctacctcaaaatctcccttccaccagtctagcgagggcatgtctcaaaagcctcctgctgtgacagtttcatctaccccccaaagtaatggtcctatggtgcctttttctggcgattcaattaaaaaggaaatacgcccaaccacaaaggctgaagggggttccgtctcccatgattcgtatggaccattgaaatgtcatgaccaaaatagacttaaagtccggataaaagttggctctgataatgttttggcaagaaataatgcggatatctacagtggtctgggccttgatatttcttcaccttcatccatcgaggatagccccgatggccgtgggagcctatcccctgaagttaacaatgtgccacatgaatctccacaaaccatccttcagatcatgacatgcttttcagttcctggaggcttcctgttatcccctctaccagccaatatcttgcaattgacaaaaaaggttgtggcttcgtcaaagaagtgggaatcaaatgtgcacatagaaagtgtacaagaaccatatgaaggccacacgactaaaaaggtaaaatctgatgctaagaaaaagaagctgatagatgcaaaaaattcaaagaacagaaatgatattagtgcagttatgaaaaaggagattgatatagaaacagttgctggtcaaaagatcgtatccgaagctctcaacatatcattgctgtctgatcccagagccatggatgcaaaaggtgagaatcgacttgaagtggaaccagcagaaaacaacttggcgggaactagagatgcccgattgaaagagcggtccactaagaccaactccatgccaatcatagttgaacctgccaaagcagaggcgacggaatgcttagagaacagtagttttggtagttcagaaatggatttttcagcagtaaaagcggaatcaaaatccaaggcagaaaagggagaggcaactttagaagagaggaatacaactaatggcaaagacctaatatcggataggaagcaagaaaagaaaatgaaacctgagagtaaatataacgcctctaactttgaagttagcaatgttataaacgaaagaggtccagctgtttcccggagcatgggcaaagtttctggtaaagaagccttaccttatgacacaaatgaggaaaatagctccaagaatgaggtcaaaaaaatgcagagagaacaaaagaccaatgcttcgagatcttctgatttcctggaggatgagaaacacattcgttcttctgctgcagttaaggagaggaaaagtgacatgcaatccaaatctagccatactggaaagaaacccaaaacaaaatcacatagagatgttagggacaacctgcctgaaggatctcacggaagcaaggaaaaagacacattggagaatgaaagtgcctttggagatctccgaccaaaggaaaagccatggaaatatgacatcgagagggattctgatgcacctgggatctctaggagggagatttcttctagtgtaaagcatgataagcacttggcttctgaggagcagaagatgcatatacctccaccttccactgtatcaactgcaaatgcagctccagttgtgataaaggagcattgggtgagctgtgacatatgtgataaatggcgtctcctaccttatgagatgaatccttcagatcttcctaagaagtggaaatgtagcatgctatattggctacccgggatgaataggtgtgagattagtgaagaggagactacgaatgctctgaatgcactttatgtccctgcccctgcaaatggtattcctgcagttggtcatcctcatgttgcttcaacaggactagtaacatccagcactcccaacatgaatggacatattgagcagaatagaaaaagaaaaaatattccaagtgatggaaattttgtggctgagggttctcacctaacacaggtttcaggtcatccaatgagcaaccaacatgctcctagtaaaactaaaacttatactgatggtatccagtattcggctgagaggcattctgtaagcaaatcagttgacccaataattgaaaagaaaaggtccaagagcaagcatcacagtagctattctgatggaggagatcttgttgaaagacctaagaagcattctaaagtgaaaaacaagagagacttagatcatgatgaatacaaagcttctaagaaaattaggaaagaagagcgacaccattttgatgtagatcggatccttggatctgatttagctagcggagatgttcctgatgaggccaaggctttgcctgcgaagtcagcaacctcaaagggttcaggtgaaaggactgacctttcttcatcaaagcaaaaaagtgcctcacggcataatcgtttggaaacttccaagaaagcaagacaagatgatttagttggtcctgaagacgagagcaagggatattttcaccagtcagatgtacaaagatcagatttgtctagtaagaagaggatagtgaaggaatgggaggagagccagcacaattcagtagctcatgtaagcaaaggagctgtcaaagaaacctatagggaccagaacttaaaggaagcaaagttgaaatcattgaattctgaagagctgttttctatgacgagcaccaaaccaccaaaagttcaacatgctgatcaggttttgtcttatgatggggggcgtatgaacagtgagttagttgaggataacacactctttagtggcaaaagaggtctgcctgaacaagaaaagagcctttctgatcaggctttggacttgggtgaacctgctagtgatgtggcctatattcagacttcagctgtaacttcaagttcttcaaaggcttcggtctcacaaaaaaagaagcagaccactcaagctatgaagacttcaccaattgagcctctttcttcatcaccacggaggaactccaacattgacaaggtctctgtccctcatagtagaatttcaggtaaggatggatctctgaatgctaactcagccactgtgccaatcatggcaaaacaactaaatactgaagttcgcgtagcaagcaatgatcaacggtctagtgaacctgtttcggttggttctccccgaagaaaatctgatagggataatggactggttcagttaactcaaggtcatgcctctgatggttttcatcttgaaaggggtttcaatgaggacctgcagcctgaatctgggagaaaggattccaatgtaaagagctcccatattcctaaagcttctcaccatttgcattctggtgaaaaaaacaactacaatacagatggctctcctatgcaaccaggaaagcatcctgttgatccaaagacatcagtcttggataaatgtgattcaagcatgcatgaaagtaacaaaagcacaaattctcttcaggatagaaatggatcaactcattgcccaccagatggaaatcctctgctcggtttaccatctggaaaagagaaatcatatatcaacagcaacaagcaagattcacagaagcctaaaccccagatggtctgctcacctttgaaagaaaacaaactggattctcactccacaccattaaaacctaatgggtcaaaattgactccacaatcaagacaatacaatgctcaaaatggaggacgacatggcactgcaaagcatgcaattcctagtcctgctgatacttctagtccagctaggaaggacaatacttcaactgcatatgctctcaaagaagcccgggatttaaagcataaggctaatcgtttgaagggagaaggaaaagagcttgaaagtacaagactctactttgagtctgccctaaaatttttgcatgttgcatcacttttggaacctcctagctttgatggattgaaacaaggtgatgcagcccagagcatgtattcagatactgcaaaactttgcaactttgttggtcatgcatatgaaaaatgcaagaagatggctgctgctgctttagcatacaaatgtgttgaagttgcttatctgaaggctgcatactacaaacacccaactgcaagcaaagatagacaagtgttacaggcagttgtacagactgcaccaggtgaatcaccatcatcttcagcctcagacattgataatttaaataacaatggattatccaaggcctcttcaagcaaggatgctaattcaccacaagtggctggaaatcatttgttgctggccgctcgaaatcaaccacacttgatgcggttactagcttatacaaatgatgtcaatagtgcctttgaggctactcggaagtcacacatggcaattgcttctgctgctggcaatcatgaaaatggagtcgatggtcttccttcagtaaaaacagtactggattttaacttccgaagtgtgaatgatctactaaggcttgtgcgaatttcaatggagtccatcagctgctgacgtgttcagaatctgagaaagtgccacccgttggaagttcctgttggatgtttaatccaattaacttttcttgatgaagtagcatgaaactgaatagttcaacagtgaacagtgtaaaagcataggtcttctcatttgagcttgctggtcaatttgtacagagactgatcgtggaattcttccttctttcttattttgatggcacccagttagtatacaaagttgcatatccacttggatgatttagttagtgaggccacaggttaagatgagctttgcactgctcaatgctcgtaatagttttgaggaagaaggatgctcttgcgcatgcagttgatgattcatttgagcagtgcaaaatggtgtgtccctatcttgcgcatgcagttaatgattcatctggaaagcggcttgctactgagcattctcttccgaccgtatcatagtttcctttgagcagtacaagatggtgtgtcgccacttcaattttgatgggagaggacagcaaagccaactaattgtgctaaccaagaaatcagctactatgccatgtcttctggatgaagttcacgcaggtttcaaataagaaatcacttggactatcggacttgtatgaatgttgtacaaagatctctaatgtacattaaccttttttttttcagccagcgcatgtacatggtggggcatttgttaccacgtgctggtctctatgtatgacgcctttggttctgccaagcctgtctttcattattcttcaaattttgtgatatttagttgtttattaaggtatataacgtttagtactgggaatttgttgcagaatgcaaaaatgaattccgtgctgtgcaacttgtatcttaacttgagtttcagctttcagtagggatgataatttaatccaaaacctgacaggtacctgacccactggtgcacccgcatttgacccgagcttttatgagttgtgggtgcgggtttctattttaaaccgtggttgcaagtgtcctaaattttggtttatttttt

SEQ ID NO: 67475 - DNA, 6105 bp, Zea Mays
aattaactagaaaatttattctcgcgtgcgacgaaacctcgagacgccgaggcagacgagacgagggaagggggagaccgagggcaaccaagcctgcgaggagcccgcgtccgaatctcgcgatccccaatccgcaggcctcgattcgccgatccggccgcggcagggggagagatcccgcagatcggggacctcgtgctgcttcgattcgagcttcttccagctgacagtcgcccgtccgccccccgtgctggtccgcgagctgctgtgtgctgcctggtggtaggtaggtggttaggcgaagcgggccgtgcccgggtgatgctgtccgtgaggcggcggcaggaggatgcgggcggccgcgtagcggcagcgcagacgcagcagctccggggcggactcggcatggacgacgacgccgagctcgaggagggggaggcctgcggggacgacaccgccttcgtcgaccccgacgtcgcgctctcttacattgacgaaaaacttcaagatgtacttggccattttcagaaggacttcgaaggaggcgtgtctgcagagaatctagggtccaaatttggtggatatggttcatttttacctacgtaccagcgctcccctctcccccaaactagaagtccacttaaggcagcaaatgctacctcaaaatctcccttccaccagtctagcgagggcatgtctcaaaagcctcctgctgtgacagtttcatctaccccccaaagtaatggtcctatggtgcctttttctggcgattcaattaaaaaggaaatacgcccaaccacaaaggctgaagggggttccgtctcccatgattcgtatggaccattgaaatgtcatgaccaaaatagacttaaagtccggataaaagttggctctgataatgttttggcaagaaataatgcggatatctacagtggtctgggccttgatatttcttcaccttcatccatcgaggatagccccgatggccgtgggagcctatcccctgaagttaacaatgtgccacatgaatctccacaaaccatccttcagatcatgacatgcttttcagttcctggaggcttcctgttatcccctctaccagccaatatcttgcaattgacaaaaaaggttgtggcttcgtcaaagaagtgggaatcaaatgtgcacatagaaagtgtacaagaaccatatgaaggccacacgactaaaaaggtaaaatctgatgctaagaaaaagaagctgatagatgcaaaaaattcaaagaacagaaatgatattagtgcagttatgaaaaaggagattgatatagaaacagttgctggtcaaaagatcgtatccgaagctctcaacatatcattgctgtctgatcccagagccatggatgcaaaaggtgagaatcgacttgaagtggaaccagcagaaaacaacttggcgggaactagagatgcccgattgaaagagcggtccactaagaccaactccatgccaatcatagttgaacctgccaaagcagaggcgacggaatgcttagagaacagtagttttggtagttcagaaatggatttttcagcagtaaaagcggaatcaaaatccaaggcagaaaagggagaggcaactttagaagagaggaatacaactaatggcaaagacctaatatcggataggaagcaagaaaagaaaatgaaacctgagagtaaatataacgcctctaactttgaagttagcaatgttataaacgaaagaggtccagctgtttcccggagcatgggcaaagtttctggtaaagaagccttaccttatgacacaaatgaggaaaatagctccaagaatgaggtcaaaaaaatgcagagagaacaaaagaccaatgcttcgagatcttctgatttcctggaggatgagaaacacattcgttcttctgctgcagttaaggagaggaaaagtgacatgcaatccaaatctagccatactggaaagaaacccaaaacaaaatcacatagagatgttagggacaacctgcctgaaggatctcacggaagcaaggaaaaagacacattggagaatgaaagtgcctttggagatctccgaccaaaggaaaagccatggaaatatgacatcgagagggattctgatgcacctgggatctctaggagggagatttcttctagtgtaaagcatgataagcacttggcttctgaggagcagaagatgcatatacctccaccttccactgtatcaactgcaaatgcagctccagttgtgataaaggagcattgggtgagctgtgacatatgtgataaatggcgtctcctaccttatgagatgaatccttcagatcttcctaagaagtggaaatgtagcatgctatattggctacccgggatgaataggtgtgagattagtgaagaggagactacgaatgctctgaatgcactttatgtccctgcccctgcaaatggtattcctgcagttggtcatcctcatgttgcttcaacaggactagtaacatccagcactcccaacatgaatggacatattgagcagaatagaaaaagaaaaaatattccaagtgatggaaattttgtggctgagggttctcacctaacacaggtttcaggtcatccaatgagcaaccaacatgctcctagtaaaactaaaacttatactgatggtatccagtattcggctgagaggcattctgtaagcaaatcagttgacccaataattgaaaagaaaaggtccaagagcaagcatcacagtagctattctgatggaggagatcttgttgaaagacctaagaagcattctaaagtgaaaaacaagagagacttagatcatgatgaatacaaagcttctaagaaaattaggaaagaagagcgacaccattttgatgtagatcggatccttggatctgatttagctagcggagatgttcctgatgaggccaaggctttgcctgcgaagtcagcaacctcaaagggttcaggtgaaaggactgacctttcttcatcaaagcaaaaaagtgcctcacggcataatcgtttggaaacttccaagaaagcaagacaagatgatttagttggtcctgaagacgagagcaagggatattttcaccagtcagatgtacaaagatcagatttgtctagtaagaagaggatagtgaaggaatgggaggagagccagcacaattcagtagctcatgtaagcaaaggagctgtcaaagaaacctatagggaccagaacttaaaggaagcaaagttgaaatcattgaattctgaagagctgttttctatgacgagcaccaaaccaccaaaagttcaacatgctgatcaggttttgtcttatgatggggggcgtatgaacagtgagttagttgaggataacacactctttagtggcaaaagaggtctgcctgaacaagaaaagagcctttctgatcaggctttggacttgggtgaacctgctagtgatgtggcctatattcagacttcagctgtaacttcaagttcttcaaaggcttcggtctcacaaaaaaagaagcagaccactcaagctatgaagacttcaccaattgagcctctttcttcatcaccacggaggaactccaacattgacaaggtctctgtccctcatagtagaatttcaggtaaggatggatctctgaatgctaactcagccactgtgccaatcatggcaaaacaactaaatactgaagttcgcgtagcaagcaatgatcaacggtctagtgaacctgtttcggttggttctccccgaagaaaatctgatagggataatggactggttcagttaactcaaggtcatgcctctgatggttttcatcttgaaaggggtttcaatgaggacctgcagcctgaatctgggagaaaggattccaatgtaaagagctcccatattcctaaagcttctcaccatttgcattctggtgaaaaaaacaactacaatacagatggctctcctatgcaaccaggaaagcatcctgttgatccaaagacatcagtcttggataaatgtgattcaagcatgcatgaaagtaacaaaagcacaaattctcttcaggatagaaatggatcaactcattgcccaccagatggaaatcctctgctcggtttaccatctggaaaagagaaatcatatatcaacagcaacaagcaagattcacagaagcctaaaccccagatggtctgctcacctttgaaagaaaacaaactggattctcactccacaccattaaaacctaatgggtcaaaattgactccacaatcaagacaatacaatgctcaaaatggaggacgacatggcactgcaaagcatgcaattcctagtcctgctgatacttctagtccagctaggaaggacaatacttcaactgcatatgctctcaaagaagcccgggatttaaagcataaggctaatcgtttgaagggagaaggaaaagagcttgaaagtacaagactctactttgagtctgccctaaaatttttgcatgttgcatcacttttggaacctcctagctttgatggattgaaacaaggtgatgcagcccagagcatgtattcagatactgcaaaactttgcaactttgttggtcatgcatatgaaaaatgcaagaagatggctgctgctgctttagcatacaaatgtgttgaagttgcttatctgaaggctgcatactacaaacacccaactgcaagcaaagatagacaagtgttacaggcagttgtacagactgcaccagcctcagacattgataatttaaataacaatggattatccaaggcctcttcaagcaaggatgctaattcaccacaagtggctggaaatcatttgttgctggccgctcgaaatcaaccacacttgatgcggttactagcttatacaaatgatgtcaatagtgcctttgaggctactcggaagtcacacatggcaattgcttctgctgctggcaatcatgaaaatggagtcgatggtcttccttcagtaaaaacagtactggattttaacttccgaagtgtgaatgatctactaaggcttgtgcgaatttcaatggagtccatcagctgctgacgtgttcagaatctgagaaagtgccacccgttggaagttcctgttggatgtttaatccaattaacttttcttgatgaagtagcatgaaactgaatagttcaacagtgaacagtgtaaaagcataggtcttctcatttgagcttgctggtcaatttgtacagagactgatcgtggaattcttccttctttcttattttgatggcacccagttagtatacaaagttgcatatccacttggatgatttagttagtgaggccacaggttaagatgagctttgcactgctcaatgctcgtaatagttttgaggaagaaggatgctcttgcgcatgcagttgatgattcatttgagcagtgcaaaatggtgtgtccctatcttgcgcatgcagttaatgattcatctggaaagcggcttgctactgagcattctcttccgaccgtatcatagtttcctttgagcagtacaagatggtgtgtcgccacttcaattttgatgggagaggacagcaaagccaactaattgtgctaaccaagaaatcagctactatgccatgtcttctggatgaagttcacgcaggtttcaaataagaaatcacttggactatcggacttgtatgaatgttgtacaaagatctctaatgtacattaaccttttttttttcagccagcgcatgtacatggtggggcatttgttaccacgtgctggtctctatgtatgacgcctttggttctgccaagcctgtctttcattattcttcaaattttgtgatatttagttgtttattaaggtatataacgtttagtactgggaatttgttgcagaatgcaaaaatgaattccgtgctgtgcaacttgtatcttaacttgagtttcagctttcagtagggatgataatttaatccaaaacctgacaggtacctgacccactggtgcacccgcatttgacccgagcttttatgagttgtgggtgcgggtttctattttaaaccgtggttgcaagtgtcctaaattttggtttatttttt

SEQ ID NO: 67476 - DNA, 6097 bp, Zea Mays
aattaactagaaaatttattctcgcgtgcgacgaaacctcgagacgccgaggcagacgagacgagggaagggggagaccgagggcaaccaagcctgcgaggagcccgcgtccgaatctcgcgatccccaatccgcaggcctcgattcgccgatccggccgcggcagggggagagatcccgcagatcggggacctcgtgctgcttcgattcgagcttcttccagctgacagtcgcccgtccgccccccgtgctggtccgcgagctgctgtgtgctgcctggtggtaggtaggtggttaggcgaagcgggccgtgcccgggtgatgctgtccgtgaggcggcggcaggaggatgcgggcggccgcgtagcggcagcgcagacgcagcagctccggggcggactcggcatggacgacgacgccgagctcgaggagggggaggcctgcggggacgacaccgccttcgtcgaccccgacgtcgcgctctcttacattgacgaaaaacttcaagatgtacttggccattttcagaaggacttcgaaggaggcgtgtctgcagagaatctagggtccaaatttggtggatatggttcatttttacctacgtaccagcgctcccctctcccccaaactagaagtccacttaaggcagcaaatgctacctcaaaatctcccttccaccagtctagcgagggcatgtctcaaaagcctcctgctgtgacagtttcatctaccccccaaagtaatggtcctatggtgcctttttctggcgattcaattaaaaaggaaatacgcccaaccacaaaggctgaagggggttccgtctcccatgattcgtatggaccattgaaatgtcatgaccaaaatagacttaaagtccggataaaagttggctctgataatgttttggcaagaaataatgcggatatctacagtggtctgggccttgatatttcttcaccttcatccatcgaggatagccccgatggccgtgggagcctatcccctgaagttaacaatgtgccacatgaatctccacaaaccatccttcagatcatgacatgcttttcagttcctggaggcttcctgttatcccctctaccagccaatatcttgcaattgacaaaaaaggttgtggcttcgtcaaagaagtgggaatcaaatgtgcacatagaaagtgtacaagaaccatatgaaggccacacgactaaaaaggtaaaatctgatgctaagaaaaagaagctgatagatgcaaaaaattcaaagaacagaaatgatattagtgcagttatgaaaaaggagattgatatagaaacagttgctggtcaaaagatcgtatccgaagctctcaacatatcattgctgtctgatcccagagccatggatgcaaaaggtgagaatcgacttgaagtggaaccagcagaaaacaacttggcgggaactagagatgcccgattgaaagagcggtccactaagaccaactccatgccaatcatagttgaacctgccaaagcagaggcgacggaatgcttagagaacagtagttttggtagttcagaaatggatttttcagcagtaaaagcggaatcaaaatccaaggcagaaaagggagaggcaactttagaagagaggaatacaactaatggcaaagacctaatatcggataggaagcaagaaaagaaaatgaaacctgagagtaaatataacgcctctaactttgaagttagcaatgttataaacgaaagaggtccagctgtttcccggagcatgggcaaagtttctggtaaagaagccttaccttatgacacaaatgaggaaaatagctccaagaatgaggtcaaaaaaatgcagagagaacaaaagaccaatgcttcgagatcttctgatttcctggaggatgagaaacacattcgttcttctgctgcagttaaggagaggaaaagtgacatgcaatccaaatctagccatactggaaagaaacccaaaacaaaatcacatagagatgttagggacaacctgcctgaaggatctcacggaagcaaggaaaaagacacattggagaatgaaagtgcctttggagatctccgaccaaaggaaaagccatggaaatatgacatcgagagggattctgatgcacctgggatctctaggagggagatttcttctagtgtaaagcatgataagcacttggcttctgaggagcagaagatgcatatacctccaccttccactgtatcaactgcaaatgcagctccagttgtgataaaggagcattgggtgagctgtgacatatgtgataaatggcgtctcctaccttatgagatgaatccttcagatcttcctaagaagtggaaatgtagcatgctatattggctacccgggatgaataggtgtgagattagtgaagaggagactacgaatgctctgaatgcactttatgtccctgcccctgcaaatggtattcctgcagttggtcatcctcatgttgcttcaacaggactagtaacatccagcactcccaacatgaatggacatattgagcagaatagaaaaagaaaaaatattccaagtgatggaaattttgtggctgagggttctcacctaacacaggtttcaggtcatccaatgagcaaccaacatgctcctagtaaaactaaaacttatactgatggtatccagtattcggctgagaggcattctgtaagcaaatcagttgacccaataattgaaaagaaaaggtccaagagcaagcatcacagtagctattctgatggaggagatcttgttgaaagacctaagaagcattctaaagtgaaaaacaagagagacttagatcatgatgaatacaaagcttctaagaaaattaggaaagaagagcgacaccattttgatgtagatcggatccttggatctgatttagctagcggagatgttcctgatgaggccaaggctttgcctgcgaagtcagcaacctcaaagggttcaggtgaaaggactgacctttcttcatcaaagcaaaaaagtgcctcacggcataatcgtttggaaacttccaagaaagcaagacaagatgatttagttggtcctgaagacgagagcaagggatattttcaccagtcagatgtacaaagatcagatttgtctagtaagaagaggatagtgaaggaatgggaggagagccagcacaattcagtagctcatgtaagcaaaggagctgtcaaagaaacctatagggaccagaacttaaaggaagcaaagttgaaatcattgaattctgaagagctgttttctatgacgagcaccaaaccaccaaaagttcaacatgctgatcaggttttgtcttatgatggggggcgtatgaacagtgagttagttgaggataacacactctttagtggcaaaagaggtctgcctgaacaagaaaagagcctttctgatcaggctttggacttgggtgaacctgctagtgatgtggcctatattcagacttcagctgtaacttcaagttcttcaaaggcttcggtctcacaaaaaaagaagcagaccactcaagctatgaagacttcaccaattgagcctctttcttcatcaccacggaggaactccaacattgacaaggtctctgtccctcatagtagaatttcaggtaaggatggatctctgaatgctaactcagccactgtgccaatcatggcaaaacaactaaatactgaagttcgcgtagcaagcaatgatcaacggtctagtgaacctgtttcggttggttctccccgaagaaaatctgatagggataatggactggttcagttaactcaaggtcatgcctctgatggttttcatcttgaaaggggtttcaatgaggacctgcagcctgaatctgggagaaaggattccaatgtaaagagctcccatattcctaaagcttctcaccatttgcattctggtgaaaaaaacaactacaatacagatggctctcctatgcaaccaggaaagcatcctgttgatccaaagacatcagtcttggataaatgtgattcaagcatgcatgaaagtaacaaaagcacaaattctcttcaggatagaaatggatcaactcattgcccaccagatggaaatcctctgctcggtttaccatctggaaaagagaaatcatatatcaacagcaacaagcaagattcacagaagcctaaaccccagatggtctgctcacctttgaaagaaaacaaactggattctcactccacaccattaaaacctaatgggtcaaaattgactccacaatcaagacaatacaatgctcaaaatggaggacgacatggcactgcaaagcatgcaattcctagtcctgctgatacttctagtccagctaggaaggacaatacttcaactgcatatgctctcaaagaagcccgggatttaaagcataaggctaatcgtttgaagggagaaggaaaagagcttgaaagtacaagactctactttgagtctgccctaaaatttttgcatgttgcatcacttttggaacctcctagctttgatggattgaaacaaggtgatgcagcccagagcatgtattcagatactgcaaaactttgcaactttgttggtcatgcatatgaaaaatgcaagaagatggctgctgctgctttagcatacaaatgtgttgaagttgcttatctgaaggctgcatactacaaacacccaactgcaagcaaagatagacaagtgttacaggcagttgtacagactgcaccagcctcagacattgataatttaaataacaatggattatccaaggcctcttcaagcaaggatgctaattcaccacaagtggctggaaatcatttgttgctggccgctcgaaatcaaccacacttgatgcggttactagcttatacaaatgatgtcaatagtgcctttgaggctactcggaagtcacacatggcaattgcttctgctgctggcaatcatgaaaatggagtcgatggtcttccttcagtaaaaacagtactggattttaacttccgaagtgtgaatgatctactaaggcttgtgcgaatttcaatggagtccatcagctgctgacgtgttcagaatctgagaaagtgccacccgttggaagttcctgttggatgtttaatccaattaacttttcttgatgaagtagcatgaaactgaatagttcaacagtgaacagtgtaaaagcataggtcttctcatttgagcttgctggtcaatttgtacagagactgatcgtggaattcttccttctttcttattttgatggcacccagttagtatacaaagttgcatatccacttggatgatttagttagtgaggccacaggttaagatgagctttgcactgctcaatgctcgtaatagttttgaggaagaaggatgctcttgcgcatgcagttgatgattcatttgagcagtgcaaaatggtgtgtccctatcttgcgcatgcagttaatgattcatctggaaagcggcttgctactgagcattctcttccgaccgtatcatagtttcctttgagcagtacaagatggtgtgtcgccacttcaattttgatggtaactctagttaaggacaaatgaattctgtgcccttttttaagtgctactccttacgctgctacctttttttaagcagggagaggacagcaaagccaactaattgtgctaaccaagaaatcagctactatgccatgtcttctggatgaagttcacgcagccagcgcatgtacatggtggggcatttgttaccacgtgctggtctctatgtatgacgcctttggttctgccaagcctgtctttcattattcttcaaattttgtgatatttagttgtttattaaggtatataacgtttagtactgggaatttgttgcagaatgcaaaaatgaattccgtgctgtgcaacttgtatcttaacttgagtttcagctttcagtagggatgataatttaatccaaaacctgacaggtacctgacccactggtgcacccgcatttgacccgagcttttatgagttgtgggtgcgggtttctattttaaaccgtggttgcaagtgtcctaaattttggtttatttttt

SEQ ID NO: 67477 - DNA, 3203 bp, Zea Mays
cttaagtgacgctaactgctctccgaatgtgcaccatgtaatcatcttaatgttgtgcccgcggatgtaaatcattctgatgcaaaattcgagctaggatttcactaggtcgcaactgcatgaaattctcatagctgtctgaatggaattttttaactcccatttcgctttgcgatgatacaaacggtgccttttcttctgtgcttacctgcctgacgttgcactttccagactaatttgatcgagacatcaatcgagaaattccatctcgacctgaagacagttcttgaaaaacttcatctcccagcctagcccctcggccactcggtatatctcttccctctgcgggtgcgtcgtgtcgtccgacgagaacttgtgcaggtgcagggaatcgttggcgccgcccgcgtccacccagctgaacccgacctccttcttgacgcccatcccccgcatcttccgccgcaccctcgccaccgcgccccagtcacccttctcggcgtagatgttggacagcagcacgtacgcgccggattccgtgggctctgtctccaacaggacgccggcgaccctctcgccgacgtccgtgttgccgtggatcctgcaggcgcccagcaggctctgcatagccgagacactcggcccggaaggcatctgcagcatgagctcctcagcctcctccagcctccccgctcggcctagcatgtcgacgacgcacgcgtagtgctcaggccacagctcggcgccgtgcttggtggccatcgactcgaagatctcacggcccaagctggcaaacccgctgtaccggcaggcggtgaggacagagagcagaaccacgccgtcaggagtcacaccggagcgcgccatgtcgttgaagaggctcacgacaccatcgtagttgccgtgctttgagttcgccgagatgatcgccgtccaggcaattagactccggtggacggtctcgccgaacgccttccaggactcctccaagctgcctcgcttggcatacaggtcgatgagagcaccggagacgtactcgctggcgccgagccccagcttcagcgtctggcagtggtacatctgtccgtaagccatggacacggtctcgaccgcagtcaccgcgctgaggatgctcgcgaacgtcgtctcgctgggcttcgtgatcttcaccattgacaagaaggcctcaagcgcgtcctggcacatctcgttctgggcatagccggagatcagagcgttccaagcgatgacctccgggtgaggcataagaccaaagatcatcttggcatcatccatgcgccgcagcttggcgtacatggtgatgaagctgttcgctgccgccggcttatcagacaggccggtcttgatgcacaccgcgtggaccatctgcccttcccttgccgggcagtgtcctggcatagccgacagaatggccacaaaggtgacctcgttcggcgccaccccatctcgcatcatgccgttgaacagcgagacggcgtcctccctgtccatggacattaccgtggtccatgagacgacgtcgcgctcgcccatgaactcgaagagcctccgggcgcagccgggagtgccgcacttgtagtacatcgcgacaagcacgttggcgatggagacgtgcccctcgatgcccagcttcaccgcgaagccgtggatttggcggccaagctcgagcttcccctcgccgccacacgctgagatcacgctgcagaccgatatccgatcgggccgcacgccgccgtgcttgagcatccgaaggaacacccggatgacctccgccggacactcgccgtcctgcgcgaggccgcagaccagcgcgttccaggagacgaggtcccgcgccggcatctcctcgaacaccttgcgggccgcatccagcgacgcgccccgggcgtaggccgtgacgagcgcgttgccgacgaacacgtcggcggcgatccccgcgcgcgacaccagcgcgtgcagctgccgcacgaggcgaccctccccgcggccggcggcgagcgagagcgtgacggtgaacgtgatggcgtcgggccgcacgtctccggcccgaagcatccgcgcggcgaacgcgagcgcatcgtcagggtcgggggtcgcggagaggatggtgttgtaggaactcgtgtcccggctcggcgcggcggcgaacaccctggcggccgcggcgaaggagttgcccttggcgtagcgcgcggcgagggagttggtgacgggcgcgaaggcggcgaggccggagatgaccgcaagggcatggagcgcgggcagagcgtccgggccggagcgcgcgaccgccgcggagaaggcggtgggggagacggggaggcccgcctgcaggcggccgcggagggcggcgaggggcgtggcggcgcctgcgggcggcgggtggggagtttcggcgaacgggtggtgggcggtggagagtgggtgtggtttgcctttggccgtcgcgcgcgcggggcaaggcagaggcagaggcagccgccgcagtggcatctagagacgaggcgccctattggtggctggacagtggactactggactccacgaccaactcctcccaactcaaacgacacggagggagagctctactcctaataattccacgggccgcttcctcctcctgccggccgctccgtctattggtgacctcgcccatggcgtgtgggtggcttcatcctgtccctgcaggggccgccacggtcgccgccctgtggccgtgcttcctttccccggttcgtcagagcttcaccaaggagctaaaccaattccaacgttggaagctacctttgaacgctgccaagtcgcagagggagtcatggaaccttgctgatcgctcaagttcaggatcttctgaaggagttgctgctgctagcagacccgcagacgctcccactgctcagagtgctctgcccatgacacgtagcgtggatgcggtcccaggtgcgcctattgttatttctggatactggactggccccggtgtagatgatggctgtggtagtgttgaggccgtgctccagaggattgcataatgttttcgcttgcggttaactagggcaattgtaacctgtgtcaaagcaacaactggaccatataaggttatatttttctttattcagagctctattttcccttggggttagttcttttcttcgccattacgtcgctattttcagtgcacc

SEQ ID NO: 67478 - DNA, 836 bp, Zea Mays
cggacccacaccaccttctatataaacatgcagaatagtcgacaaagcatggtgcacccatcaatcatcacacagagcgcgcgccatggcgtacagggcgttggaggtgactctcctgtcggccaaggacctgaagagggtgaacctgatctcgcgcatggaggtatacgccgtggtgagcatctccggcgaccctctgacgcggcagtgcacccagccggacccctacggcgggcgccacccgtcctggaacacctcgttccggttcaacgtcccgcccaccgccgcgacggccaccggctgcctccacgtgctcctgcgcaccgagcgcgccctgggcgaccgcgacgtcggcgaggtcatcgtgcccctggctgacatcctcgccaccgctggcggcgcgtccgaccctggcccccggcctccgcagctcgcatcgtaccagcaggcggctgccggtcccgggcgcaatgctctgccggcaccggcgagcgaggagagcaacggaaagctggacttcggggtaggcctcggcgcggggctggtcagcggcgcgatcggcgggatgctggtcgccagcgacgtgatgatgtctgacgcggcggcttacaactccgggtaccgcgctggactggccgacggcggcgcggcagcggtgtacaggagctcttatcgcgttcccgataaggtcgaagcaaaacgggcggcagtgtgagtcacttgaatcgatgcaaactgtgtgatttgacaaaccaagaatagtacctgccgtatatatatggaatataattgcgtatctattgaataataaataataatgagatgagattttacat

SEQ ID NO: 67479 - DNA, 536 bp, Zea Mays
cagaatagtcgacaaagcatggtgcacccatcaatcatcacacagagcgcgcgccatggcgtacagggcgttggaggtgactctcctgtcggccaaggacctgaagagggtgaacctgatctcgcgcatggaggtatacgccgtgcaggcggctgccggtcccgggcgcaatgctctgccggcaccggcgagcgaggagagcaacggaaagctggacttcggggtaggcctcggcgcggggctggtcagcggcgcgatcggcgggatgctggtcgccagcgacgtgatgatgtctgacgcggcggcttacaactccgggtaccgcgctggactggccgacggcggcgcggcagcggtgtacaggagctcttatcgcgttcccgataaggtcgaagcaaaacgggcggcagtgtgagtcacttgaatcgatgcaaactgtgtgatttgacaaaccaagaatagtacctgccgtatatatatggaatataattgcgtatctattgaataataaataataatgagatgagattttacat

SEQ ID NO: 67480 - DNA, 5051 bp, Zea Mays
aacattcctagcgtcacccccggcgcccaaagatcgaagctccgagcaggaaacgccaccgccctccatctcccccgtgtccctagccaggagcaccgtccccctcaccaccccgcctaactttcctatcctcatcccgacgcctggagatccatcctcaaacgccgctgctagggcaccgtcccgcgctaggaccccccgcgcctcgcaatcatgtcaccggcaactctgacgacctagggctcacagaggctagcaccacgatggccgacccgggcgcctccgtcaacatcgctgcgcgccaccacctcgcgtcgcagctcgcgaggcagccgccagtgacgcacacgggctggtggggaggggcgcgttcgtaccaccatgggaggggcgtggggcgtggcatcaagggtgagggaggggcgtcgaggaggcggacggcaacaagcccacacatccaacaccctaccaggtctttgatgctgctgcttcaccaaacaatgaaatgctcttgatgcatgattcaggagctaggaggatatctattgtcgtcgagttacatgaagttgactttcctctgctgctgttgtgctcagtgtggatgacattgtgctgcctcaggtacaactttccttttctgtgcttaagtaaaaaaatgttgttccattcgatacacagtcggattatttgatttaaagccttgctgaagttgacattgtgatatatcgtgaccctggtaaaaaatattttcaagttcagaaagcaggatacttcctttaatatgtctatcacacatgttcacggagataattctacacatggttttttatacctctttttgaccccacttggagatggaagcgagattttgaagttttaaggcctgcagtgccgtggtcttgcgttgatatctgtagttgtacatagaaattttctcatttggtgtatgtctttgctactttttccttaaacataaattatatttttataactatctggcagttattgatctatcactgccttactacatgatacctatctggcagttatgaaaatattcgaatccattttatatgtaaatcctaaaattttcgaatccaaagccacccattacaatattatgtactgaaattatatcttttacttatgtgtcactctgcatttttttaagatttaaaaaaatttcttccttattttatacatggttgaacaccaaccttcatgattcactggatcttcttagtattatctctaacaaaagaatttataaagttctttccccacaaatgcaaatataggtattagcttattgattttaaattggttattaaatgtctggcatggatctcctccctgctcacgggcctcaccatcctcaatggcgagtgtaaaacttcgcaccaacacactcgacaagcttgatggcgacccctacgtcaacatccgcatgggcaagggagtggacacaatcaggctcttgcgcaagtatcccctgaatttactacctgtagtttcgaaatgggcttacccaaaaaaatatttgcactaagaatatttatgtttgtttagttggtctggacaaaccacaagatcagtttaagcattgcttccaaatgccattaaatatttatcttgactgaaaattcgcacacaagaatagtaatattctatgaccaagtgactgtagtatgaagaagcatgtgtcattttcctgattaatttagctggttcaactttgttggggtcccaagtcttggccagaacttgatgtaattaaactcctttagacaattgagtacctttctatgtggatttacatatccctttgcttatttagtaacttctgcaaaatttgaatcctaggcaatgtcaacctcaacaccttgatgaacatgttcagtgtgcttggtgctggtggtggccttggtggtcgaaatgcttctaatggtccctttatgtggcacacatgaatacctacaactccataatgttgctgaatgattaattatggaatgtggacaatgcaagatacattttgagtacccttttgatctaggctctggaccgccatgcttgcgtcggacgcgggacgtccacgccgccatcgcccgtgagcagctccgacagcctcatcgccgcgttgcacctgctcttgtgtcgcaggctcgggttaccgtcggtgctgacaccgaggaaggcatgatccatgcggagcagcccaaggcgcgatgccacctccgctgtcacgcatgatgagctgcttcgcctctggcaccgccttgttccttcgcgatctcacattggacggtggatgaacttgggcttccaagatccgtaatacaaggtaaattgagtaccttttgtgacctcttctgtatttctaggcctttgtataacagctgtggacaaaacctgtaaacatgttggatgaactggagcagctattgaaaggtaactctatggtgaaagagctaacgcctaggacaaatgactaccttgtttcatttcgagaatgtatgtccaccaggattttatctgttaatttgaacaaaattcatatcaaagcacgacaggtacttcttgatatttccttgatttgcacagtgattgagtgagcttttaagggtacgaatgtagcagcctagaataattctatatttacttactactataaagagcgggagcaaaatatagctatacaattgatgtatatttagcatatcaaacaatgctcaagatacttaattaattgcatactatagttaggctgtatataccaatgcaatggtcactagcaagataatgcagcctcacagtcttatgacatcagccaatatataaattagaccatttttgttgctgcaactgcaactaatactatgttgaagtgtttttcgttaactctgctctgaaaatgctttttgcttcactctttgacatatctatatgactatatagccgatgcctgtttttactatatgcttatcatgaatctcatgttttccatatgaataatgctagctgttgcaacatctttgtttggagctaatgatacatttaatcctagacttgatggcaaagaacgggtgcaattttttgtctctctatttcctatttatgttgcacaaataattgtttccttttgttatccaaataaataattacttccttctccacccttttctccagttgtagcgagtgagttttagtaagggataaacaatagtaggaagaactctgttgtgtttcaatctcgagtatttgatggatggggcattgttctatagatggtgtatacagaaatgatcttaactgtcattttggtcaaaaccacaatagttctacttatgttagaaaatcaaaagatttaagtgtcttccatggtttaaagttcatgatgagcaaatttgacttatttttaattgtttatcatattttgagaataattttgctgcctattcaacagataccatggggggagcatttgatccagctagctggcaaacaagatttggtggtaactgtttatgatgaaacaaatatttcgaatcattaattgctatgtttgtgtctgcatcctgtcagcaattaggatgtgacaggacatggcctccctccaatgcaaaaatcccaaaagctccttgcagacacacttatttgcattctttgcgctgacatgcagttaggatgcgacagggcctccctccaatgcaaaatcacattaaccatgtcaccgctgtcaattgttttcttgagtttgttcccaaaacctcttaattattattgcccacggatagtcatgttatctacataatccgttttgccactcttcagggttctgcattgtgaatagaggttcatctttgtgattagattgccaccgccgctgctttctactcattcgacgaatgttttgcaaagaagaaatctggtttatcttaccctcgattccttcctatgatacaactaacaaaatgaattggtacattcaggtatctttaaaaccttttcacttccaaattagaatgatatcatgctcaagaggtaacattttctgatgttttttattttaatagtaattattggtcgctgactttttaaaactatttgtgttgtacttcaagcatcttctacactgcatctaagctttgaagagttacggacaattttgtactaattgttttctttattttcccaaatgtgtgccacttcctttagtatttttgcagtgcagacgattgaaaactactgttttacatcacctctctgtcataggaatagtttactactctaatgctcattctattaacactaaaaaaagatatatcgcttgaaaacaggtatgtatttcaatcttctagatttatatttctttctttatatatacaaaacaggtaagtttgtaccatttgttttattttttaaaaaaagaaaaggtatgacacttacattagtattttttcccaccagaaacgattgaaaactattgtttcccgtcacctcctgtcatagtaagtgtttcccgtcacctgaggatttccaattttctacaatggtgggagagatcttcaactattgtttctgacacttgaaaggatggcttggaccctcttattatcctgggagcctcggtggtttggaagcatagaaacagagtggtgttcggtagagtttcttccaacctcactcttattctggagtctgctaatgaggaaagcgagaaatgacaagttgcaggagccaagggttatcctttctggctgctccaagccatataatttagggtggttggatccttcatggatattttaatgtacttctgttgttggcctccgtaagaagtgcatgtatcccgggcgtctttcagctctttgtattcttcgtcttttaatatagtggggcgcagttctcctgtgcttttcgagaaaaaaaaatatgtgcatctatttaagtctcttaccaataagtgtttataaaatatgtttcattgttcttagcttgatatgtggtaaggtcttcttctttcttgatcatctatgtatgccttaatt

SEQ ID NO: 67481 - DNA, 5419 bp, Zea Mays
aacattcctagcgtcacccccggcgcccaaagatcgaagctccgagcaggaaacgccaccgccctccatctcccccgtgtccctagccaggagcaccgtccccctcaccaccccgcctaactttcctatcctcatcccgacgcctggagatccatcctcaaacgccgctgctagggcaccgtcccgcgctaggaccccccgcgcctcgcaatcatgtcaccggcaactctgacgacctagggctcacagaggctagcaccacgatggccgacccgggcgcctccgtcaacatcgctgcgcgccaccacctcgcgtcgcagctcgcgaggcagccgccagtgacgcacacgggctggtggggaggggcgcgttcgtaccaccatgggaggggcgtggggcgtggcatcaagggtgagggaggggcgtcgaggaggcggacggcaacaagcccacacatccaacaccctaccaggaagttgactttcctctgctgctgttgtgctcagtgtggatgacattgtgctgcctcaggtacaactttccttttctgtgcttaagtaaaaaaatgttgttccattcgatacacagtcggattatttgatttaaagccttgctgaagttgacattgtgatatatcgtgaccctggtaaaaaatattttcaagttcagaaagcaggatacttcctttaatatgtctatcacacatgttcacggagataattctacacatggttttttatacctctttttgaccccacttggagatggaagcgagattttgaagttttaaggcctgcagtgccgtggtcttgcgttgatatctgtagttgtacatagaaattttctcatttggtgtatgtctttgctactttttccttaaacataaattatatttttataactatctggcagttattgatctatcactgccttactacatgatacctatctggcagttatgaaaatattcgaatccattttatatgtaaatcctaaaattttcgaatccaaagccacccattacaatattatgtactgaaattatatcttttacttatgtgtcactctgcatttttttaagatttaaaaaaatttcttccttattttatacatggttgaacaccaaccttcatgattcactggatcttcttagtattatctctaacaaaagaatttataaagttctttccccacaaatgcaaatataggtattagcttattgattttaaattggttattaaatgtctggcatggatctcctccctgctcacgggcctcaccatcctcaatggcgagtgtaaaacttcgcaccaacacactcgacaagcttgatggcgacccctacgtcaacatccgcatgggcaaggtcatgtaatttttatcttcatttcaatagtgattgaagcaaatgaaaattttaaaattttggcagtgagtatgcaacacttccaagcaatggataatgtattaatgtggggctgtgggcgttggaacgtgcgtgttgactagctttgattagcttgtcgatatacatacttagccatctattttttcttctcctttcaaatgctatgctattgctactgctgttggagtgtaccatttaacttgatatatgatttaatagatgctttgtgtgcataaatcgtctacagttaccatctggacttttttagccatgtttgagagatgtgacggagtttggatttcacttaaaaatgcaggtccagttgatgtttaatgtgcctgaactgcagttacagtcataaagctcaaacaatcttgagcatttggttttacattatattctctggtttctgtttttgtgatttgtgttctgatgatgcaaacgcttccattttttatgttgctcctgcacaagatttcctgcacaaccaactgttttttgaattctttatgttatttgatccagggagtggacacaatcaggctcttgcgcaagtatcccctgaatttactacctgtagtttcgaaatgggcttacccaaaaaaatatttgcactaagaatatttatgtttgtttagttggtctggacaaaccacaagatcagtttaagcattgcttccaaatgccattaaatatttatcttgactgaaaattcgcacacaagaatagtaatattctatgaccaagtgactgtagtatgaagaagcatgtgtcattttcctgattaatttagctggttcaactttgttggggtcccaagtcttggccagaacttgatgtaattaaactcctttagacaattgagtacctttctatgtggatttacatatccctttgcttatttagtaacttctgcaaaatttgaatcctaggcaatgtcaacctcaacaccttgatgaacatgttcagtgtgcttggtgctggtggtggccttggtggtcgaaatgcttctaatggctctggaccgccatgcttgcgtcggacgcgggacgtccacgccgccatcgcccgtgagcagctccgacagcctcatcgccgcgttgcacctgctcttgtgtcgcaggctcgggttaccgtcggtgctgacaccgaggaaggcatgatccatgcggagcagcccaaggcgcgatgccacctccgctgtcacgcatgatgagctgcttcgcctctggcaccgccttgttccttcgcgatctcacattggacggtggatgaacttgggcttccaagatccgtaatacaaggtaaattgagtaccttttgtgacctcttctgtatttctaggcctttgtataacagctgtggacaaaacctgtaaacatgttggatgaactggagcagctattgaaaggtaactctatggtgaaagagctaacgcctaggacaaatgactaccttgtttcatttcgagaatgtatgtccaccaggattttatctgttaatttgaacaaaattcatatcaaagcacgacaggtacttcttgatatttccttgatttgcacagtgattgagtgagcttttaagggtacgaatgtagcagcctagaataattctatatttacttactactataaagagcgggagcaaaatatagctatacaattgatgtatatttagcatatcaaacaatgctcaagatacttaattaattgcatactatagttaggctgtatataccaatgcaatggtcactagcaagataatgcagcctcacagtcttatgacatcagccaatatataaattagaccatttttgttgctgcaactgcaactaatactatgttgaagtgtttttcgttaactctgctctgaaaatgctttttgcttcactctttgacatatctatatgactatatagccgatgcctgtttttactatatgcttatcatgaatctcatgttttccatatgaataatgctagctgttgcaacatctttgtttggagctaatgatacatttaatcctagacttgatggcaaagaacgggtgcaattttttgtctctctatttcctatttatgttgcacaaataattgtttccttttgttatccaaataaataattacttccttctccacccttttctccagttgtagcgagtgagttttagtaagggataaacaatagtaggaagaactctgttgtgtttcaatctcgagtatttgatggatggggcattgttctatagatggtgtatacagaaatgatcttaactgtcattttggtcaaaaccacaatagttctacttatgttagaaaatcaaaagatttaagtgtcttccatggtttaaagttcatgatgagcaaatttgacttatttttaattgtttatcatattttgagaataattttgctgcctattcaacagataccatggggggagcatttgatccagctagctggcaaacaagatttggtggtaactgtttatgatgaaacaaatatttcgaatcattaattgctatgtttgtgtctgcatcctgtcagcaattaggatgtgacaggacatggcctccctccaatgcaaaaatcccaaaagctccttgcagacacacttatttgcattctttgcgctgacatgcagttaggatgcgacagggcctccctccaatgcaaaatcacattaaccatgtcaccgctgtcaattgttttcttgagtttgttcccaaaacctcttaattattattgcccacggatagtcatgttatctacataatccgttttgccactcttcagggttctgcattgtgaatagaggttcatctttgtgattagattgccaccgccgctgctttctactcattcgacgaatgttttgcaaagaagaaatctggtttatcttaccctcgattccttcctatgatacaactaacaaaatgaattggtacattcaggtatctttaaaaccttttcacttccaaattagaatgatatcatgctcaagaggtaacattttctgatgttttttattttaatagtaattattggtcgctgactttttaaaactatttgtgttgtacttcaagcatcttctacactgcatctaagctttgaagagttacggacaattttgtactaattgttttctttattttcccaaatgtgtgccacttcctttagtatttttgcagtgcagacgattgaaaactactgttttacatcacctctctgtcataggaatagtttactactctaatgctcattctattaacactaaaaaaagatatatcgcttgaaaacaggtatgtatttcaatcttctagatttatatttctttctttatatatacaaaacaggtaagtttgtaccatttgttttattttttaaaaaaagaaaaggtatgacacttacattagtattttttcccaccagaaacgattgaaaactattgtttcccgtcacctcctgtcatagtaagtgtttcccgtcacctgaggatttccaattttctacaatggtgggagagatcttcaactattgtttctgacacttgaaaggatggcttggaccctcttattatcctgggagcctcggtggtttggaagcatagaaacagagtggtgttcggtagagtttcttccaacctcactcttattctggagtctgctaatgaggaaagcgagaaatgacaagttgcaggagccaagggttatcctttctggctgctccaagccatataatttagggtggttggatccttcatggatattttaatgtacttctgttgttggcctccgtaagaagtgcatgtatcccgggcgtctttcagctctttgtattcttcgtcttttaatatagtggggcgcagttctcctgtgcttttcgagaaaaaaaaatatgtgcatctatttaagtctcttaccaataagtgtttataaaatatgtttcattgttcttagcttgatatgtggtaaggtcttcttctttcttgatcatctatgtatgccttaatt

SEQ ID NO: 67482 - DNA, 5425 bp, Zea Mays
aacattcctagcgtcacccccggcgcccaaagatcgaagctccgagcaggaaacgccaccgccctccatctcccccgtgtccctagccaggagcaccgtccccctcaccaccccgcctaactttcctatcctcatcccgacgcctggagatccatcctcaaacgccgctgctagggcaccgtcccgcgctaggaccccccgcgcctcgcaatcatgtcaccggcaactctgacgacctagggctcacagaggctagcaccacgatggccgacccgggcgcctccgtcaacatcgctgcgcgccaccacctcgcgtcgcagctcgcgaggcagccgccagtgacgcacacgggctggtggggaggggcgcgttcgtaccaccatgggaggggcgtggggcgtggcatcaagggtgagggaggggcgtcgaggaggcggacggcaacaagcccacacatccaacaccctaccaggtctttgatgctgctgcttcaccaaacaatgaaatgctcttgatgcatgattcaggagctaggaggatatctattgtcgtcgagttacatgaagttgactttcctctgctgctgttgtgctcagtgtggatgacattgtgctgcctcaggtacaactttccttttctgtgcttaagtaaaaaaatgttgttccattcgatacacagtcggattatttgatttaaagccttgctgaagttgacattgtgatatatcgtgaccctggtaaaaaatattttcaagttcagaaagcaggatacttcctttaatatgtctatcacacatgttcacggagataattctacacatggttttttatacctctttttgaccccacttggagatggaagcgagattttgaagttttaaggcctgcagtgccgtggtcttgcgttgatatctgtagttgtacatagaaattttctcatttggtgtatgtctttgctactttttccttaaacataaattatatttttataactatctggcagttattgatctatcactgccttactacatgatacctatctggcagttatgaaaatattcgaatccattttatatgtaaatcctaaaattttcgaatccaaagccacccattacaatattatgtactgaaattatatcttttacttatgtgtcactctgcatttttttaagatttaaaaaaatttcttccttattttatacatggttgaacaccaaccttcatgattcactggatcttcttagtattatctctaacaaaagaatttataaagttctttccccacaaatgcaaatataggtattagcttattgattttaaattggttattaaatgtctggcatggatctcctccctgctcacgggcctcaccatcctcaatggcgagtgtaaaacttcgcaccaacacactcgacaagcttgatggcgacccctacgtcaacatccgcatgggcaaggtcatgtaatttttatcttcatttcaatagtgattgaagcaaatgaaaattttaaaattttggcagtgagtatgcaacacttccaagcaatggataatgtattaatgtggggctgtgggcgttggaacgtgcgtgttgactagctttgattagcttgtcgatatacatacttagccatctattttttcttctcctttcaaatgctatgctattgctactgctgttggagtgtaccatttaacttgatatatgatttaatagatgctttgtgtgcataaatcgtctacagttaccatctggacttttttagccatgtttgagagatgtgacggagtttggatttcacttaaaaatgcaggtccagttgatgtttaatgtgcctgaactgcagttacagtcataaagctcaaacaatcttgagcatttggttttacattatattctctggtttctgtttttgtgatttgtgttctgatgatgcaaacgcttccattttttatgttgctcctgcacaagatttcctgcacaaccaactgttttttgaattctttatgttatttgatccagggagtggacacaatcaggctcttgcgcaagtatcccctgaatttactacctgtagtttcgaaatgggcttacccaaaaaaatatttgcactaagaatatttatgtttgtttagttggtctggacaaaccacaagatcagtttaagcattgcttccaaatgccattaaatatttatcttgactgaaaattcgcacacaagaatagtaatattctatgaccaagtgactgtagtatgaagaagcatgtgtcattttcctgattaatttagctggttcaactttgttggggtcccaagtcttggccagaacttgatgtaattaaactcctttagacaattgagtacctttctatgtggatttacatatccctttgcttatttagtaacttctgcaaaatttgaatcctaggcaatgtcaacctcaacaccttgatgaacatgttcagtgtgcttggtgctggtggtggccttggtggtcgaaatgcttctaatggctctggaccgccatgcttgcgtcggacgcgggacgtccacgccgccatcgcccgtgagcagctccgacagcctcatcgccgcgttgcacctgctcttgtgtcgcaggctcgggttaccgtcggtgctgacaccgaggaaggcatgatccatgcggagcagcccaaggcgcgatgccacctccgctgtcacgcatgatgagctgcttcgcctctggcaccgccttgttccttcgcgatctcacattggacggtggatgaacttgggcttccaagatccgtaatacaaggtaaattgagtaccttttgtgacctcttctgtatttctaggcctttgtataacagctgtggacaaaacctgtaaacatgttggatgaactggagcagctattgaaaggtaactctatggtgaaagagctaacgcctaggacaaatgactaccttgtttcatttcgagaatgtatgtccaccaggattttatctgttaatttgaacaaaattcatatcaaagcacgacaggtacttcttgatatttccttgatttgcacagtgattgagtgagcttttaagggtacgaatgtagcagcctagaataattctatatttacttactactataaagagcgggagcaaaatatagctatacaattgatgtatatttagcatatcaaacaatgctcaagatacttaattaattgcatactatagttaggctgtatataccaatgcaatggtcactagcaagataatgcagcctcacagtcttatgacatcagccaatatataaattagaccatttttgttgctgcaactgcaactaatactatgttgaagtgtttttcgttaactctgctctgaaaatgctttttgcttcactctttgacatatctatatgactatatagccgatgcctgtttttactatatgcttatcatgaatctcatgttttccatatgaataatgctagctgttgcaacatctttgtttggagctaatgatacatttaatcctagacttgatggcaaagaacgggtgcaattttttgtctctctatttcctatttatgttgcacaaataattgtttccttttgttatccaaataaataattacttccttctccacccttttctccagttgtagcgagtgagttttagtaagggataaacaatagtaggaagaactctgttgtgtttcaatctcgagtatttgatggatggggcattgttctatagatggtgtatacagaaatgatcttaactgtcattttggtcaaaaccacaatagttctacttatgttagaaaatcaaaagatttaagtgtcttccatggtttaaagttcatgatgagcaaatttgacttatttttaattgtttatcatattttgagaataattttgctgcctattcaacagataccatggggggagcatttgatccagctagctggcaaacaagatttggtggtaactgtttatgatgaaacaaatatttcgaatcattaattgctatgtttgtgtctgcatcctgtcagcaattaggatgtgacaggacatggcctccctccaatgcaaaaatcccaaaagctccttgcagacacacttatttgcattctttgcgctgacatgcagttaggatgcgacagggcctccctccaatgcaaaatcacattaaccatgtcaccgctgtcaattgttttcttgagtttgttcccaaaacctcttaattattattgcccacggatagtcatgttatctacataatccgttttgccactcttcagggttctgcattgtgaatagaggttcatctttgtgattagattgccaccgccgctgctttctactcattcgacgaatgttttgcaaagaagaaatctggtttatcttaccctcgattccttcctatgatacaactaacaaaatgaattggtacattcaggtatctttaaaaccttttcacttccaaattagaatgatatcatgctcaagaggtaacattttctgatgttttttattttaatagtaattattggtcgctgactttttaaaactatttgtgttgtacttcaagcatcttctacactgcatctaagctttgaagagttacggacaattttgtactaattgttttctttattttcccaaatgtgtgccacttcctttagtatttttgcagtgcagacgattgaaaactactgttttacatcacctctctgtcataggaatagtttactactctaatgctcattctattaacactaaaaaaagatatatcgcttgaaaacaggtatgtatttcaatcttctagatttatatttctttctttatatatacaaaacaggtaagtttgtaccatttgttttattttttaaaaaaagaaaaggtatgacacttacattagtattttttcccaccagaaacgattgaaaactattgtttcccgtcacctcctgtcatagatggcttggaccctcttattatcctgggagcctcggtggtttggaagcatagaaacagagtggtgttcggtagagtttcttccaacctcactcttattctggagtctgctaatgaggaaagcgagaaatgacaagttgcaggagccaagggttatcctttctggctgctccaagccatataatttagggtggttggatccttcatggatattttaatgtacttctgttgttggcctccgtaagaagtgcatgtatcccgggcgtctttcagctctttgtattcttcgtcttttaatatagtggggcgcagttctcctgtgcttttcgagaaaaaaaaatatgtgcatctatttaagtctcttaccaataagtgtttataaaatatgtttcattgttcttagcttgatatgtggtaaggtcttcttctttcttgatcatctatgtatgccttaatt

SEQ ID NO: 67483 - DNA, 3790 bp, Zea Mays
ccggcgcccaaagatcgaagctccgagcaggaaacgccaccgccctccatctcccccgtgtccctagccaggagcaccgtccccctcaccaccccgcctaactttcctatcctcatcccgacgcctggagatccatcctcaaacgccgctgctagggcaccgtcccgcgctaggaccccccgcgcctcgcaatcatgtcaccggcaactctgacgacctagggctcacagaggctagcaccacgatggccgacccgggcgcctccgtcaacatcgctgcgcgccaccacctcgcgtcgcagctcgcgaggcagccgccagtgacgcacacgggctggtggggaggggcgcgttcgtaccaccatgggaggggcgtggggcgtggcatcaagggtgagggaggggcgtcgaggaggcggacggcaacaagcccacacatccaacaccctaccaggtctttgatgctgctgcttcaccaaacaatgaaatgctcttgatgcatgattcaggagctaggaggatatctattgtcgtcgagttacatgaagttgactttcctctgctgctgttgtgctcagtgtggatgacattgtgctgcctcaggcaatgtcaacctcaacaccttgatgaacatgttcagtgtgcttggtgctggtggtggccttggtggtcgaaatgcttctaatggtccctttatgtggcacacatgaatacctacaactccataatgttgctgaatgattaattatggaatgtggacaatgcaagatacattttgagtacccttttgatctaggctctggaccgccatgcttgcgtcggacgcgggacgtccacgccgccatcgcccgtgagcagctccgacagcctcatcgccgcgttgcacctgctcttgtgtcgcaggctcgggttaccgtcggtgctgacaccgaggaaggcatgatccatgcggagcagcccaaggcgcgatgccacctccgctgtcacgcatgatgagctgcttcgcctctggcaccgccttgttccttcgcgatctcacattggacggtggatgaacttgggcttccaagatccgtaatacaaggtaaattgagtaccttttgtgacctcttctgtatttctaggcctttgtataacagctgtggacaaaacctgtaaacatgttggatgaactggagcagctattgaaaggtaactctatggtgaaagagctaacgcctaggacaaatgactaccttgtttcatttcgagaatgtatgtccaccaggattttatctgttaatttgaacaaaattcatatcaaagcacgacaggtacttcttgatatttccttgatttgcacagtgattgagtgagcttttaagggtacgaatgtagcagcctagaataattctatatttacttactactataaagagcgggagcaaaatatagctatacaattgatgtatatttagcatatcaaacaatgctcaagatacttaattaattgcatactatagttaggctgtatataccaatgcaatggtcactagcaagataatgcagcctcacagtcttatgacatcagccaatatataaattagaccatttttgttgctgcaactgcaactaatactatgttgaagtgtttttcgttaactctgctctgaaaatgctttttgcttcactctttgacatatctatatgactatatagccgatgcctgtttttactatatgcttatcatgaatctcatgttttccatatgaataatgctagctgttgcaacatctttgtttggagctaatgatacatttaatcctagacttgatggcaaagaacgggtgcaattttttgtctctctatttcctatttatgttgcacaaataattgtttccttttgttatccaaataaataattacttccttctccacccttttctccagttgtagcgagtgagttttagtaagggataaacaatagtaggaagaactctgttgtgtttcaatctcgagtatttgatggatggggcattgttctatagatggtgtatacagaaatgatcttaactgtcattttggtcaaaaccacaatagttctacttatgttagaaaatcaaaagatttaagtgtcttccatggtttaaagttcatgatgagcaaatttgacttatttttaattgtttatcatattttgagaataattttgctgcctattcaacagataccatggggggagcatttgatccagctagctggcaaacaagatttggtggtaactgtttatgatgaaacaaatatttcgaatcattaattgctatgtttgtgtctgcatcctgtcagcaattaggatgtgacaggacatggcctccctccaatgcaaaaatcccaaaagctccttgcagacacacttatttgcattctttgcgctgacatgcagttaggatgcgacagggcctccctccaatgcaaaatcacattaaccatgtcaccgctgtcaattgttttcttgagtttgttcccaaaacctcttaattattattgcccacggatagtcatgttatctacataatccgttttgccactcttcagggttctgcattgtgaatagaggttcatctttgtgattagattgccaccgccgctgctttctactcattcgacgaatgttttgcaaagaagaaatctggtttatcttaccctcgattccttcctatgatacaactaacaaaatgaattggtacattcaggtatctttaaaaccttttcacttccaaattagaatgatatcatgctcaagaggtaacattttctgatgttttttattttaatagtaattattggtcgctgactttttaaaactatttgtgttgtacttcaagcatcttctacactgcatctaagctttgaagagttacggacaattttgtactaattgttttctttattttcccaaatgtgtgccacttcctttagtatttttgcagtgcagacgattgaaaactactgttttacatcacctctctgtcataggaatagtttactactctaatgctcattctattaacactaaaaaaagatatatcgcttgaaaacaggtatgtatttcaatcttctagatttatatttctttctttatatatacaaaacaggtaagtttgtaccatttgttttattttttaaaaaaagaaaaggtatgacacttacattagtattttttcccaccagaaacgattgaaaactattgtttcccgtcacctcctgtcatagtaagtgtttcccgtcacctgaggatttccaattttctacaatggtgggagagatcttcaactattgtttctgacacttgaaaggatggcttggaccctcttattatcctgggagcctcggtggtttggaagcatagaaacagagtggtgttcggtagagtttcttccaacctcactcttattctggagtctgctaatgaggaaagcgagaaatgacaagttgcaggagccaagggttatcctttctggctgctccaagccatataatttagggtggttggatccttcatggatattttaatgtacttctgttgttggcctccgtaagaagtgcatgtatcccgggcgtctttcagctctttgtattcttcgtcttttaatatagtggggcgcagttctcctgtgcttttcgagaaaaaaaaatatgtgcatctatttaagtctcttaccaataagtgtttataaaatatgtttcattgttcttagcttgatatgtggtaaggtcttcttctttcttgatcatctatgtatgccttaatt

SEQ ID NO: 67484 - DNA, 3699 bp, Zea Mays
cggcgcccaaagatcgaagctccgagcaggaaacgccaccgccctccatctcccccgtgtccctagccaggagcaccgtccccctcaccaccccgcctaactttcctatcctcatcccgacgcctggagatccatcctcaaacgccgctgctagggcaccgtcccgcgctaggaccccccgcgcctcgcaatcatgtcaccggcaactctgacgacctagggctcacagaggctagcaccacgatggccgacccgggcgcctccgtcaacatcgctgcgcgccaccacctcgcgtcgcagctcgcgaggcagccgccagtgacgcacacgggctggtggggaggggcgcgttcgtaccaccatgggaggggcgtggggcgtggcatcaagggtgagggaggggcgtcgaggaggcggacggcaacaagcccacacatccaacaccctaccaggaagttgactttcctctgctgctgttgtgctcagtgtggatgacattgtgctgcctcaggcaatgtcaacctcaacaccttgatgaacatgttcagtgtgcttggtgctggtggtggccttggtggtcgaaatgcttctaatggtccctttatgtggcacacatgaatacctacaactccataatgttgctgaatgattaattatggaatgtggacaatgcaagatacattttgagtacccttttgatctaggctctggaccgccatgcttgcgtcggacgcgggacgtccacgccgccatcgcccgtgagcagctccgacagcctcatcgccgcgttgcacctgctcttgtgtcgcaggctcgggttaccgtcggtgctgacaccgaggaaggcatgatccatgcggagcagcccaaggcgcgatgccacctccgctgtcacgcatgatgagctgcttcgcctctggcaccgccttgttccttcgcgatctcacattggacggtggatgaacttgggcttccaagatccgtaatacaaggtaaattgagtaccttttgtgacctcttctgtatttctaggcctttgtataacagctgtggacaaaacctgtaaacatgttggatgaactggagcagctattgaaaggtaactctatggtgaaagagctaacgcctaggacaaatgactaccttgtttcatttcgagaatgtatgtccaccaggattttatctgttaatttgaacaaaattcatatcaaagcacgacaggtacttcttgatatttccttgatttgcacagtgattgagtgagcttttaagggtacgaatgtagcagcctagaataattctatatttacttactactataaagagcgggagcaaaatatagctatacaattgatgtatatttagcatatcaaacaatgctcaagatacttaattaattgcatactatagttaggctgtatataccaatgcaatggtcactagcaagataatgcagcctcacagtcttatgacatcagccaatatataaattagaccatttttgttgctgcaactgcaactaatactatgttgaagtgtttttcgttaactctgctctgaaaatgctttttgcttcactctttgacatatctatatgactatatagccgatgcctgtttttactatatgcttatcatgaatctcatgttttccatatgaataatgctagctgttgcaacatctttgtttggagctaatgatacatttaatcctagacttgatggcaaagaacgggtgcaattttttgtctctctatttcctatttatgttgcacaaataattgtttccttttgttatccaaataaataattacttccttctccacccttttctccagttgtagcgagtgagttttagtaagggataaacaatagtaggaagaactctgttgtgtttcaatctcgagtatttgatggatggggcattgttctatagatggtgtatacagaaatgatcttaactgtcattttggtcaaaaccacaatagttctacttatgttagaaaatcaaaagatttaagtgtcttccatggtttaaagttcatgatgagcaaatttgacttatttttaattgtttatcatattttgagaataattttgctgcctattcaacagataccatggggggagcatttgatccagctagctggcaaacaagatttggtggtaactgtttatgatgaaacaaatatttcgaatcattaattgctatgtttgtgtctgcatcctgtcagcaattaggatgtgacaggacatggcctccctccaatgcaaaaatcccaaaagctccttgcagacacacttatttgcattctttgcgctgacatgcagttaggatgcgacagggcctccctccaatgcaaaatcacattaaccatgtcaccgctgtcaattgttttcttgagtttgttcccaaaacctcttaattattattgcccacggatagtcatgttatctacataatccgttttgccactcttcagggttctgcattgtgaatagaggttcatctttgtgattagattgccaccgccgctgctttctactcattcgacgaatgttttgcaaagaagaaatctggtttatcttaccctcgattccttcctatgatacaactaacaaaatgaattggtacattcaggtatctttaaaaccttttcacttccaaattagaatgatatcatgctcaagaggtaacattttctgatgttttttattttaatagtaattattggtcgctgactttttaaaactatttgtgttgtacttcaagcatcttctacactgcatctaagctttgaagagttacggacaattttgtactaattgttttctttattttcccaaatgtgtgccacttcctttagtatttttgcagtgcagacgattgaaaactactgttttacatcacctctctgtcataggaatagtttactactctaatgctcattctattaacactaaaaaaagatatatcgcttgaaaacaggtatgtatttcaatcttctagatttatatttctttctttatatatacaaaacaggtaagtttgtaccatttgttttattttttaaaaaaagaaaaggtatgacacttacattagtattttttcccaccagaaacgattgaaaactattgtttcccgtcacctcctgtcatagtaagtgtttcccgtcacctgaggatttccaattttctacaatggtgggagagatcttcaactattgtttctgacacttgaaaggatggcttggaccctcttattatcctgggagcctcggtggtttggaagcatagaaacagagtggtgttcggtagagtttcttccaacctcactcttattctggagtctgctaatgaggaaagcgagaaatgacaagttgcaggagccaagggttatcctttctggctgctccaagccatataatttagggtggttggatccttcatggatattttaatgtacttctgttgttggcctccgtaagaagtgcatgtatcccgggcgtctttcagctctttgtattcttcgtcttttaatatagtggggcgcagttctcctgtgcttttcgagaaaaaaaaatatgtgcatctatttaagtctcttaccaataagtgtttataaaatatgtttcattgttcttagcttgatatgtggtaaggtcttcttctttcttgatcatctatgtatgccttaatt

SEQ ID NO: 67485 - DNA, 5348 bp, Zea Mays
ggcgcccaaagatcgaagctccgagcaggaaacgccaccgccctccatctcccccgtgtccctagccaggagcaccgtccccctcaccaccccgcctaactttcctatcctcatcccgacgcctggagatccatcctcaaacgccgctgctagggcaccgtcccgcgctaggaccccccgcgcctcgcaatcatgtcaccggcaactctgacgacctagggctcacagaggctagcaccacgatggccgacccgggcgcctccgtcaacatcgctgcgcgccaccacctcgcgtcgcagctcgcgaggcagccgccagtgacgcacacgggctggtggggaggggcgcgttcgtaccaccatgggaggggcgtggggcgtggcatcaagggtgagggaggggcgtcgaggaggcggacggcaacaagcccacacatccaacaccctaccaggtctttgatgctgctgcttcaccaaacaatgaaatgctcttgatgcatgattcaggagctaggaggatatctattgtcgtcgagttacatgaagttgactttcctctgctgctgttgtgctcagtgtggatgacattgtgctgcctcaggtacaactttccttttctgtgcttaagtaaaaaaatgttgttccattcgatacacagtcggattatttgatttaaagccttgctgaagttgacattgtgatatatcgtgaccctggtaaaaaatattttcaagttcagaaagcaggatacttcctttaatatgtctatcacacatgttcacggagataattctacacatggttttttatacctctttttgaccccacttggagatggaagcgagattttgaagttttaaggcctgcagtgccgtggtcttgcgttgatatctgtagttgtacatagaaattttctcatttggtgtatgtctttgctactttttccttaaacataaattatatttttataactatctggcagttattgatctatcactgccttactacatgatacctatctggcagttatgaaaatattcgaatccattttatatgtaaatcctaaaattttcgaatccaaagccacccattacaatattatgtactgaaattatatcttttacttatgtgtcactctgcatttttttaagatttaaaaaaatttcttccttattttatacatggttgaacaccaaccttcatgattcactggatcttcttagtattatctctaacaaaagaatttataaagttctttccccacaaatgcaaatataggtattagcttattgattttaaattggttattaaatgtctggcatggatctcctccctgctcacgggcctcaccatcctcaatggcgagtgtaaaacttcgcaccaacacactcgacaagcttgatggcgacccctacgtcaacatccgcatgggcaaggtcatgtaatttttatcttcatttcaatagtgattgaagcaaatgaaaattttaaaattttggcagtgagtatgcaacacttccaagcaatggataatgtattaatgtggggctgtgggcgttggaacgtgcgtgttgactagctttgattagcttgtcgatatacatacttagccatctattttttcttctcctttcaaatgctatgctattgctactgctgttggagtgtaccatttaacttgatatatgatttaatagatgctttgtgtgcataaatcgtctacagttaccatctggacttttttagccatgtttgagagatgtgacggagtttggatttcacttaaaaatgcaggtccagttgatgtttaatgtgcctgaactgcagttacagtcataaagctcaaacaatcttgagcatttggttttacattatattctctggtttctgtttttgtgatttgtgttctgatgatgcaaacgcttccattttttatgttgctcctgcacaagatttcctgcacaaccaactgttttttgaattctttatgttatttgatccagggagtggacacaatcaggctcttgcgcaagtatcccctgaatttactacctgtagtttcgaaatgggcttacccaaaaaaatatttgcactaagaatatttatgtttgtttagttggtctggacaaaccacaagatcagtttaagcattgcttccaaatgccattaaatatttatcttgactgaaaattcgcacacaagaatagtaatattctatgaccaagtgactgtagtatgaagaagcatgtgtcattttcctgattaatttagctggttcaactttgttggggtcccaagtcttggccagaacttgatgtaattaaactcctttagacaattgagtacctttctatgtggatttacatatccctttgcttatttagtaacttctgcaaaatttgaatcctaggcaatgtcaacctcaacaccttgatgaacatgttcagtgtgcttggtgctggtggtggccttggtggtcgaaatgcttctaatggtccctttatgtggcacacatgaatacctacaactccataatgttgctgaatgattaattatggaatgtggacaatgcaagatacattttgagtacccttttgatctaggctctggaccgccatgcttgcgtcggacgcgggacgtccacgccgccatcgcccgtgagcagctccgacagcctcatcgccgcgttgcacctgctcttgtgtcgcaggctcgggttaccgtcggtgctgacaccgaggaaggcatgatccatgcggagcagcccaaggcgcgatgccacctccgctgtcacgcatgatgagctgcttcgcctctggcaccgccttgttccttcgcgatctcacattggacggtggatgaacttgggcttccaagatccgtaatacaaggtaaattgagtaccttttgtgacctcttctgtatttctaggcctttgtataacagctgtggacaaaacctgtaaacatgttggatgaactggagcagctattgaaaggtaactctatggtgaaagagctaacgcctaggacaaatgactaccttgtttcatttcgagaatgtatgtccaccaggattttatctgttaatttgaacaaaattcatatcaaagcacgacaggtacttcttgatatttccttgatttgcacagtgattgagtgagcttttaagggtacgaatgtagcagcctagaataattctatatttacttactactataaagagcgggagcaaaatatagctatacaattgatgtatatttagcatatcaaacaatgctcaagatacttaattaattgcatactatagttaggctgtatataccaatgcaatggtcactagcaagataatgcagcctcacagtcttatgacatcagccaatatataaattagaccatttttgttgctgcaactgcaactaatactatgttgaagtgtttttcgttaactctgctctgaaaatgctttttgcttcactctttgacatatctatatgactatatagccgatgcctgtttttactatatgcttatcatgaatctcatgttttccatatgaataatgctagctgttgcaacatctttgtttggagctaatgatacatttaatcctagacttgatggcaaagaacgggtgcaattttttgtctctctatttcctatttatgttgcacaaataattgtttccttttgttatccaaataaataattacttccttctccacccttttctccagttgtagcgagtgagttttagtaagggataaacaatagtaggaagaactctgttgtgtttcaatctcgagtatttgatggatggggcattgttctatagatggtgtatacagaaatgatcttaactgtcattttggtcaaaaccacaatagttctacttatgttagaaaatcaaaagatttaagtgtcttccatggtttaaagttcatgatgagcaaatttgacttatttttaattgtttatcatattttgagaataattttgctgcctattcaacagataccatggggggagcatttgatccagctagctggcaaacaagatttggtgttaggatgcgacagggcctccctccaatgcaaaatcacattaaccatgtcaccgctgtcaattgttttcttgagtttgttcccaaaacctcttaattattattgcccacggatagtcatgttatctacataatccgttttgccactcttcagggttctgcattgtgaatagaggttcatctttgtgattagattgccaccgccgctgctttctactcattcgacgaatgttttgcaaagaagaaatctggtttatcttaccctcgattccttcctatgatacaactaacaaaatgaattggtacattcaggtatctttaaaaccttttcacttccaaattagaatgatatcatgctcaagaggtaacattttctgatgttttttattttaatagtaattattggtcgctgactttttaaaactatttgtgttgtacttcaagcatcttctacactgcatctaagctttgaagagttacggacaattttgtactaattgttttctttattttcccaaatgtgtgccacttcctttagtatttttgcagtgcagacgattgaaaactactgttttacatcacctctctgtcataggaatagtttactactctaatgctcattctattaacactaaaaaaagatatatcgcttgaaaacaggtatgtatttcaatcttctagatttatatttctttctttatatatacaaaacaggtaagtttgtaccatttgttttattttttaaaaaaagaaaaggtatgacacttacattagtattttttcccaccagaaacgattgaaaactattgtttcccgtcacctcctgtcatagatggcttggaccctcttattatcctgggagcctcggtggtttggaagcatagaaacagagtggtgttcggtagagtttcttccaacctcactcttattctggagtctgctaatgaggaaagcgagaaatgacaagttgcaggagccaagggttatcctttctggctgctccaagccatataatttagggtggttggatccttcatggatattttaatgtacttctgttgttggcctccgtaagaagtgcatgtatcccgggcgtctttcagctctttgtattcttcgtcttttaatatagtggggcgcagttctcctgtgcttttcgagaaaaaaaaatatgtgcatctatttaagtctcttaccaataagtgtttataaaatatgtttcattgttcttagcttgatatgtggtaaggtcttcttctttcttgatcatctatgtatgccttaatt

SEQ ID NO: 67486 - DNA, 3271 bp, Zea Mays
atcgaagctccgagcaggaaacgccaccgccctccatctcccccgtgtccctagccaggagcaccgtccccctcaccaccccgcctaactttcctatcctcatcccgacgcctggagatccatcctcaaacgccgctgctagggcaccgtcccgcgctaggaccccccgcgcctcgcaatcatgtcaccggcaactctgacgacctagggctcacaggaagttgactttcctctgctgctgttgtgctcagtgtggatgacattgtgctgcctcaggcaatgtcaacctcaacaccttgatgaacatgttcagtgtgcttggtgctggtggtggccttggtggtcgaaatgcttctaatggctctggaccgccatgcttgcgtcggacgcgggacgtccacgccgccatcgcccgtgagcagctccgacagcctcatcgccgcgttgcacctgctcttgtgtcgcaggctcgggttaccgtcggtgctgacaccgaggaaggcatgatccatgcggagcagcccaaggcgcgatgccacctccgctgtcacgcatgatgagctgcttcgcctctggcaccgccttgttccttcgcgatctcacattggacggtggatgaacttgggcttccaagatccgtaatacaaggtaaattgagtaccttttgtgacctcttctgtatttctaggcctttgtataacagctgtggacaaaacctgtaaacatgttggatgaactggagcagctattgaaaggtaactctatggtgaaagagctaacgcctaggacaaatgactaccttgtttcatttcgagaatgtatgtccaccaggattttatctgttaatttgaacaaaattcatatcaaagcacgacaggtacttcttgatatttccttgatttgcacagtgattgagtgagcttttaagggtacgaatgtagcagcctagaataattctatatttacttactactataaagagcgggagcaaaatatagctatacaattgatgtatatttagcatatcaaacaatgctcaagatacttaattaattgcatactatagttaggctgtatataccaatgcaatggtcactagcaagataatgcagcctcacagtcttatgacatcagccaatatataaattagaccatttttgttgctgcaactgcaactaatactatgttgaagtgtttttcgttaactctgctctgaaaatgctttttgcttcactctttgacatatctatatgactatatagccgatgcctgtttttactatatgcttatcatgaatctcatgttttccatatgaataatgctagctgttgcaacatctttgtttggagctaatgatacatttaatcctagacttgatggcaaagaacgggtgcaattttttgtctctctatttcctatttatgttgcacaaataattgtttccttttgttatccaaataaataattacttccttctccacccttttctccagttgtagcgagtgagttttagtaagggataaacaatagtaggaagaactctgttgtgtttcaatctcgagtatttgatggatggggcattgttctatagatggtgtatacagaaatgatcttaactgtcattttggtcaaaaccacaatagttctacttatgttagaaaatcaaaagatttaagtgtcttccatggtttaaagttcatgatgagcaaatttgacttatttttaattgtttatcatattttgagaataattttgctgcctattcaacagataccatggggggagcatttgatccagctagctggcaaacaagatttggtggtaactgtttatgatgaaacaaatatttcgaatcattaattgctatgtttgtgtctgcatcctgtcagcaattaggatgtgacaggacatggcctccctccaatgcaaaaatcccaaaagctccttgcagacacacttatttgcattctttgcgctgacatgcagttaggatgcgacagggcctccctccaatgcaaaatcacattaaccatgtcaccgctgtcaattgttttcttgagtttgttcccaaaacctcttaattattattgcccacggatagtcatgttatctacataatccgttttgccactcttcagggttctgcattgtgaatagaggttcatctttgtgattagattgccaccgccgctgctttctactcattcgacgaatgttttgcaaagaagaaatctggtttatcttaccctcgattccttcctatgatacaactaacaaaatgaattggtacattcaggtatctttaaaaccttttcacttccaaattagaatgatatcatgctcaagaggtaacattttctgatgttttttattttaatagtaattattggtcgctgactttttaaaactatttgtgttgtacttcaagcatcttctacactgcatctaagctttgaagagttacggacaattttgtactaattgttttctttattttcccaaatgtgtgccacttcctttagtatttttgcagtgcagacgattgaaaactactgttttacatcacctctctgtcataggaatagtttactactctaatgctcattctattaacactaaaaaaagatatatcgcttgaaaacaggtatgtatttcaatcttctagatttatatttctttctttatatatacaaaacaggtaagtttgtaccatttgttttattttttaaaaaaagaaaaggtatgacacttacattagtattttttcccaccagaaacgattgaaaactattgtttcccgtcacctcctgtcatagatggcttggaccctcttattatcctgggagcctcggtggtttggaagcatagaaacagagtggtgttcggtagagtttcttccaacctcactcttattctggagtctgctaatgaggaaagcgagaaatgacaagttgcaggagccaagggttatcctttctggctgctccaagccatataatttagggtggttggatccttcatggatattttaatgtacttctgttgttggcctccgtaagaagtgcatgtatcccgggcgtctttcagctctttgtattcttcgtcttttaatatagtggggcgcagttctcctgtgcttttcgagaaaaaaaaatatgtgcatctatttaagtctcttaccaataagtgtttataaaatatgtttcattgttcttagcttgatatgtggtaaggtcttcttctttcttgatcatctatgtatgccttaatt

SEQ ID NO: 67487 - DNA, 5381 bp, Zea Mays
atcgaagctccgagcaggaaacgccaccgccctccatctcccccgtgtccctagccaggagcaccgtccccctcaccaccccgcctaactttcctatcctcatcccgacgcctggagatccatcctcaaacgccgctgctagggcaccgtcccgcgctaggaccccccgcgcctcgcaatcatgtcaccggcaactctgacgacctagggctcacagaggctagcaccacgatggccgacccgggcgcctccgtcaacatcgctgcgcgccaccacctcgcgtcgcagctcgcgaggcagccgccagtgacgcacacgggctggtggggaggggcgcgttcgtaccaccatgggaggggcgtggggcgtggcatcaagggtgagggaggggcgtcgaggaggcggacggcaacaagcccacacatccaacaccctaccaggaagttgactttcctctgctgctgttgtgctcagtgtggatgacattgtgctgcctcaggtacaactttccttttctgtgcttaagtaaaaaaatgttgttccattcgatacacagtcggattatttgatttaaagccttgctgaagttgacattgtgatatatcgtgaccctggtaaaaaatattttcaagttcagaaagcaggatacttcctttaatatgtctatcacacatgttcacggagataattctacacatggttttttatacctctttttgaccccacttggagatggaagcgagattttgaagttttaaggcctgcagtgccgtggtcttgcgttgatatctgtagttgtacatagaaattttctcatttggtgtatgtctttgctactttttccttaaacataaattatatttttataactatctggcagttattgatctatcactgccttactacatgatacctatctggcagttatgaaaatattcgaatccattttatatgtaaatcctaaaattttcgaatccaaagccacccattacaatattatgtactgaaattatatcttttacttatgtgtcactctgcatttttttaagatttaaaaaaatttcttccttattttatacatggttgaacaccaaccttcatgattcactggatcttcttagtattatctctaacaaaagaatttataaagttctttccccacaaatgcaaatataggtattagcttattgattttaaattggttattaaatgtctggcatggatctcctccctgctcacgggcctcaccatcctcaatggcgagtgtaaaacttcgcaccaacacactcgacaagcttgatggcgacccctacgtcaacatccgcatgggcaaggtcatgtaatttttatcttcatttcaatagtgattgaagcaaatgaaaattttaaaattttggcagtgagtatgcaacacttccaagcaatggataatgtattaatgtggggctgtgggcgttggaacgtgcgtgttgactagctttgattagcttgtcgatatacatacttagccatctattttttcttctcctttcaaatgctatgctattgctactgctgttggagtgtaccatttaacttgatatatgatttaatagatgctttgtgtgcataaatcgtctacagttaccatctggacttttttagccatgtttgagagatgtgacggagtttggatttcacttaaaaatgcaggtccagttgatgtttaatgtgcctgaactgcagttacagtcataaagctcaaacaatcttgagcatttggttttacattatattctctggtttctgtttttgtgatttgtgttctgatgatgcaaacgcttccattttttatgttgctcctgcacaagatttcctgcacaaccaactgttttttgaattctttatgttatttgatccagggagtggacacaatcaggctcttgcgcaagtatcccctgaatttactacctgtagtttcgaaatgggcttacccaaaaaaatatttgcactaagaatatttatgtttgtttagttggtctggacaaaccacaagatcagtttaagcattgcttccaaatgccattaaatatttatcttgactgaaaattcgcacacaagaatagtaatattctatgaccaagtgactgtagtatgaagaagcatgtgtcattttcctgattaatttagctggttcaactttgttggggtcccaagtcttggccagaacttgatgtaattaaactcctttagacaattgagtacctttctatgtggatttacatatccctttgcttatttagtaacttctgcaaaatttgaatcctaggcaatgtcaacctcaacaccttgatgaacatgttcagtgtgcttggtgctggtggtggccttggtggtcgaaatgcttctaatggtccctttatgtggcacacatgaatacctacaactccataatgttgctgaatgattaattatggaatgtggacaatgcaagatacattttgagtacccttttgatctaggctctggaccgccatgcttgcgtcggacgcgggacgtccacgccgccatcgcccgtgagcagctccgacagcctcatcgccgcgttgcacctgctcttgtgtcgcaggctcgggttaccgtcggtgctgacaccgaggaaggcatgatccatgcggagcagcccaaggcgcgatgccacctccgctgtcacgcatgatgagctgcttcgcctctggcaccgccttgttccttcgcgatctcacattggacggtggatgaacttgggcttccaagatccgtaatacaaggtaaattgagtaccttttgtgacctcttctgtatttctaggcctttgtataacagctgtggacaaaacctgtaaacatgttggatgaactggagcagctattgaaaggtaactctatggtgaaagagctaacgcctaggacaaatgactaccttgtttcatttcgagaatgtatgtccaccaggattttatctgttaatttgaacaaaattcatatcaaagcacgacaggtacttcttgatatttccttgatttgcacagtgattgagtgagcttttaagggtacgaatgtagcagcctagaataattctatatttacttactactataaagagcgggagcaaaatatagctatacaattgatgtatatttagcatatcaaacaatgctcaagatacttaattaattgcatactatagttaggctgtatataccaatgcaatggtcactagcaagataatgcagcctcacagtcttatgacatcagccaatatataaattagaccatttttgttgctgcaactgcaactaatactatgttgaagtgtttttcgttaactctgctctgaaaatgctttttgcttcactctttgacatatctatatgactatatagccgatgcctgtttttactatatgcttatcatgaatctcatgttttccatatgaataatgctagctgttgcaacatctttgtttggagctaatgatacatttaatcctagacttgatggcaaagaacgggtgcaattttttgtctctctatttcctatttatgttgcacaaataattgtttccttttgttatccaaataaataattacttccttctccacccttttctccagttgtagcgagtgagttttagtaagggataaacaatagtaggaagaactctgttgtgtttcaatctcgagtatttgatggatggggcattgttctatagatggtgtatacagaaatgatcttaactgtcattttggtcaaaaccacaatagttctacttatgttagaaaatcaaaagatttaagtgtcttccatggtttaaagttcatgatgagcaaatttgacttatttttaattgtttatcatattttgagaataattttgctgcctattcaacagataccatggggggagcatttgatccagctagctggcaaacaagatttggtggtaactgtttatgatgaaacaaatatttcgaatcattaattgctatgtttgtgtctgcatcctgtcagcaattaggatgtgacaggacatggcctccctccaatgcaaaaatcccaaaagctccttgcagacacacttatttgcattctttgcgctgacatgcagttaggatgcgacagggcctccctccaatgcaaaatcacattaaccatgtcaccgctgtcaattgttttcttgagtttgttcccaaaacctcttaattattattgcccacggatagtcatgttatctacataatccgttttgccactcttcagggttctgcattgtgaatagaggttcatctttgtgattagattgccaccgccgctgctttctactcattcgacgaatgttttgcaaagaagaaatctggtttatcttaccctcgattccttcctatgatacaactaacaaaatgaattggtacattcaggtatctttaaaaccttttcacttccaaattagaatgatatcatgctcaagaggtaacattttctgatgttttttattttaatagtaattattggtcgctgactttttaaaactatttgtgttgtacttcaagcatcttctacactgcatctaagctttgaagagttacggacaattttgtactaattgttttctttattttcccaaatgtgtgccacttcctttagtatttttgcagtgcagacgattgaaaactactgttttacatcacctctctgtcataggaatagtttactactctaatgctcattctattaacactaaaaaaagatatatcgcttgaaaacaggtatgtatttcaatcttctagatttatatttctttctttatatatacaaaacaggtaagtttgtaccatttgttttattttttaaaaaaagaaaaggtatgacacttacattagtattttttcccaccagaaacgattgaaaactattgtttcccgtcacctcctgtcatacctcggtggtttggaagcatagaaacagagtggtgttcggtagagtttcttccaacctcactcttattctggagtctgctaatgaggaaagcgagaaatgacaagttgcaggagccaagggttatcctttctggctgctccaagccatataatttagggtggttggatccttcatggatattttaatgtacttctgttgttggcctccgtaagaagtgcatgtatcccgggcgtctttcagctctttgtattcttcgtcttttaatatagtggggcgcagttctcctgtgcttttcgagaaaaaaaaatatgtgcatctatttaagtctcttaccaataagtgtttataaaatatgtttcattgttcttagcttgatatgtggtaaggtcttcttctttcttgatcatctatgtatgccttaatt

SEQ ID NO: 67488 - DNA, 5273 bp, Zea Mays
atcgaagctccgagcaggaaacgccaccgccctccatctcccccgtgtccctagccaggagcaccgtccccctcaccaccccgcctaactttcctatcctcatcccgacgcctggagatccatcctcaaacgccgctgctagggcaccgtcccgcgctaggaccccccgcgcctcgcaatcatgtcaccggcaactctgacgacctagggctcacaggaagttgactttcctctgctgctgttgtgctcagtgtggatgacattgtgctgcctcaggtacaactttccttttctgtgcttaagtaaaaaaatgttgttccattcgatacacagtcggattatttgatttaaagccttgctgaagttgacattgtgatatatcgtgaccctggtaaaaaatattttcaagttcagaaagcaggatacttcctttaatatgtctatcacacatgttcacggagataattctacacatggttttttatacctctttttgaccccacttggagatggaagcgagattttgaagttttaaggcctgcagtgccgtggtcttgcgttgatatctgtagttgtacatagaaattttctcatttggtgtatgtctttgctactttttccttaaacataaattatatttttataactatctggcagttattgatctatcactgccttactacatgatacctatctggcagttatgaaaatattcgaatccattttatatgtaaatcctaaaattttcgaatccaaagccacccattacaatattatgtactgaaattatatcttttacttatgtgtcactctgcatttttttaagatttaaaaaaatttcttccttattttatacatggttgaacaccaaccttcatgattcactggatcttcttagtattatctctaacaaaagaatttataaagttctttccccacaaatgcaaatataggtattagcttattgattttaaattggttattaaatgtctggcatggatctcctccctgctcacgggcctcaccatcctcaatggcgagtgtaaaacttcgcaccaacacactcgacaagcttgatggcgacccctacgtcaacatccgcatgggcaaggtcatgtaatttttatcttcatttcaatagtgattgaagcaaatgaaaattttaaaattttggcagtgagtatgcaacacttccaagcaatggataatgtattaatgtggggctgtgggcgttggaacgtgcgtgttgactagctttgattagcttgtcgatatacatacttagccatctattttttcttctcctttcaaatgctatgctattgctactgctgttggagtgtaccatttaacttgatatatgatttaatagatgctttgtgtgcataaatcgtctacagttaccatctggacttttttagccatgtttgagagatgtgacggagtttggatttcacttaaaaatgcaggtccagttgatgtttaatgtgcctgaactgcagttacagtcataaagctcaaacaatcttgagcatttggttttacattatattctctggtttctgtttttgtgatttgtgttctgatgatgcaaacgcttccattttttatgttgctcctgcacaagatttcctgcacaaccaactgttttttgaattctttatgttatttgatccagggagtggacacaatcaggctcttgcgcaagtatcccctgaatttactacctgtagtttcgaaatgggcttacccaaaaaaatatttgcactaagaatatttatgtttgtttagttggtctggacaaaccacaagatcagtttaagcattgcttccaaatgccattaaatatttatcttgactgaaaattcgcacacaagaatagtaatattctatgaccaagtgactgtagtatgaagaagcatgtgtcattttcctgattaatttagctggttcaactttgttggggtcccaagtcttggccagaacttgatgtaattaaactcctttagacaattgagtacctttctatgtggatttacatatccctttgcttatttagtaacttctgcaaaatttgaatcctaggcaatgtcaacctcaacaccttgatgaacatgttcagtgtgcttggtgctggtggtggccttggtggtcgaaatgcttctaatggtccctttatgtggcacacatgaatacctacaactccataatgttgctgaatgattaattatggaatgtggacaatgcaagatacattttgagtacccttttgatctaggctctggaccgccatgcttgcgtcggacgcgggacgtccacgccgccatcgcccgtgagcagctccgacagcctcatcgccgcgttgcacctgctcttgtgtcgcaggctcgggttaccgtcggtgctgacaccgaggaaggcatgatccatgcggagcagcccaaggcgcgatgccacctccgctgtcacgcatgatgagctgcttcgcctctggcaccgccttgttccttcgcgatctcacattggacggtggatgaacttgggcttccaagatccgtaatacaaggtaaattgagtaccttttgtgacctcttctgtatttctaggcctttgtataacagctgtggacaaaacctgtaaacatgttggatgaactggagcagctattgaaaggtaactctatggtgaaagagctaacgcctaggacaaatgactaccttgtttcatttcgagaatgtatgtccaccaggattttatctgttaatttgaacaaaattcatatcaaagcacgacaggtacttcttgatatttccttgatttgcacagtgattgagtgagcttttaagggtacgaatgtagcagcctagaataattctatatttacttactactataaagagcgggagcaaaatatagctatacaattgatgtatatttagcatatcaaacaatgctcaagatacttaattaattgcatactatagttaggctgtatataccaatgcaatggtcactagcaagataatgcagcctcacagtcttatgacatcagccaatatataaattagaccatttttgttgctgcaactgcaactaatactatgttgaagtgtttttcgttaactctgctctgaaaatgctttttgcttcactctttgacatatctatatgactatatagccgatgcctgtttttactatatgcttatcatgaatctcatgttttccatatgaataatgctagctgttgcaacatctttgtttggagctaatgatacatttaatcctagacttgatggcaaagaacgggtgcaattttttgtctctctatttcctatttatgttgcacaaataattgtttccttttgttatccaaataaataattacttccttctccacccttttctccagttgtagcgagtgagttttagtaagggataaacaatagtaggaagaactctgttgtgtttcaatctcgagtatttgatggatggggcattgttctatagatggtgtatacagaaatgatcttaactgtcattttggtcaaaaccacaatagttctacttatgttagaaaatcaaaagatttaagtgtcttccatggtttaaagttcatgatgagcaaatttgacttatttttaattgtttatcatattttgagaataattttgctgcctattcaacagataccatggggggagcatttgatccagctagctggcaaacaagatttggtggtaactgtttatgatgaaacaaatatttcgaatcattaattgctatgtttgtgtctgcatcctgtcagcaattaggatgtgacaggacatggcctccctccaatgcaaaaatcccaaaagctccttgcagacacacttatttgcattctttgcgctgacatgcagttaggatgcgacagggcctccctccaatgcaaaatcacattaaccatgtcaccgctgtcaattgttttcttgagtttgttcccaaaacctcttaattattattgcccacggatagtcatgttatctacataatccgttttgccactcttcagggttctgcattgtgaatagaggttcatctttgtgattagattgccaccgccgctgctttctactcattcgacgaatgttttgcaaagaagaaatctggtttatcttaccctcgattccttcctatgatacaactaacaaaatgaattggtacattcaggtatctttaaaaccttttcacttccaaattagaatgatatcatgctcaagaggtaacattttctgatgttttttattttaatagtaattattggtcgctgactttttaaaactatttgtgttgtacttcaagcatcttctacactgcatctaagctttgaagagttacggacaattttgtactaattgttttctttattttcccaaatgtgtgccacttcctttagtatttttgcagtgcagacgattgaaaactactgttttacatcacctctctgtcataggaatagtttactactctaatgctcattctattaacactaaaaaaagatatatcgcttgaaaacaggtatgtatttcaatcttctagatttatatttctttctttatatatacaaaacaggtaagtttgtaccatttgttttattttttaaaaaaagaaaaggtatgacacttacattagtattttttcccaccagaaacgattgaaaactattgtttcccgtcacctcctgtcatagtaagtgtttcccgtcacctgaggatttccaattttctacaatggtgggagagatcttcaactattgtttctgacacttgaaaggatggcttggaccctcttattatcctgggagcctcggtggtttggaagcatagaaacagagtggtgttcggtagagtttcttccaacctcactcttattctggagtctgctaatgaggaaagcgagaaatgacaagttgcaggagccaagggttatcctttctggctgctccaagccatataatttagggtggttggatccttcatggatattttaatgtacttctgttgttggcctccgtaagaagtgcatgtatcccgggcgtctttcagctctttgtattcttcgtcttttaatatagtggggcgcagttctcctgtgcttttcgagaaaaaaaaatatgtgcatctatttaagtctcttaccaataagtgtttataaaatatgtttcattgttcttagcttgatatgtggtaaggtcttcttctttcttgatcatctatgtatgccttaatt

SEQ ID NO: 67489 - DNA, 5164 bp, Zea Mays
atcgaagctccgagcaggaaacgccaccgccctccatctcccccgtgtccctagccaggagcaccgtccccctcaccaccccgcctaactttcctatcctcatcccgacgcctggagatccatcctcaaacgccgctgctagggcaccgtcccgcgctaggaccccccgcgcctcgcaatcatgtcaccggcaactctgacgacctagggctcacaggaagttgactttcctctgctgctgttgtgctcagtgtggatgacattgtgctgcctcaggtacaactttccttttctgtgcttaagtaaaaaaatgttgttccattcgatacacagtcggattatttgatttaaagccttgctgaagttgacattgtgatatatcgtgaccctggtaaaaaatattttcaagttcagaaagcaggatacttcctttaatatgtctatcacacatgttcacggagataattctacacatggttttttatacctctttttgaccccacttggagatggaagcgagattttgaagttttaaggcctgcagtgccgtggtcttgcgttgatatctgtagttgtacatagaaattttctcatttggtgtatgtctttgctactttttccttaaacataaattatatttttataactatctggcagttattgatctatcactgccttactacatgatacctatctggcagttatgaaaatattcgaatccattttatatgtaaatcctaaaattttcgaatccaaagccacccattacaatattatgtactgaaattatatcttttacttatgtgtcactctgcatttttttaagatttaaaaaaatttcttccttattttatacatggttgaacaccaaccttcatgattcactggatcttcttagtattatctctaacaaaagaatttataaagttctttccccacaaatgcaaatataggtattagcttattgattttaaattggttattaaatgtctggcatggatctcctccctgctcacgggcctcaccatcctcaatggcgagtgtaaaacttcgcaccaacacactcgacaagcttgatggcgacccctacgtcaacatccgcatgggcaaggtcatgtaatttttatcttcatttcaatagtgattgaagcaaatgaaaattttaaaattttggcagtgagtatgcaacacttccaagcaatggataatgtattaatgtggggctgtgggcgttggaacgtgcgtgttgactagctttgattagcttgtcgatatacatacttagccatctattttttcttctcctttcaaatgctatgctattgctactgctgttggagtgtaccatttaacttgatatatgatttaatagatgctttgtgtgcataaatcgtctacagttaccatctggacttttttagccatgtttgagagatgtgacggagtttggatttcacttaaaaatgcaggtccagttgatgtttaatgtgcctgaactgcagttacagtcataaagctcaaacaatcttgagcatttggttttacattatattctctggtttctgtttttgtgatttgtgttctgatgatgcaaacgcttccattttttatgttgctcctgcacaagatttcctgcacaaccaactgttttttgaattctttatgttatttgatccagggagtggacacaatcaggctcttgcgcaagtatcccctgaatttactacctgtagtttcgaaatgggcttacccaaaaaaatatttgcactaagaatatttatgtttgtttagttggtctggacaaaccacaagatcagtttaagcattgcttccaaatgccattaaatatttatcttgactgaaaattcgcacacaagaatagtaatattctatgaccaagtgactgtagtatgaagaagcatgtgtcattttcctgattaatttagctggttcaactttgttggggtcccaagtcttggccagaacttgatgtaattaaactcctttagacaattgagtacctttctatgtggatttacatatccctttgcttatttagtaacttctgcaaaatttgaatcctaggcaatgtcaacctcaacaccttgatgaacatgttcagtgtgcttggtgctggtggtggccttggtggtcgaaatgcttctaatggctctggaccgccatgcttgcgtcggacgcgggacgtccacgccgccatcgcccgtgagcagctccgacagcctcatcgccgcgttgcacctgctcttgtgtcgcaggctcgggttaccgtcggtgctgacaccgaggaaggcatgatccatgcggagcagcccaaggcgcgatgccacctccgctgtcacgcatgatgagctgcttcgcctctggcaccgccttgttccttcgcgatctcacattggacggtggatgaacttgggcttccaagatccgtaatacaaggtaaattgagtaccttttgtgacctcttctgtatttctaggcctttgtataacagctgtggacaaaacctgtaaacatgttggatgaactggagcagctattgaaaggtaactctatggtgaaagagctaacgcctaggacaaatgactaccttgtttcatttcgagaatgtatgtccaccaggattttatctgttaatttgaacaaaattcatatcaaagcacgacaggtacttcttgatatttccttgatttgcacagtgattgagtgagcttttaagggtacgaatgtagcagcctagaataattctatatttacttactactataaagagcgggagcaaaatatagctatacaattgatgtatatttagcatatcaaacaatgctcaagatacttaattaattgcatactatagttaggctgtatataccaatgcaatggtcactagcaagataatgcagcctcacagtcttatgacatcagccaatatataaattagaccatttttgttgctgcaactgcaactaatactatgttgaagtgtttttcgttaactctgctctgaaaatgctttttgcttcactctttgacatatctatatgactatatagccgatgcctgtttttactatatgcttatcatgaatctcatgttttccatatgaataatgctagctgttgcaacatctttgtttggagctaatgatacatttaatcctagacttgatggcaaagaacgggtgcaattttttgtctctctatttcctatttatgttgcacaaataattgtttccttttgttatccaaataaataattacttccttctccacccttttctccagttgtagcgagtgagttttagtaagggataaacaatagtaggaagaactctgttgtgtttcaatctcgagtatttgatggatggggcattgttctatagatggtgtatacagaaatgatcttaactgtcattttggtcaaaaccacaatagttctacttatgttagaaaatcaaaagatttaagtgtcttccatggtttaaagttcatgatgagcaaatttgacttatttttaattgtttatcatattttgagaataattttgctgcctattcaacagataccatggggggagcatttgatccagctagctggcaaacaagatttggtggtaactgtttatgatgaaacaaatatttcgaatcattaattgctatgtttgtgtctgcatcctgtcagcaattaggatgtgacaggacatggcctccctccaatgcaaaaatcccaaaagctccttgcagacacacttatttgcattctttgcgctgacatgcagttaggatgcgacagggcctccctccaatgcaaaatcacattaaccatgtcaccgctgtcaattgttttcttgagtttgttcccaaaacctcttaattattattgcccacggatagtcatgttatctacataatccgttttgccactcttcagggttctgcattgtgaatagaggttcatctttgtgattagattgccaccgccgctgctttctactcattcgacgaatgttttgcaaagaagaaatctggtttatcttaccctcgattccttcctatgatacaactaacaaaatgaattggtacattcaggtatctttaaaaccttttcacttccaaattagaatgatatcatgctcaagaggtaacattttctgatgttttttattttaatagtaattattggtcgctgactttttaaaactatttgtgttgtacttcaagcatcttctacactgcatctaagctttgaagagttacggacaattttgtactaattgttttctttattttcccaaatgtgtgccacttcctttagtatttttgcagtgcagacgattgaaaactactgttttacatcacctctctgtcataggaatagtttactactctaatgctcattctattaacactaaaaaaagatatatcgcttgaaaacaggtatgtatttcaatcttctagatttatatttctttctttatatatacaaaacaggtaagtttgtaccatttgttttattttttaaaaaaagaaaaggtatgacacttacattagtattttttcccaccagaaacgattgaaaactattgtttcccgtcacctcctgtcatagtaagtgtttcccgtcacctgaggatttccaattttctacaatggtgggagagatcttcaactattgtttctgacacttgaaaggatggcttggaccctcttattatcctgggagcctcggtggtttggaagcatagaaacagagtggtgttcggtagagtttcttccaacctcactcttattctggagtctgctaatgaggaaagcgagaaatgacaagttgcaggagccaagggttatcctttctggctgctccaagccatataatttagggtggttggatccttcatggatattttaatgtacttctgttgttggcctccgtaagaagtgcatgtatcccgggcgtctttcagctctttgtattcttcgtcttttaatatagtggggcgcagttctcctgtgcttttcgagaaaaaaaaatatgtgcatctatttaagtctcttaccaataagtgtttataaaatatgtttcattgttcttagcttgatatgtggtaaggtcttcttctttcttgatcatctatgtatgccttaatt

SEQ ID NO: 67490 - DNA, 5015 bp, Zea Mays
gtcatctccccacgttgggggtgggttagtgggtaggattcaatcgtacaggccagatccagtgcaggaggatcggtctttgatgctgctgcttcaccaaacaatgaaatgctcttgatgcatgattcaggagctaggaggatatctattgtcgtcgagttacatgaagttgactttcctctgctgctgttgtgctcagtgtggatgacattgtgctgcctcaggtacaactttccttttctgtgcttaagtaaaaaaatgttgttccattcgatacacagtcggattatttgatttaaagccttgctgaagttgacattgtgatatatcgtgaccctggtaaaaaatattttcaagttcagaaagcaggatacttcctttaatatgtctatcacacatgttcacggagataattctacacatggttttttatacctctttttgaccccacttggagatggaagcgagattttgaagttttaaggcctgcagtgccgtggtcttgcgttgatatctgtagttgtacatagaaattttctcatttggtgtatgtctttgctactttttccttaaacataaattatatttttataactatctggcagttattgatctatcactgccttactacatgatacctatctggcagttatgaaaatattcgaatccattttatatgtaaatcctaaaattttcgaatccaaagccacccattacaatattatgtactgaaattatatcttttacttatgtgtcactctgcatttttttaagatttaaaaaaatttcttccttattttatacatggttgaacaccaaccttcatgattcactggatcttcttagtattatctctaacaaaagaatttataaagttctttccccacaaatgcaaatataggtattagcttattgattttaaattggttattaaatgtctggcatggatctcctccctgctcacgggcctcaccatcctcaatggcgagtgtaaaacttcgcaccaacacactcgacaagcttgatggcgacccctacgtcaacatccgcatgggcaaggtcatgtaatttttatcttcatttcaatagtgattgaagcaaatgaaaattttaaaattttggcagtgagtatgcaacacttccaagcaatggataatgtattaatgtggggctgtgggcgttggaacgtgcgtgttgactagctttgattagcttgtcgatatacatacttagccatctattttttcttctcctttcaaatgctatgctattgctactgctgttggagtgtaccatttaacttgatatatgatttaatagatgctttgtgtgcataaatcgtctacagttaccatctggacttttttagccatgtttgagagatgtgacggagtttggatttcacttaaaaatgcaggtccagttgatgtttaatgtgcctgaactgcagttacagtcataaagctcaaacaatcttgagcatttggttttacattatattctctggtttctgtttttgtgatttgtgttctgatgatgcaaacgcttccattttttatgttgctcctgcacaagatttcctgcacaaccaactgttttttgaattctttatgttatttgatccagggagtggacacaatcaggctcttgcgcaagtatcccctgaatttactacctgtagtttcgaaatgggcttacccaaaaaaatatttgcactaagaatatttatgtttgtttagttggtctggacaaaccacaagatcagtttaagcattgcttccaaatgccattaaatatttatcttgactgaaaattcgcacacaagaatagtaatattctatgaccaagtgactgtagtatgaagaagcatgtgtcattttcctgattaatttagctggttcaactttgttggggtcccaagtcttggccagaacttgatgtaattaaactcctttagacaattgagtacctttctatgtggatttacatatccctttgcttatttagtaacttctgcaaaatttgaatcctaggcaatgtcaacctcaacaccttgatgaacatgttcagtgtgcttggtgctggtggtggccttggtggtcgaaatgcttctaatggctctggaccgccatgcttgcgtcggacgcgggacgtccacgccgccatcgcccgtgagcagctccgacagcctcatcgccgcgttgcacctgctcttgtgtcgcaggctcgggttaccgtcggtgctgacaccgaggaaggcatgatccatgcggagcagcccaaggcgcgatgccacctccgctgtcacgcatgatgagctgcttcgcctctggcaccgccttgttccttcgcgatctcacattggacggtggatgaacttgggcttccaagatccgtaatacaagctattgaaaggtaactctatggtgaaagagctaacgcctaggacaaatgactaccttgtttcatttcgagaatgtatgtccaccaggattttatctgttaatttgaacaaaattcatatcaaagcacgacaggtacttcttgatatttccttgatttgcacagtgattgagtgagcttttaagggtacgaatgtagcagcctagaataattctatatttacttactactataaagagcgggagcaaaatatagctatacaattgatgtatatttagcatatcaaacaatgctcaagatacttaattaattgcatactatagttaggctgtatataccaatgcaatggtcactagcaagataatgcagcctcacagtcttatgacatcagccaatatataaattagaccatttttgttgctgcaactgcaactaatactatgttgaagtgtttttcgttaactctgctctgaaaatgctttttgcttcactctttgacatatctatatgactatatagccgatgcctgtttttactatatgcttatcatgaatctcatgttttccatatgaataatgctagctgttgcaacatctttgtttggagctaatgatacatttaatcctagacttgatggcaaagaacgggtgcaattttttgtctctctatttcctatttatgttgcacaaataattgtttccttttgttatccaaataaataattacttccttctccacccttttctccagttgtagcgagtgagttttagtaagggataaacaatagtaggaagaactctgttgtgtttcaatctcgagtatttgatggatggggcattgttctatagatggtgtatacagaaatgatcttaactgtcattttggtcaaaaccacaatagttctacttatgttagaaaatcaaaagatttaagtgtcttccatggtttaaagttcatgatgagcaaatttgacttatttttaattgtttatcatattttgagaataattttgctgcctattcaacagataccatggggggagcatttgatccagctagctggcaaacaagatttggtggtaactgtttatgatgaaacaaatatttcgaatcattaattgctatgtttgtgtctgcatcctgtcagcaattaggatgtgacaggacatggcctccctccaatgcaaaaatcccaaaagctccttgcagacacacttatttgcattctttgcgctgacatgcagttaggatgcgacagggcctccctccaatgcaaaatcacattaaccatgtcaccgctgtcaattgttttcttgagtttgttcccaaaacctcttaattattattgcccacggatagtcatgttatctacataatccgttttgccactcttcagggttctgcattgtgaatagaggttcatctttgtgattagattgccaccgccgctgctttctactcattcgacgaatgttttgcaaagaagaaatctggtttatcttaccctcgattccttcctatgatacaactaacaaaatgaattggtacattcaggtatctttaaaaccttttcacttccaaattagaatgatatcatgctcaagaggtaacattttctgatgttttttattttaatagtaattattggtcgctgactttttaaaactatttgtgttgtacttcaagcatcttctacactgcatctaagctttgaagagttacggacaattttgtactaattgttttctttattttcccaaatgtgtgccacttcctttagtatttttgcagtgcagacgattgaaaactactgttttacatcacctctctgtcataggaatagtttactactctaatgctcattctattaacactaaaaaaagatatatcgcttgaaaacaggtatgtatttcaatcttctagatttatatttctttctttatatatacaaaacaggtaagtttgtaccatttgttttattttttaaaaaaagaaaaggtatgacacttacattagtattttttcccaccagaaacgattgaaaactattgtttcccgtcacctcctgtcatagtaagtgtttcccgtcacctgaggatttccaattttctacaatggtgggagagatcttcaactattgtttctgacacttgaaaggatggcttggaccctcttattatcctgggagcctcggtggtttggaagcatagaaacagagtggtgttcggtagagtttcttccaacctcactcttattctggagtctgctaatgaggaaagcgagaaatgacaagttgcaggagccaagggttatcctttctggctgctccaagccatataatttagggtggttggatccttcatggatattttaatgtacttctgttgttggcctccgtaagaagtgcatgtatcccgggcgtctttcagctctttgtattcttcgtcttttaatatagtggggcgcagttctcctgtgcttttcgagaaaaaaaaatatgtgcatctatttaagtctcttaccaataagtgtttataaaatatgtttcattgttcttagcttgatatgtggtaaggtcttcttctttcttgatcatctatgtatgccttaatt

SEQ ID NO: 67491 - DNA, 3219 bp, Zea Mays
gtcatctccccacgttgggggtgggttagtgggtaggattcaatcgtacaggccagatccagtgcaggaggatcggtctttgatgctgctgcttcaccaaacaatgaaatgctcttgatgcatgattcaggagctaggaggatatctattgtcgtcgagttacatgaagttgactttcctctgctgctgttgtgctcagtgtggatgacattgtgctgcctcaggcaatgtcaacctcaacaccttgatgaacatgttcagtgtgcttggtgctggtggtggccttggtggtcgaaatgcttctaatggctctggaccgccatgcttgcgtcggacgcgggacgtccacgccgccatcgcccgtgagcagctccgacagcctcatcgccgcgttgcacctgctcttgtgtcgcaggctcgggttaccgtcggtgctgacaccgaggaaggcatgatccatgcggagcagcccaaggcgcgatgccacctccgctgtcacgcatgatgagctgcttcgcctctggcaccgccttgttccttcgcgatctcacattggacggtggatgaacttgggcttccaagatccgtaatacaaggtaaattgagtaccttttgtgacctcttctgtatttctaggcctttgtataacagctgtggacaaaacctgtaaacatgttggatgaactggagcagctattgaaaggtaactctatggtgaaagagctaacgcctaggacaaatgactaccttgtttcatttcgagaatgtatgtccaccaggattttatctgttaatttgaacaaaattcatatcaaagcacgacaggtacttcttgatatttccttgatttgcacagtgattgagtgagcttttaagggtacgaatgtagcagcctagaataattctatatttacttactactataaagagcgggagcaaaatatagctatacaattgatgtatatttagcatatcaaacaatgctcaagatacttaattaattgcatactatagttaggctgtatataccaatgcaatggtcactagcaagataatgcagcctcacagtcttatgacatcagccaatatataaattagaccatttttgttgctgcaactgcaactaatactatgttgaagtgtttttcgttaactctgctctgaaaatgctttttgcttcactctttgacatatctatatgactatatagccgatgcctgtttttactatatgcttatcatgaatctcatgttttccatatgaataatgctagctgttgcaacatctttgtttggagctaatgatacatttaatcctagacttgatggcaaagaacgggtgcaattttttgtctctctatttcctatttatgttgcacaaataattgtttccttttgttatccaaataaataattacttccttctccacccttttctccagttgtagcgagtgagttttagtaagggataaacaatagtaggaagaactctgttgtgtttcaatctcgagtatttgatggatggggcattgttctatagatggtgtatacagaaatgatcttaactgtcattttggtcaaaaccacaatagttctacttatgttagaaaatcaaaagatttaagtgtcttccatggtttaaagttcatgatgagcaaatttgacttatttttaattgtttatcatattttgagaataattttgctgcctattcaacagataccatggggggagcatttgatccagctagctggcaaacaagatttggtggtaactgtttatgatgaaacaaatatttcgaatcattaattgctatgtttgtgtctgcatcctgtcagcaattaggatgtgacaggacatggcctccctccaatgcaaaaatcccaaaagctccttgcagacacacttatttgcattctttgcgctgacatgcagttaggatgcgacagggcctccctccaatgcaaaatcacattaaccatgtcaccgctgtcaattgttttcttgagtttgttcccaaaacctcttaattattattgcccacggatagtcatgttatctacataatccgttttgccactcttcagggttctgcattgtgaatagaggttcatctttgtgattagattgccaccgccgctgctttctactcattcgacgaatgttttgcaaagaagaaatctggtttatcttaccctcgattccttcctatgatacaactaacaaaatgaattggtacattcaggtatctttaaaaccttttcacttccaaattagaatgatatcatgctcaagaggtaacattttctgatgttttttattttaatagtaattattggtcgctgactttttaaaactatttgtgttgtacttcaagcatcttctacactgcatctaagctttgaagagttacggacaattttgtactaattgttttctttattttcccaaatgtgtgccacttcctttagtatttttgcagtgcagacgattgaaaactactgttttacatcacctctctgtcataggaatagtttactactctaatgctcattctattaacactaaaaaaagatatatcgcttgaaaacaggtatgtatttcaatcttctagatttatatttctttctttatatatacaaaacaggtaagtttgtaccatttgttttattttttaaaaaaagaaaaggtatgacacttacattagtattttttcccaccagaaacgattgaaaactattgtttcccgtcacctcctgtcatagatggcttggaccctcttattatcctgggagcctcggtggtttggaagcatagaaacagagtggtgttcggtagagtttcttccaacctcactcttattctggagtctgctaatgaggaaagcgagaaatgacaagttgcaggagccaagggttatcctttctggctgctccaagccatataatttagggtggttggatccttcatggatattttaatgtacttctgttgttggcctccgtaagaagtgcatgtatcccgggcgtctttcagctctttgtattcttcgtcttttaatatagtggggcgcagttctcctgtgcttttcgagaaaaaaaaatatgtgcatctatttaagtctcttaccaataagtgtttataaaatatgtttcattgttcttagcttgatatgtggtaaggtcttcttctttcttgatcatctatgtatgccttaatt

SEQ ID NO: 67492 - DNA, 3896 bp, Zea Mays
cacgttgggggtgggttagtgggtaggattcaatcgtacaggccagatccagtgcaggaggatcggtctttgatgctgctgcttcaccaaacaatgaaatgctcttgatgcatgattcaggagctaggaggatatctattgtcgtcgagttacatgaagttgactttcctctgctgctgttgtgctcagtgtggatgacattgtgctgcctcaggtacaactttccttttctgtgcttaagtaaaaaaatgttgttccattcgatacacagtcggattatttgatttaaagccttgctgaagttgacattgtgatatatcgtgaccctggtaaaaaatattttcaagttcagaaagcaggatacttcctttaatatgtctatcacacatgttcacggagataattctacacatggttttttatacctctttttgaccccacttggagatggaagcgagattttgaagttttaaggcctgcagtgccgtggtcttgcgttgatatctgtagttgtacatagaaattttctcatttggtgtatgtctttgctactttttccttaaacataaattatatttttataactatctggcagttattgatctatcactgccttactacatgatacctatctggcagttatgaaaatattcgaatccattttatatgtaaatcctaaaattttcgaatccaaagccacccattacaatattatgtactgaaattatatcttttacttatgtgtcactctgcatttttttaagatttaaaaaaatttcttccttattttatacatggttgaacaccaaccttcatgattcactggatcttcttagtattatctctaacaaaagaatttataaagttctttccccacaaatgcaaatataggtattagcttattgattttaaattggttattaaatgtctggcatggatctcctccctgctcacgggcctcaccatcctcaatggcgagtgtaaaacttcgcaccaacacactcgacaagcttgatggcgacccctacgtcaacatccgcatgggcaaggtcatgtaatttttatcttcatttcaatagtgattgaagcaaatgaaaattttaaaattttggcagtgagtatgcaacacttccaagcaatggataatgtattaatgtggggctgtgggcgttggaacgtgcgtgttgactagctttgattagcttgtcgatatacatacttagccatctattttttcttctcctttcaaatgctatgctattgctactgctgttggagtgtaccatttaacttgatatatgatttaatagatgctttgtgtgcataaatcgtctacagttaccatctggacttttttagccatgtttgagagatgtgacggagtttggatttcacttaaaaatgcaggtccagttgatgtttaatgtgcctgaactgcagttacagtcataaagctcaaacaatcttgagcatttggttttacattatattctctggtttctgtttttgtgatttgtgttctgatgatgcaaacgcttccattttttatgttgctcctgcacaagatttcctgcacaaccaactgttttttgaattctttatgttatttgatccagggagtggacacaatcaggctcttgcgcaagtatcccctgaatttactacctgtagtttcgaaatgggcttacccaaaaaaatatttgcactaagaatatttatgtttgtttagttggtctggacaaaccacaagatcagtttaagcattgcttccaaatgccattaaatatttatcttgactgaaaattcgcacacaagaatagtaatattctatgaccaagtgactgtagtatgaagaagcatgtgtcattttcctgattaatttagctggttcaactttgttggggtcccaagtcttggccagaacttgatgtaattaaactcctttagacaattgagtacctttctatgtggatttacatatccctttgcttatttagtaacttctgcaaaatttgaatcctaggcaatgtcaacctcaacaccttgatgaacatgttcagtgtgcttggtgctggtggtggccttggtggtcgaaatgcttctaatggctctggaccgccatgcttgcgtcggacgcgggacgtccacgccgccatcgcccgtgagcagctccgacagcctcatcgccgcgttgcacctgctcttgtgtcgcaggctcgggttaccgtcggtgctgacaccgaggaaggcatgatccatgcggagcagcccaaggcgcgatgccacctccgctgtcacgcatgatgagctgcttcgcctctggcaccgccttgttccttcgcgatctcacattggacggtggatgaacttgggcttccaagatccgtaatacaagataccatggggggagcatttgatccagctagctggcaaacaagatttggtggtaactgtttatgatgaaacaaatatttcgaatcattaattgctatgtttgtgtctgcatcctgtcagcaattaggatgtgacaggacatggcctccctccaatgcaaaaatcccaaaagctccttgcagacacacttatttgcattctttgcgctgacatgcagttaggatgcgacagggcctccctccaatgcaaaatcacattaaccatgtcaccgctgtcaattgttttcttgagtttgttcccaaaacctcttaattattattgcccacggatagtcatgttatctacataatccgttttgccactcttcagggttctgcattgtgaatagaggttcatctttgtgattagattgccaccgccgctgctttctactcattcgacgaatgttttgcaaagaagaaatctggtttatcttaccctcgattccttcctatgatacaactaacaaaatgaattggtacattcaggtatctttaaaaccttttcacttccaaattagaatgatatcatgctcaagaggtaacattttctgatgttttttattttaatagtaattattggtcgctgactttttaaaactatttgtgttgtacttcaagcatcttctacactgcatctaagctttgaagagttacggacaattttgtactaattgttttctttattttcccaaatgtgtgccacttcctttagtatttttgcagtgcagacgattgaaaactactgttttacatcacctctctgtcataggaatagtttactactctaatgctcattctattaacactaaaaaaagatatatcgcttgaaaacaggtatgtatttcaatcttctagatttatatttctttctttatatatacaaaacaggtaagtttgtaccatttgttttattttttaaaaaaagaaaaggtatgacacttacattagtattttttcccaccagaaacgattgaaaactattgtttcccgtcacctcctgtcatagatggcttggaccctcttattatcctgggagcctcggtggtttggaagcatagaaacagagtggtgttcggtagagtttcttccaacctcactcttattctggagtctgctaatgaggaaagcgagaaatgacaagttgcaggagccaagggttatcctttctggctgctccaagccatataatttagggtggttggatccttcatggatattttaatgtacttctgttgttggcctccgtaagaagtgcatgtatcccgggcgtctttcagctctttgtattcttcgtcttttaatatagtggggcgcagttctcctgtgcttttcgagaaaaaaaaatatgtgcatctatttaagtctcttaccaataagtgtttataaaatatgtttcattgttcttagcttgatatgtggtaaggtcttcttctttcttgatcatctatgtatgccttaatt

SEQ ID NO: 67493 - DNA, 4048 bp, Zea Mays
gccagatccagtgcaggaggatcggtctttgatgctgctgcttcaccaaacaatgaaatgctcttgatgcatgattcaggagctaggaggatatctattgtcgtcgagttacatgaagttgactttcctctgctgctgttgtgctcagtgtggatgacattgtgctgcctcaggtacaactttccttttctgtgcttaagtaaaaaaatgttgttccattcgatacacagtcggattatttgatttaaagccttgctgaagttgacattgtgatatatcgtgaccctggtaaaaaatattttcaagttcagaaagcaggatacttcctttaatatgtctatcacacatgttcacggagataattctacacatggttttttatacctctttttgaccccacttggagatggaagcgagattttgaagttttaaggcctgcagtgccgtggtcttgcgttgatatctgtagttgtacatagaaattttctcatttggtgtatgtctttgctactttttccttaaacataaattatatttttataactatctggcagttattgatctatcactgccttactacatgatacctatctggcagttatgaaaatattcgaatccattttatatgtaaatcctaaaattttcgaatccaaagccacccattacaatattatgtactgaaattatatcttttacttatgtgtcactctgcatttttttaagatttaaaaaaatttcttccttattttatacatggttgaacaccaaccttcatgattcactggatcttcttagtattatctctaacaaaagaatttataaagttctttccccacaaatgcaaatataggtattagcttattgattttaaattggttattaaatgtctggcatggatctcctccctgctcacgggcctcaccatcctcaatggcgagtgtaaaacttcgcaccaacacactcgacaagcttgatggcgacccctacgtcaacatccgcatgggcaaggtcatgtaatttttatcttcatttcaatagtgattgaagcaaatgaaaattttaaaattttggcagtgagtatgcaacacttccaagcaatggataatgtattaatgtggggctgtgggcgttggaacgtgcgtgttgactagctttgattagcttgtcgatatacatacttagccatctattttttcttctcctttcaaatgctatgctattgctactgctgttggagtgtaccatttaacttgatatatgatttaatagatgctttgtgtgcataaatcgtctacagttaccatctggacttttttagccatgtttgagagatgtgacggagtttggatttcacttaaaaatgcaggtccagttgatgtttaatgtgcctgaactgcagttacagtcataaagctcaaacaatcttgagcatttggttttacattatattctctggtttctgtttttgtgatttgtgttctgatgatgcaaacgcttccattttttatgttgctcctgcacaagatttcctgcacaaccaactgttttttgaattctttatgttatttgatccagggagtggacacaatcaggctcttgcgcaagtatcccctgaatttactacctgtagtttcgaaatgggcttacccaaaaaaatatttgcactaagaatatttatgtttgtttagttggtctggacaaaccacaagatcagtttaagcattgcttccaaatgccattaaatatttatcttgactgaaaattcgcacacaagaatagtaatattctatgaccaagtgactgtagtatgaagaagcatgtgtcattttcctgattaatttagctggttcaactttgttggggtcccaagtcttggccagaacttgatgtaattaaactcctttagacaattgagtacctttctatgtggatttacatatccctttgcttatttagtaacttctgcaaaatttgaatcctaggcaatgtcaacctcaacaccttgatgaacatgttcagtgtgcttggtgctggtggtggccttggtggtcgaaatgcttctaatggtccctttatgtggcacacatgaatacctacaactccataatgttgctgaatgattaattatggaatgtggacaatgcaagatacattttgagtacccttttgatctaggctctggaccgccatgcttgcgtcggacgcgggacgtccacgccgccatcgcccgtgagcagctccgacagcctcatcgccgcgttgcacctgctcttgtgtcgcaggctcgggttaccgtcggtgctgacaccgaggaaggcatgatccatgcggagcagcccaaggcgcgatgccacctccgctgtcacgcatgatgagctgcttcgcctctggcaccgccttgttccttcgcgatctcacattggacggtggatgaacttgggcttccaagatccgtaatacaagataccatggggggagcatttgatccagctagctggcaaacaagatttggtggtaactgtttatgatgaaacaaatatttcgaatcattaattgctatgtttgtgtctgcatcctgtcagcaattaggatgtgacaggacatggcctccctccaatgcaaaaatcccaaaagctccttgcagacacacttatttgcattctttgcgctgacatgcagttaggatgcgacagggcctccctccaatgcaaaatcacattaaccatgtcaccgctgtcaattgttttcttgagtttgttcccaaaacctcttaattattattgcccacggatagtcatgttatctacataatccgttttgccactcttcagggttctgcattgtgaatagaggttcatctttgtgattagattgccaccgccgctgctttctactcattcgacgaatgttttgcaaagaagaaatctggtttatcttaccctcgattccttcctatgatacaactaacaaaatgaattggtacattcaggtatctttaaaaccttttcacttccaaattagaatgatatcatgctcaagaggtaacattttctgatgttttttattttaatagtaattattggtcgctgactttttaaaactatttgtgttgtacttcaagcatcttctacactgcatctaagctttgaagagttacggacaattttgtactaattgttttctttattttcccaaatgtgtgccacttcctttagtatttttgcagtgcagacgattgaaaactactgttttacatcacctctctgtcataggaatagtttactactctaatgctcattctattaacactaaaaaaagatatatcgcttgaaaacaggtatgtatttcaatcttctagatttatatttctttctttatatatacaaaacaggtaagtttgtaccatttgttttattttttaaaaaaagaaaaggtatgacacttacattagtattttttcccaccagaaacgattgaaaactattgtttcccgtcacctcctgtcatagtaagtgtttcccgtcacctgaggatttccaattttctacaatggtgggagagatcttcaactattgtttctgacacttgaaaggatggcttggaccctcttattatcctgggagcctcggtggtttggaagcatagaaacagagtggtgttcggtagagtttcttccaacctcactcttattctggagtctgctaatgaggaaagcgagaaatgacaagttgcaggagccaagggttatcctttctggctgctccaagccatataatttagggtggttggatccttcatggatattttaatgtacttctgttgttggcctccgtaagaagtgcatgtatcccgggcgtctttcagctctttgtattcttcgtcttttaatatagtggggcgcagttctcctgtgcttttcgagaaaaaaaaatatgtgcatctatttaagtctcttaccaataagtgtttataaaatatgtttcattgttcttagcttgatatgtggtaaggtcttcttctttcttgatcatctatgtatgccttaatt

SEQ ID NO: 67494 - DNA, 1089 bp, Zea Mays
tgcctattcaacagataccatggggggagcatttgatccagctagctggcaaacaagatttggtggtaactgtttatgatgaaacaaatatttcgaatcattaattgctatgtttgtgtctgcatcctgtcagcaattaggatgtgacaggacatggcctccctccaatgcaaaaatcccaaaagctccttgcagacacacttatttgcattctttgcgctgacatgcagttaggatgcgacagggcctccctccaatgcaaaatcacattaaccatgtcaccgctgtcaattgttttcttgagtttgttcccaaaacctcttaattattattgcccacggatagtcatgttatctacataatccgttttgccactcttcagggttctgcattgtgaatagaggttcatctttgtgattagattgccaccgccgctgctttctactcattcgacgaatgttttgcaaagaagaaatctggtttatcttaccctcgattccttcctatgatacaactaacaaaatgaattggtacattcaggtatctttaaaaccttttcacttccaaattagaatgatatcatgctcaagagaaacgattgaaaactattgtttcccgtcacctcctgtcatagatggcttggaccctcttattatcctgggagcctcggtggtttggaagcatagaaacagagtggtgttcggtagagtttcttccaacctcactcttattctggagtctgctaatgaggaaagcgagaaatgacaagttgcaggagccaagggttatcctttctggctgctccaagccatataatttagggtggttggatccttcatggatattttaatgtacttctgttgttggcctccgtaagaagtgcatgtatcccgggcgtctttcagctctttgtattcttcgtcttttaatatagtggggcgcagttctcctgtgcttttcgagaaaaaaaaatatgtgcatctatttaagtctcttaccaataagtgtttataaaatatgtttcattgttcttagcttgatatgtggtaaggtcttcttctttcttgatcatctatgtatgccttaatt

SEQ ID NO: 67495 - DNA, 4716 bp, Zea Mays
gcggcgtgtccacgttgtcgccctcataggctggtgcctgcctggtggtcgccattccgctgcgcacaggcgcacagcccaatccagtacaaacagcagcagcttcgcctccacctccacgcgagccaagcgcccggcccggctcccgcagcgcaaaaccctagcctcgcccgccccaaacccttggcggctacggtctctgatcccggtccaatggcgtcgtcgccggacttgttccctaacgttgccttctccgacgtctctgccgccgcccccgcggccgaggccaccgccgcgttcgggctcggcgccaccaccggggccccgcgcctctgcctcgtcaagtccgggaaggacgaggcggagcccacggtcgacatcgacctcgccgatgcgcaggtatttaagttgggaccgatggagtggctgtgcgtgtgcgacgagtcggaggctaaggctggcgtggaagagaagtcattttcaagagcaattaaggttgttcttaggacagaagctgagagcaaagccttctctttagcttttcaacaatggaaacaccaagttattagtggaaaagctggtgagaggttggagaatggatcaataattgcttcgaaaagcaaatttgatacaaaaattgaggcatcatcagcaaagatgtatttccactactacgggcaattattacatcagcaaaacatgttacaagattttgttcggacaggaacatactatgctgctgtaatggaaaaccgatctgactttgagggtcgagttgtggttgatgttggggctggaagtggtattctgtcgttatttgctgcccaggctggtgccagacatgtctatgcagttgaggcatccgaaatggctgaaaatgctcaacgtctaatgtccgggaatccgtcacttggacagcggatcacggtcatcaggggcaaggtcgaggaagtagagcttccagaaaaagctgacatattgatttctgagcctatgggaacccttttggttaatgaaaggatgctagagtcctatgtcatagctagagacagattccttgctccagatggtaaaatgtttccaacaacaggaaggattcacatggctccattttctgatgaatacctttatgttgaaatagcaaacaaggctctcttttggcagcagcacaatttttttggtgttgatcttacacctttacatggttcagcattccagggatatttttcacagcctgttgtggatgcatttgacccaagattattaatttctccaccaatatatcatacacttgattttactagcatgaaggaagaggagctttacgagattgatatccctctgagttttgtagcatctgttggcactagagtacatggattggcttgttggtttgatgtgttgttcaatgggagcactgtgcaaaggtggcttaccactgctccaggatctcctaccactcactggtaccaactgcgatgtgtgctttcacagccattgtatgtgatggccggccaagaaataactggccgccttcatctcgtagcccatagtgctcaaagctacacaatatacttgacaatgtcagctaaaatgtggggtgtgggtgcggagcaaggcggtatcctacaaacatctacaggaaaacttgaactcaaggagccgtactacaggttgtctcagccgcaatcctacatgttgccacaagatcaacagcagcagcagcaattgtcatctttgcagccacacggatcggagcagcagatgcaggaagggcttagcccaggcatcacgatagaccaagtagacaaagattacggcctcaactagacagacttgagaacctgagttggatgctctgatattccagcaacgagctcaggtctgtacaagtacaacacttcagagtgctccttagcctatgtttgtcaggcgttagctgccaaatgctaacatcacgttcgaggcgtacgagaccattccagagttgtgcagctgcagctaactgctggcgcgcccctgctccgttacttacgagggagtggaaaaaagcaattataaaatgtacggtttcagagcagctggctgaagcctggatccgatctgaatctgccgggcgttcgttcagttggaaaacagcaggaatcctacacacgtgagtcccgtgcgggacggtctgctagatcgcggagtgcatcaaacggtgctgccggcaatggaatatcccgtcccagccagcctgcgtgcttccaccaactttggaagcgatttccttgcgtaccatgccgtctcgtcgttgccaagaagctttcaagtacgggcagtatagatctgtcaactgtcgtacccaaatctgtcgatcgaacgtgtcgacaaatcttctgttgcttaacctcaaagcaaaattgcgaaggttgccatgccagcagcttcctgccaacggtcgtacctaaaactgtcgatgacatctcgtatgtatgcagtctcatcaaaattgtgctgcattcccacccgaaatttctagaacctggtttcgacgctcgacatcatcgtttatggcccaccagcggcagtgccctccaatttgaaccactagcacacagatcgatccgcgctattcgagaaaaaaagagacacaggccggttacgccgttggcgacgtgcccatcacggagcggctacgtgtcggtcccgctccagagtgttcttgcacagcctggacgtttccttctcctcttcccgcagcccggtttgccgaccaggttccaccgttccagagtagccaagcgaatcccgtgtctggttcgcgcgatggcggaggagcagtccaacccccagcaccagcaagcggaggagagggaggttatggtggagcagcagcagccgaggagggccccgaagctgaggtacctggacttcgtccaggtggcggctgcccaggccgcggtgtgcctcgctgggctctacggcctcgccaaggaccacgccggcccgctccgccccagcgttgacgccgtcgagtctgccgtcaagggcgtcgttagccccgtctacgaccgcttcggcggcctgccgctcgacgtcctcgccttcgtcgaccgcaaggtgagttgcgtcacgcgccctatgtaccgatctcccccttctcctgctctttgttggccgggtagcgtcgcgtggtagcacggcggcgtggttctgcgcccgtttcgcgggggcggttccacgaacctcgccggcggccggactaacttcaccccgccgtgtggtgcacggcaatcggcgcagcacggtgggttatgctgctgctgcgcctacctatatggatggaggattgttgtggttgtggtcaccccgactagatattttccttctgtggtgtatgattgctatggcgggcccgcgctcgagcggtgtgcggctcatctcagctgcgggggccctacttgggtgggtgtgccgtgtgcggtggtggtgagtggtgacttcgtagtccttgtgcgggccattcgcccgtgtctagtggctcctctatgagtatgccagatttccttagattccggcgcatgtagccgcgcccggcggagactccgatgccactgtcgtgaactaaattaccaagggttgttcgatcgaggaatgcaattagcaagtgttagattttgggcttccttattagtgacgttaataacagcaataacaacaacaccaccacaaaaataacaacaaccggtgttcactgaatcactgtgcgatcaccatgtcgtgtgttcctccgcttattgctgaccgatgcgcaacaacaatgggcgcaggtggacgacacggtgcacgaggtggacaagcacctcccgggcgcgctgaaggcggcgtcggcgcatgtctacgcggtggttcggggcgtgccggaggtggcgcgcgagctggcggccgaggcgcagcggtcgggcgtgaggggcgcagcccgtgcggcgctcgcgatgacggagccggtggcgcgggacgtgtacggccgcgtggagcccgtggccaaggacctctacgtgcggtacgagcccgcggcggagcacctggccgtctccgcctggcgctcgctgaacggcctgccggtgttcccgcacgtcgcggagatcgtcgtgcccaccgccgcgcactgggccgacaagtacaacagggcggtcgcagccgccgcggagcacggctacgcgggggccaagtacctccccgccatccccaccgaacgcatcgccaaggtgttttcgtcggcgccagaggccgagccgctggcagagggccagtagtgtgtgtgtgtgtgcgcgcgcgcgcgagctcgtctttgccggtggtgactctggatttggatcaccttccgaactgaactgaaaataaggaagcgtgaatccgggggccagttaaagatggtggtatggtatggtagcggcgttgtactagatgcgtgatgggacgatggttacggaccatgatgatgacgctgtgttccatttagctctctgctgcgtgcttttgtataaaagaagtggttcgatgtcgcaatccctgtgtttatctgacgatgcggttttttggctgttttagtttttgtttggtcagttcaggttagggcgaaaacgataagcttgcgtcaatgctatgcttttagagcatcttttgaagactctttatttttgaccctatttaactctttatttgtcattc

SEQ ID NO: 67496 - DNA, 3693 bp, Zea Mays
gtccacgttgtcgccctcataggctggtgcctgcctggtggtcgccattccgctgcgcacaggcgcacagcccaatccagtacaaacagcagcagcttcgcctccacctccacgcgagccaagcgcccggcccggctcccgcagcgcaaaaccctagcctcgcccgccccaaacccttggcggctacggtctctgatcccggtccaatggcgtcgtcgccggacttgttccctaacgttgccttctccgacgtctctgccgccgcccccgcggccgaggccaccgccgcgttcgggctcggcgccaccaccggggccccgcgcctctgcctcgtcaagtccgggaaggacgaggcggagcccacggtcgacatcgacctcgccgatgcgcaggtatttaagttgggaccgatggagtggctgtgcgtgtgcgacgagtcggaggctaaggctggcgtggaagagttctttgaggcagaagtcattttcaagagcaattaaggttgttcttaggacagaagctgagagcaaagccttctctttagcttttcaacaatggaaacaccaagttattagtggaaaagctggtgagaggttggagaatggatcaataattgcttcgaaaagcaaatttgatacaaaaattgaggcatcatcagcaaagatgtatttccactactacgggcaattattacatcagcaaaacatgttacaagattttgttcggacaggaacatactatgctgctgtaatggaaaaccgatctgactttgagggtcgagttgtggttgatgttggggctggaagtggtattctgtcgttatttgctgcccaggctggtgccagacatgtctatgcagttgaggcatccgaaatggctgaaaatgctcaacgtctaatgtccgggaatccgtcacttggacagcggatcacggtcatcaggggcaaggtcgaggaagtagagcttccagaaaaagctgacatattgatttctgagcctatgggaacccttttggttaatgaaaggatgctagagtcctatgtcatagctagagacagattccttgctccagatggtaaaatgtttccaacaacaggaaggattcacatggctccattttctgatgaatacctttatgttgaaatagcaaacaaggctctcttttggcagcagcacaatttttttggtgttgatcttacacctttacatggttcagcattccagggatatttttcacagcctgttgtggatgcatttgacccaagattattaatttctccaccaatatatcatacacttgattttactagcatgaaggaagaggagctttacgagattgatatccctctgagttttgtagcatctgttggcactagagtacatggattggcttgttggtttgatgtgttgttcaatgggagcactgtgcaaaggtggcttaccactgctccaggatctcctaccactcactggtaccaactgcgatgtgtgctttcacagccattgtatgtgatggccggccaagaaataactggccgccttcatctcgtagcccatagtgctcaaagctacacaatatacttgacaatgtcagctaaaatgtggggtgtgggtgcggagcaaggcggtatcctacaaacatctacaggaaaacttgaactcaaggagccgtactacaggttgtctcagccgcaatcctacatgttgccacaagatcaacagcagcagcagcaattgtcatctttgcagccacacggatcggagcagcagatgcaggaagggcttagcccaggcatcacgatagaccaagtagacaaagattacggcctcaactagacagacttgagaacctgagttggatgctctgatattccagcaacgagctcaggtctgtacaagtacaacacttcagagtgctccttagcctatgtttgtcaggcgttagctgccaaatgctaacatcacgttcgaggcgtacgagaccattccagagttgtgcagctgcagctaactgctggcgcgcccctgctccgttacttacgagggagtggaaaaaagcaattataaaatgtacggtttcaggtaaagtgaagatcggatgcaactaacaatggcgtgcatgttgtttaatatattattgctagaaattcatttattttccatgttcaaaaaaaagagacacaggccggttacgccgttggcgacgtgcccatcacggagcggctacgtgtcggtcccgctccagagtgttcttgcacagcctggacggtgccgatggagagtgccacaaatcggacggcccgacgatgccgcccgccccctatatagccctctttcccggcccttccgtctcctcgttcttccagcgaagcaagcagcctaaaaaaaccgtatcgtctcgcctgttcagtttccttctcctcttcccgcagcccggtttgccgaccaggttccaccgttccagagtagccaagcgaatcccgtgtctggttcgcgcgatggcggaggagcagtccaacccccagcaccagcaagcggaggagagggaggttatggtggagcagcagcagccgaggagggccccgaagctgaggtacctggacttcgtccaggtggcggctgcccaggccgcggtgtgcctcgctgggctctacggcctcgccaaggaccacgccggcccgctccgccccagcgttgacgccgtcgagtctgccgtcaagggcgtcgttagccccgtctacgaccgcttcggcggcctgccgctcgacgtcctcgccttcgtcgaccgcaaggtggacgacacggtgcacgaggtggacaagcacctcccgggcgcgctgaaggcggcgtcggcgcatgtctacgcggtggttcggggcgtgccggaggtggcgcgcgagctggcggccgaggcgcagcggtcgggcgtgaggggcgcagcccgtgcggcgctcgcgatgacggagccggtggcgcgggacgtgtacggccgcgtggagcccgtggccaaggacctctacgtgcggtacgagcccgcggcggagcacctggccgtctccgcctggcgctcgctgaacggcctgccggtgttcccgcacgtcgcggagatcgtcgtgcccaccgccgcgcactgggccgacaagtacaacagggcggtcgcagccgccgcggagcacggctacgcgggggccaagtacctccccgccatccccaccgaacgcatcgccaaggtgttttcgtcggcgccagaggccgagccgctggcagagggccagtagtgtgtgtgtgtgtgcgcgcgcgcgcgagctcgtctttgccggtggtgactctggatttggatcaccttccgaactgaactgaaaataaggaagcgtgaatccgggggccagttaaagatggtggtatggtatggtagcggcgttgtactagatgcgtgatgggacgatggttacggaccatgatgatgacgctgtgttccatttagctctctgctgcgtgcttttgtataaaagaagtggttcgatgtcgcaatccctgtgtttatctgacgatgcggttttttggctgttttagtttttgtttggtcagttcaggttagggcgaaaacgataagcttgcgtcaatgctatgcttttagagcatcttttgaagactctttatttttgaccctatttaactctttatttgtcattc

SEQ ID NO: 67497 - DNA, 3994 bp, Zea Mays
gtccacgttgtcgccctcataggctggtgcctgcctggtggtcgccattccgctgcgcacaggcgcacagcccaatccagtacaaacagcagcagcttcgcctccacctccacgcgagccaagcgcccggcccggctcccgcagcgcaaaaccctagcctcgcccgccccaaacccttggcggctacggtctctgatcccggtccaatggcgtcgtcgccggacttgttccctaacgttgccttctccgacgtctctgccgccgcccccgcggccgaggccaccgccgcgttcgggctcggcgccaccaccggggccccgcgcctctgcctcgtcaagtccgggaaggacgaggcggagcccacggtcgacatcgacctcgccgatgcgcaggtatttaagttgggaccgatggagtggctgtgcgtgtgcgacgagtcggaggctaaggctggcgtggaagagaagtcattttcaagagcaattaaggttgttcttaggacagaagctgagagcaaagccttctctttagcttttcaacaatggaaacaccaagttattagtggaaaagctggtgagaggttggagaatggatcaataattgcttcgaaaagcaaatttgatacaaaaattgaggcatcatcagcaaagatgtatttccactactacgggcaattattacatcagcaaaacatgttacaagattttgttcggacaggaacatactatgctgctgtaatggaaaaccgatctgactttgagggtcgagttgtggttgatgttggggctggaagtggtattctgtcgttatttgctgcccaggctggtgccagacatgtctatgcagttgaggcatccgaaatggctgaaaatgctcaacgtctaatgtccgggaatccgtcacttggacagcggatcacggtcatcaggggcaaggtcgaggaagtagagcttccagaaaaagctgacatattgatttctgagcctatgggaacccttttggttaatgaaaggatgctagagtcctatgtcatagctagagacagattccttgctccagatggtaaaatgtttccaacaacaggaaggattcacatggctccattttctgatgaatacctttatgttgaaatagcaaacaaggctctcttttggcagcagcacaatttttttggtgttgatcttacacctttacatggttcagcattccagggatatttttcacagcctgttgtggatgcatttgacccaagattattaatttctccaccaatatatcatacacttgattttactagcatgaaggaagaggagctttacgagattgatatccctctgagttttgtagcatctgttggcactagagtacatggattggcttgttggtttgatgtgttgttcaatgggagcactgtgcaaaggtggcttaccactgctccaggatctcctaccactcactggtaccaactgcgatgtgtgctttcacagccattgtatgtgatggccggccaagaaataactggccgccttcatctcgtagcccatagtgctcaaagctacacaatatacttgacaatgtcagctaaaatgtggggtgtgggtgcggagcaaggcggtatcctacaaacatctacaggaaaacttgaactcaaggagccgtactacaggttgtctcagccgcaatcctacatgttgccacaagatcaacagcagcagcagcaattgtcatctttgcagccacacggatcggagcagcagatgcaggaagggcttagcccaggcatcacgatagaccaagtagacaaagattacggcctcaactagacagacttgagaacctgagttggatgctctgatattccagcaacgagctcaggtctgtacaagtacaacacttcagagtgctccttagcctatgtttgtcaggcgttagctgccaaatgctaacatcacgttcgaggcgtacgagaccattccagagttgtgcagctgcagctaactgctggcgcgcccctgctccgttacttacgagggagtggaaaaaagcaattataaaatgtacggtttcagctggctgaagcctggatccgatctgaatctgccgggcgttcgttcagttggaaaacagcaggaatcctacacacgtgagtcccgtgcgggacggtctgctagatcgcggagtgcatcaaacggtgctgccggcaatggaatatcccgtcccagccagcctgcgtgcttccaccaactttggaagcgatttccttgcgtaccatgccgtctcgtcgttgccaagaagctttcaagtacgggcagtatagatctgtcaactgtcgtacccaaatctgtcgatcgaacgtgtcgacaaatcttctgttgcttaacctcaaagcaaaattgcgaaggttgccatgccagcagcttcctgccaacggtcgtacctaaaactgtcgatgacatctcgtatgtatgcagtctcatcaaaattgtgctgcattcccacccgaaatttctagaacctggtttcgacgctcgacatcatcgtttatggcccaccagcggcagtgccctccaatttgaaccactagcacacagatcgatccgcgctattcgagaaaaaaagagacacaggccggttacgccgttggcgacgtgcccatcacggagcggctacgtgtcggtcccgctccagagtgttcttgcacagcctggacgtttccttctcctcttcccgcagcccggtttgccgaccaggttccaccgttccagagtagccaagcgaatcccgtgtctggttcgcgcgatggcggaggagcagtccaacccccagcaccagcaagcggaggagagggaggttatggtggagcagcagcagccgaggagggccccgaagctgaggtacctggacttcgtccaggtggcggctgcccaggccgcggtgtgcctcgctgggctctacggcctcgccaaggaccacgccggcccgctccgccccagcgttgacgccgtcgagtctgccgtcaagggcgtcgttagccccgtctacgaccgcttcggcggcctgccgctcgacgtcctcgccttcgtcgaccgcaaggtggacgacacggtgcacgaggtggacaagcacctcccgggcgcgctgaaggcggcgtcggcgcatgtctacgcggtggttcggggcgtgccggaggtggcgcgcgagctggcggccgaggcgcagcggtcgggcgtgaggggcgcagcccgtgcggcgctcgcgatgacggagccggtggcgcgggacgtgtacggccgcgtggagcccgtggccaaggacctctacgtgcggtacgagcccgcggcggagcacctggccgtctccgcctggcgctcgctgaacggcctgccggtgttcccgcacgtcgcggagatcgtcgtgcccaccgccgcgcactgggccgacaagtacaacagggcggtcgcagccgccgcggagcacggctacgcgggggccaagtacctccccgccatccccaccgaacgcatcgccaaggtgttttcgtcggcgccagaggccgagccgctggcagagggccagtagtgtgtgtgtgtgtgcgcgcgcgcgcgagctcgtctttgccggtggtgactctggatttggatcaccttccgaactgaactgaaaataaggaagcgtgaatccgggggccagttaaagatggtggtatggtatggtagcggcgttgtactagatgcgtgatgggacgatggttacggaccatgatgatgacgctgtgttccatttagctctctgctgcgtgcttttgtataaaagaagtggttcgatgtcgcaatccctgtgtttatctgacgatgcggttttttggctgttttagtttttgtttggtcagttcaggttagggcgaaaacgataagcttgcgtcaatgctatgcttttagagcatcttttgaagactctttatttttgaccctatttaactctttatttgtcattc

SEQ ID NO: 67498 - DNA, 4307 bp, Zea Mays
gtccacgttgtcgccctcataggctggtgcctgcctggtggtcgccattccgctgcgcacaggcgcacagcccaatccagtacaaacagcagcagcttcgcctccacctccacgcgagccaagcgcccggcccggctcccgcagcgcaaaaccctagcctcgcccgccccaaacccttggcggctacggtctctgatcccggtccaatggcgtcgtcgccggacttgttccctaacgttgccttctccgacgtctctgccgccgcccccgcggccgaggccaccgccgcgttcgggctcggcgccaccaccggggccccgcgcctctgcctcgtcaagtccgggaaggacgaggcggagcccacggtcgacatcgacctcgccgatgcgcaggtatttaagttgggaccgatggagtggctgtgcgtgtgcgacgagtcggaggctaaggctggcgtggaagagaagtcattttcaagagcaattaaggttgttcttaggacagaagctgagagcaaagccttctctttagcttttcaacaatggaaacaccaagttattagtggaaaagctggtgagaggttggagaatggatcaataattgcttcgaaaagcaaatttgatacaaaaattgaggcatcatcagcaaagatgtatttccactactacgggcaattattacatcagcaaaacatgttacaagattttgttcggacaggaacatactatgctgctgtaatggaaaaccgatctgactttgagggtcgagttgtggttgatgttggggctggaagtggtattctgtcgttatttgctgcccaggctggtgccagacatgtctatgcagttgaggcatccgaaatggctgaaaatgctcaacgtctaatgtccgggaatccgtcacttggacagcggatcacggtcatcaggggcaaggtcgaggaagtagagcttccagaaaaagctgacatattgatttctgagcctatgggaacccttttggttaatgaaaggatgctagagtcctatgtcatagctagagacagattccttgctccagatggtaaaatgtttccaacaacaggaaggattcacatggctccattttctgatgaatacctttatgttgaaatagcaaacaaggctctcttttggcagcagcacaatttttttggtgttgatcttacacctttacatggttcagcattccagggatatttttcacagcctgttgtggatgcatttgacccaagattattaatttctccaccaatatatcatacacttgattttactagcatgaaggaagaggagctttacgagattgatatccctctgagttttgtagcatctgttggcactagagtacatggattggcttgttggtttgatgtgttgttcaatgggagcactgtgcaaaggtggcttaccactgctccaggatctcctaccactcactggtaccaactgcgatgtgtgctttcacagccattgtatgtgatggccggccaagaaataactggccgccttcatctcgtagcccatagtgctcaaagctacacaatatacttgacaatgtcagctaaaatgtggggtgtgggtgcggagcaaggcggtatcctacaaacatctacaggaaaacttgaactcaaggagccgtactacaggttgtctcagccgcaatcctacatgttgccacaagatcaacagcagcagcagcaattgtcatctttgcagccacacggatcggagcagcagatgcaggaagggcttagcccaggcatcacgatagaccaagtagacaaagattacggcctcaactagacagacttgagaacctgagttggatgctctgatattccagcaacgagctcaggtctgtacaagtacaacacttcagagtgctccttagcctatgtttgtcaggcgttagctgccaaatgctaacatcacgttcgaggcgtacgagaccattccagagttgtgcagctgcagctaactgctggcgcgcccctgctccgttacttacgagggagtggaaaaaagcaattataaaatgtacggtttcaggtaaagtgaagatcggatgcaactaacaatggcgtgcatgttgtttaatatattattgctagaaattcatttattttccatgttcaaaaaaaagagacacaggccggttacgccgttggcgacgtgcccatcacggagcggctacgtgtcggtcccgctccagagtgttcttgcacagcctggacggtgccgatggagagtgccacaaatcggacggcccgacgatgccgcccgccccctatatagccctctttcccggcccttccgtctcctcgttcttccagcgaagcaagcagcctaaaaaaaccgtatcgtctcgcctgttcagtttccttctcctcttcccgcagcccggtttgccgaccaggttccaccgttccagagtagccaagcgaatcccgtgtctggttcgcgcgatggcggaggagcagtccaacccccagcaccagcaagcggaggagagggaggttatggtggagcagcagcagccgaggagggccccgaagctgaggtacctggacttcgtccaggtggcggctgcccaggccgcggtgtgcctcgctgggctctacggcctcgccaaggaccacgccggcccgctccgccccagcgttgacgccgtcgagtctgccgtcaagggcgtcgttagccccgtctacgaccgcttcggcggcctgccgctcgacgtcctcgccttcgtcgaccgcaaggtgagttgcgtcacgcgccctatgtaccgatctcccccttctcctgctctttgttggccgggtagcgtcgcgtggtagcacggcggcgtggttctgcgcccgtttcgcgggggcggttccacgaacctcgccggcggccggactaacttcaccccgccgtgtggtgcacggcaatcggcgcagcacggtgggttatgctgctgctgcgcctacctatatggatggaggattgttgtggttgtggtcaccccgactagatattttccttctgtggtgtatgattgctatggcgggcccgcgctcgagcggtgtgcggctcatctcagctgcgggggccctacttgggtgggtgtgccgtgtgcggtggtggtgagtggtgacttcgtagtccttgtgcgggccattcgcccgtgtctagtggctcctctatgagtatgccagatttccttagattccggcgcatgtagccgcgcccggcggagactccgatgccactgtcgtgaactaaattaccaagggttgttcgatcgaggaatgcaattagcaagtgttagattttgggcttccttattagtgacgttaataacagcaataacaacaacaccaccacaaaaataacaacaaccggtggacgacacggtgcacgaggtggacaagcacctcccgggcgcgctgaaggcggcgtcggcgcatgtctacgcggtggttcggggcgtgccggaggtggcgcgcgagctggcggccgaggcgcagcggtcgggcgtgaggggcgcagcccgtgcggcgctcgcgatgacggagccggtggcgcgggacgtgtacggccgcgtggagcccgtggccaaggacctctacgtgcggtacgagcccgcggcggagcacctggccgtctccgcctggcgctcgctgaacggcctgccggtgttcccgcacgtcgcggagatcgtcgtgcccaccgccgcgcactgggccgacaagtacaacagggcggtcgcagccgccgcggagcacggctacgcgggggccaagtacctccccgccatccccaccgaacgcatcgccaaggtgttttcgtcggcgccagaggccgagccgctggcagagggccagtagtgtgtgtgtgtgtgcgcgcgcgcgcgagctcgtctttgccggtggtgactctggatttggatcaccttccgaactgaactgaaaataaggaagcgtgaatccgggggccagttaaagatggtggtatggtatggtagcggcgttgtactagatgcgtgatgggacgatggttacggaccatgatgatgacgctgtgttccatttagctctctgctgcgtgcttttgtataaaagaagtggttcgatgtcgcaatccctgtgtttatctgacgatgcggttttttggctgttttagtttttgtttggtcagttcaggttagggcgaaaacgataagcttgcgtcaatgctatgcttttagagcatcttttgaagactctttatttttgaccctatttaactctttatttgtcattc

SEQ ID NO: 67499 - DNA, 3538 bp, Zea Mays
gtccacgttgtcgccctcataggctggtgcctgcctggtggtcgccattccgctgcgcacaggcgcacagcccaatccagtacaaacagcagcagcttcgcctccacctccacgcgagccaagcgcccggcccggctcccgcagcgcaaaaccctagcctcgcccgccccaaacccttggcggctacggtctctgatcccggtccaatggcgtcgtcgccggacttgttccctaacgttgccttctccgacgtctctgccgccgcccccgcggccgaggccaccgccgcgttcgggctcggcgccaccaccggggccccgcgcctctgcctcgtcaagtccgggaaggacgaggcggagcccacggtcgacatcgacctcgccgatgcgcaggtatttaagttgggaccgatggagtggctgtgcgtgtgcgacgagtcggaggctaaggctggcgtggaagagaagtcattttcaagagcaattaaggttgttcttaggacagaagctgagagcaaagccttctctttagcttttcaacaatggaaacaccaagttattagtggaaaagctggtgagaggttggagaatggatcaataattgcttcgaaaagcaaatttgatacaaaaattgaggcatcatcagcaaagatgtatttccactactacgggcaattattacatcagcaaaacatgttacaagattttgttcggacaggaacatactatgctgctgtaatggaaaaccgatctgactttgagggtcgagttgtggttgatgttggggctggaagtggtattctgtcgttatttgctgcccaggctggtgccagacatgtctatgcagttgaggcatccgaaatggctgaaaatgctcaacgtctaatgtccgggaatccgtcacttggacagcggatcacggtcatcaggggcaaggtcgaggaagtagagcttccagaaaaagctgacatattgatttctgagcctatgggaacccttttggttaatgaaaggatgctagagtcctatgtcatagctagagacagattccttgctccagatggtaaaatgtttccaacaacaggaaggattcacatggctccattttctgatgaatacctttatgttgaaatagcaaacaaggctctcttttggcagcagcacaatttttttggtgttgatcttacacctttacatggttcagcattccagggatatttttcacagcctgttgtggatgcatttgacccaagattattaatttctccaccaatatatcatacacttgattttactagcatgaaggaagaggagctttacgagattgatatccctctgagttttgtagcatctgttggcactagagtacatggattggcttgttggtttgatgtgttgttcaatgggagcactgtgcaaaggtggcttaccactgctccaggatctcctaccactcactggtaccaactgcgatgtgtgctttcacagccattgtatgtgatggccggccaagaaataactggccgccttcatctcgtagcccatagtgctcaaagctacacaatatacttgacaatgtcagctaaaatgtggggtgtgggtgcggagcaaggcggtatcctacaaacatctacaggaaaacttgaactcaaggagccgtactacaggttgtctcagccgcaatcctacatgttgccacaagatcaacagcagcagcagcaattgtcatctttgcagccacacggatcggagcagcagatgcaggaagggcttagcccaggcatcacgatagaccaagtagacaaagattacggcctcaactagacagacttgagaacctgagttggatgctctgatattccagcaacgagctcaggtctgtacaagtacaacacttcagagtgctccttagcctatgtttgtcaggcgttagctgccaaatgctaacatcacgttcgaggcgtacgagaccattccagagttgtgcagctgcagctaactgctggcgcgcccctgctccgttacttacgagggagtggaaaaaagcaattataaaatgtacggtttcaggtaaagtgaagatcggatgcaactaacaatggcgtgcatgttgtttaatatattattgctagaaattcatttattttccatgttcaaaaaaaagagacacaggccggttacgccgttggcgacgtgcccatcacggagcggctacgtgtcggtcccgctccagagtgttcttgcacagcctggacgtttccttctcctcttcccgcagcccggtttgccgaccaggttccaccgttccagagtagccaagcgaatcccgtgtctggttcgcgcgatggcggaggagcagtccaacccccagcaccagcaagcggaggagagggaggttatggtggagcagcagcagccgaggagggccccgaagctgaggtacctggacttcgtccaggtggcggctgcccaggccgcggtgtgcctcgctgggctctacggcctcgccaaggaccacgccggcccgctccgccccagcgttgacgccgtcgagtctgccgtcaagggcgtcgttagccccgtctacgaccgcttcggcggcctgccgctcgacgtcctcgccttcgtcgaccgcaaggtggacgacacggtgcacgaggtggacaagcacctcccgggcgcgctgaaggcggcgtcggcgcatgtctacgcggtggttcggggcgtgccggaggtggcgcgcgagctggcggccgaggcgcagcggtcgggcgtgaggggcgcagcccgtgcggcgctcgcgatgacggagccggtggcgcgggacgtgtacggccgcgtggagcccgtggccaaggacctctacgtgcggtacgagcccgcggcggagcacctggccgtctccgcctggcgctcgctgaacggcctgccggtgttcccgcacgtcgcggagatcgtcgtgcccaccgccgcgcactgggccgacaagtacaacagggcggtcgcagccgccgcggagcacggctacgcgggggccaagtacctccccgccatccccaccgaacgcatcgccaaggtgttttcgtcggcgccagaggccgagccgctggcagagggccagtagtgtgtgtgtgtgtgcgcgcgcgcgcgagctcgtctttgccggtggtgactctggatttggatcaccttccgaactgaactgaaaataaggaagcgtgaatccgggggccagttaaagatggtggtatggtatggtagcggcgttgtactagatgcgtgatgggacgatggttacggaccatgatgatgacgctgtgttccatttagctctctgctgcgtgcttttgtataaaagaagtggttcgatgtcgcaatccctgtgtttatctgacgatgcggttttttggctgttttagtttttgtttggtcagttcaggttagggcgaaaacgataagcttgcgtcaatgctatgcttttagagcatcttttgaagactctttatttttgaccctatttaactctttatttgtcattc

SEQ ID NO: 67500 - DNA, 734 bp, Zea Mays
gtcatcagtagggtaaaactaacctgtctcacgacggtctaaacccagctcacgttccctattggtgggtgaacaatccaacacttggtgaattctgcttcacaatgataggaagagccgacatcgaaggatcaaaaagcaacgtcgctatgaacgcttggctgccacaagccagttatccctgtggtaacttttctgacacctctagcttcaaactccgaaggtctaaaggatcgataggccacgctttcacggttcgtattcgtactggaaatcagaatcaaacgagcttttacccttttgttccacacaagatttctgttctcgttgagctcatcttaggacacctgcgttatcttttaacagatgtgccgccccagccaaactccccacctgacaatgtcttccgcccggatcggcccggcgaggccgggccttggagccaaaaggaggggcggtgccccgcttccgacccacggaataagtaaaataacgttaaaagtagtggtatttcacttgcgcccggaggctcccacttatcctacacctctcaagtcatttcacaaagtcggactagagtcaagctcaacagggtcttctttccccgctgattccgccaagcccgttcccttggctgtggtttcgctggatagtagacagggacagtgggaatctcgttaatccattcatgcgcgtcactaattagatgacgaggcatttggctaccttaagag
